United States Patent Application Publication US 2024/0327476 A1 - sequence listing, part 30

SEQ ID NO: 33871 - DNA, 3805 bp, Homo sapiens
  source 1..3805: mol_type = unassigned DNA
gtcgccgcgtgccgagcgtcctggcgcggccgaggggaagcagcggggctgcccgggttacgctggccacccgcacctggtcctgtggcttcgaccactagtcagcaaggccccggagaggccagcgaagaggaggggctcgttggctttacggagacgcgcggagcaccctcaaggtgccacacgctcgcctgctccctgttcctacatcctgggcgtcttcccaggctgtcatataactcctgagaatagtggttcttaactctgtaagtatatatacttgtttcaggcattcagatttgggagaagtagccccagaaataaaagcatcagagagacgaacagctgtggccattgcagatttggaatggagagaaatggaaggagatgattgcgagttccgttatggagatggtacaaatgaggctcaggacaatgattttccaacagtggagagaagcaggcttcaagaaatgctgtcacttttgggcctagagacgtaccaggtccagaaactcagcctccaggactctctgcagatcagttttgacagtatgaagaactgggcccctcaggttcccaaagacttgccctggaatttcctcaggaagttgcaggccctcaatgctgatgccaggaataccactatggtgctggacgtgctcccagacgccaggcctgtggagaaggagagccagatggaagaggagatcatctactgggacccagctgatgaccttgctgccgacatttattccttttctgagctgcccacccctgatacgccagtgaaccccttagaccttctctgtgccctgctgctctcctcagacagtttcctgcaacaagaaatagcgttgaaaatggccctctgccagtttgcactcccactcgtgttgcctgactcggagaaccactaccatacatttctgctgtgggccatgcggggcattgtgaggacatggtggtcccagcccccaaggggcatggggagcttccgggaagacagcgtggtcttgtccagggcgcccgccttcgccttcgtgcgcatggacgtcagtagcaactccaagtcccagcttctcaacgccgtcctcagcccgggccacaggcagtgggactgcttctggcatcgggacctcaacttgggcaccaatgcccgggagatttcggatgggttggtagaaatttcctggttttttcccagcggaagggaggacttggacattttcccagaacctgtggcctttctgaacctgagaggtgacatcgggtctcactggctgcagtttaagctcttgacagaaatctcctccgctgtgtttatattgactgacaatatcagtaagaaggaatacaaattgctgtactccatgaaggagtcaaccacaaaatactacttcatcctgagtccctaccgtgggaagcgcaacacaaacctgagatttctgaataagttaattcctgtgctgaaaatagaccactcacatgtcctggtaaaggtcagcagcactgacagcgacagcttcgtgaagaggatccgggccatcgttgggaatgtgctgcgggcaccctgcaggcgggtatctgtggaggacatggcgcacgcagcccgcaaactgggcctaaaggtcgacgaggactgtgaggagtgtcagaaagcgaaagaccggatggagaggattaccaggaaaatcaaagactcggatgcctacagaagggacgagctgaggctgcagggggacccctggagaaaggcagcccaagtggagaaggagttctgccagctccagtgggccgtggacccccctgagaagcacagggctgagctgaggcggcggctgctagaacttcgaatgcagcagaacggccatgatccctcctcgggggtgcaggagttcatctcggggatcagcagcccctccttgagtgagaagcagtacttcctgaggtggatggagtggggcctggcacgggtggcccagccgcgactgagacagcctccggagacgcttctcaccctgagaccaaagcatgggggcaccacagacgtgggggagccgctctggcctgagcccctaggggtggaacacttcttgcgggagatgggacagttttatgaggctgagagctgtcttgtggaggcagggaggctgccggcaggccagaggcgttttgcccacttcccaggcttggcctcggagctgctgctgacagggctgcctctggagctaatcgatgggagcacgctgagcatgcccgtccgctgggtcacagggctcctgaaggagctgcacgtccgactggagagacggtcaaggctggtggttctgtcaaccgtcggggtgccaggcacgggcaagtccacactcctcaacaccatgtttgggctgcggtttgccacagggaagagctgcggtcctcgaggggccttcatgcagctcatcacagtggctgagggcttcagccaggacctgggctgtgaccacatcctggtgatagactccgggggcttgataggtggggccttgacgtcagctggggacagatttgagctggaggcttccttggccactctgctcatgggactgagcaatgtcaccgtgatcagtctagctgaaaccaaggacattccagcagctattctgcatgcatttctgaggttagaaaaaacggggcacatgcccaactaccagtttgtataccagaaccttcatgatgtatctgttcccggccctaggcccagagacaagagacagctcctggatccacctggtgacctgagcagggctgcagcccagatggagaaacagggcgacggcttccgggcactggcaggcctggccttctgcgaccctgagaagcagcacatctggcacatcccaggcctgtggcacggagcacctcccatggccgcagtgagcttggcctacagtgaagccatatttgaattgaagagatgcctactcgaaaacatcaggaacggcttgtcgaaccaaaacaaaaacatccagcagctcattgagctggtgagacggctgtgagtgtgcagagaaacccagttcaggtgtaggaggctgctgtgggcagccctgtctgatggggcacccgtgtggggctgtgctctggtgcctgagaatggctggtgcccaatcgacatgagaagacgaggaaaagacagggtttggagtctcctcaacagtgttaaaagaggaagtgacctcacagaccagctcagagatgttaccaagaatatcacagcccccagggtagggagacaagcagcagtttgttctgtctcagctcctgtcaaggatcctgcggggtgggccctctgtatagctgctctctgtcactggcccctggagtgggagcagcgtccttagtcactgcaggcccaggcgggcaggtggtcccaggacagaggtggggaagttgtcctgaggaagcagaagtaggccttgctcccgcccaacccaagggcctccagtggaccagcattcaagatgtgagtgcccgtggtgtgcaaggcactcccatggcaccgtatttattgactgatctgtgaaggcttccctgacccctgcccaggaagagttcactggtcgctctgttgtgccccacagcactttgttatacctctgccacacacttcacgcagcgcgttgtaactcatgtgtttacatgtctgtccccccagactgtgagctccttgagggcagggactgtacattctccagctctgtgtccccagggcctggcacattgtagacgcttaataaatgtctgttaaatgaatgagtgc

SEQ ID NO: 33872 - DNA, 5658 bp, Homo sapiens
  source 1..5658: mol_type = unassigned DNA
ataattttcaaacatatgacaggaaagcatttttatgatactttcttgtattttacatgtgtcttatttttggaatcagaaaaacatatatggtgatattagtaattttcaaaaactgcactgcagagagctcccttgcccctgagtagggccgttggaagtgctgttctctgccgtcttggtccgactccgcctgatacacagacaggaaacttagcaaggcttagaagtgggctggagcccgagttgacagattggctggtgttataatttttaaaattactggctatagggtacagtggctcattattttttgttgagatgaggttttgccatgttgcccaggctagtcttgaactcctgggctcaagtgatccccttgctttggcctcccagatgctggaattacaggcatgagtcactgcaccctgctctaaaatgatactattctgactgcagcatccccctccacatttcatgttctgatgtgagcaagagagccttctctttctgcccatgtatttattatccatgtggactcactaattgctggttttcaatggttttaaatcagttactgtgtttatgtttgtgctcacattgtcctagatttgaccagtgagagttcctcaggctggctcctgtgcccatcatgttttcgagcatttccttactttctgaaataagatgctcaggctcctcctgttctttccttgccccagccatcattcaggatctccaaggagtccgtttcttttagcgtggaaggtattaaagggtgctaggcatgcccattgccacaacagtgtctttgcttcttggccctttccgtggacagttaggaaatagatgcatgtgtacactcgtatacacacagagatatgtgtgcacacctacatctacacacttaaacacatatgcacataagcatgcatatagaaatcacagttcacacgagtgcctccagttccattgcgcctctgcaagttctgctgtaactctccattctatgtttgtatgtcctttcttcagcagttagttagcaccctggctcctggcagaatcaatacatttactcatttgctcactctatgatacatctaaaatagtttagtctttttttttttttttttgagatggagttttgttcttgtcacccaggctggagtgcagtggtgcgatctcggctcactgcaactctgcctcctgtgttcaagtgattctcctgccttagcctccgaagtagctgggattacaggcgcctgccaccacgcctggctaatttttatatttttagtagagacagggtttcaccatgttggccaggccagtctcgaactcctgacctcaagtaatccgcccgcctcagccttccaaagtgctggaattgcaggcgtgagccaccacaccaggcctaaaatagtttattcttaattagactgcacttatcatagctatttaaaataattcaggatcaccccttccagaccacagtgttaacttcagatgaacatccttctagagttctgtatatatacctatagataaacatacacaattttattaaattgtaatcatactgtgcatacttttctgtagcctgactttcccccgactaattaatataacagctttccctaatatctcatccagcatctttttgtccacaaaagaaatccatagcgtattttttaatggctgcagaatttgaccataattccgttattgcactttgattttaaaaggcatcagtttttcgctattatatataaagctggcatcaacatctttgtaactaaatcttaattatttccttaggatagaagtggaattactgggcaaagggtatgtatatttttctgtctttctgaatgactgtatttgtgctctggccagcagttttggagagtgctggttttctagaccagtgtttctcaactgtgggtgcatatcagaatcattgagggcacttttaaaagcagtgatacccaggaccagctcccagagattctggtttcatggatctggggtgtgacccagggtttatagtttttaaaagctctccaagagattttatatgcggccagtttgataggtgaaagtggtattccatttttttaattataattttcttctgaaattgtttcaggcattcagatttgggagaagtagccccagaaataaaagcatcagagagacgaacagctgtggccattgcagatttggaatggagagaaatggaaggagatgattgcgagttccgttatggagatggtacaaatgaggctcaggacaatgattttccaacagtggagagaagcaggcttcaagaaatgctgtcacttttgggcctagagacgtaccaggtccagaaactcagcctccaggactctctgcagatcagttttgacagtatgaagaactgggcccctcaggttcccaaagacttgccctggaatttcctcaggaagttgcaggccctcaatgctgatgccaggaataccactatggtgctggacgtgctcccagacgccaggcctgtggagaaggagagccagatggaagaggagatcatctactgggacccagctgatgaccttgctgccgacatttattccttttctgagctgcccacccctgatacgccagtgaaccccttagaccttctctgtgccctgctgctctcctcagacagtttcctgcaacaagaaatagcgttgaaaatggccctctgccagtttgcactcccactcgtgttgcctgactcggagaaccactaccatacatttctgctgtgggccatgcggggcattgtgaggacatggtggtcccagcccccaaggggcatggggagcttccgggaagacagcgtggtcttgtccagggcgcccgccttcgccttcgtgcgcatggacgtcagtagcaactccaagtcccagcttctcaacgccgtcctcagcccgggccacaggcagtgggactgcttctggcatcgggacctcaacttgggcaccaatgcccgggagatttcggatgggttggtagaaatttcctggttttttcccagcggaagggaggacttggacattttcccagaacctgtggcctttctgaacctgagaggtgacatcgggtctcactggctgcagtttaagctcttgacagaaatctcctccgctgtgtttatattgactgacaatatcagtaagaaggaatacaaattgctgtactccatgaaggagtcaaccacaaaatactacttcatcctgagtccctaccgtgggaagcgcaacacaaacctgagatttctgaataagttaattcctgtgctgaaaatagaccactcacatgtcctggtaaaggtcagcagcactgacagcgacagcttcgtgaagaggatccgggccatcgttgggaatgtgctgcgggcaccctgcaggcgggtatctgtggaggacatggcgcacgcagcccgcaaactgggcctaaaggtcgacgaggactgtgaggagtgtcagaaagcgaaagaccggatggagaggattaccaggaaaatcaaagactcggatgcctacagaagggacgagctgaggctgcagggggacccctggagaaaggcagcccaagtggagaaggagttctgccagctccagtgggccgtggacccccctgagaagcacagggctgagctgaggcggcggctgctagaacttcgaatgcagcagaacggccatgatccctcctcgggggtgcaggagttcatctcggggatcagcagcccctccttgagtgagaagcagtacttcctgaggtggatggagtggggcctggcacgggtggcccagccgcgactgagacagcctccggagacgcttctcaccctgagaccaaagcatgggggcaccacagacgtgggggagccgctctggcctgagcccctaggggtggaacacttcttgcgggagatgggacagttttatgaggctgagagctgtcttgtggaggcagggaggctgccggcaggccagaggcgttttgcccacttcccaggcttggcctcggagctgctgctgacagggctgcctctggagctaatcgatgggagcacgctgagcatgcccgtccgctgggtcacagggctcctgaaggagctgcacgtccgactggagagacggtcaaggctggtggttctgtcaaccgtcggggtgccaggcacgggcaagtccacactcctcaacaccatgtttgggctgcggtttgccacagggaagagctgcggtcctcgaggggccttcatgcagctcatcacagtggctgagggcttcagccaggacctgggctgtgaccacatcctggtgatagactccgggggcttgataggtggggccttgacgtcagctggggacagatttgagctggaggcttccttggccactctgctcatgggactgagcaatgtcaccgtgatcagtctagctgaaaccaaggacattccagcagctattctgcatgcatttctgaggttagaaaaaacggggcacatgcccaactaccagtttgtataccagaaccttcatgatgtatctgttcccggccctaggcccagagacaagagacagctcctggatccacctggtgacctgagcagggctgcagcccagatggagaaacagggcgacggcttccgggcactggcaggcctggccttctgcgaccctgagaagcagcacatctggcacatcccaggcctgtggcacggagcacctcccatggccgcagtgagcttggcctacagtgaagccatatttgaattgaagagatgcctactcgaaaacatcaggaacggcttgtcgaaccaaaacaaaaacatccagcagctcattgagctggtgagacggctgtgagtgtgcagagaaacccagttcaggtgtaggaggctgctgtgggcagccctgtctgatggggcacccgtgtggggctgtgctctggtgcctgagaatggctggtgcccaatcgacatgagaagacgaggaaaagacagggtttggagtctcctcaacagtgttaaaagaggaagtgacctcacagaccagctcagagatgttaccaagaatatcacagcccccagggtagggagacaagcagcagtttgttctgtctcagctcctgtcaaggatcctgcggggtgggccctctgtatagctgctctctgtcactggcccctggagtgggagcagcgtccttagtcactgcaggcccaggcgggcaggtggtcccaggacagaggtggggaagttgtcctgaggaagcagaagtaggccttgctcccgcccaacccaagggcctccagtggaccagcattcaagatgtgagtgcccgtggtgtgcaaggcactcccatggcaccgtatttattgactgatctgtgaaggcttccctgacccctgcccaggaagagttcactggtcgctctgttgtgccccacagcactttgttatacctctgccacacacttcacgcagcgcgttgtaactcatgtgtttacatgtctgtccccccagactgtgagctccttgagggcagggactgtacattctccagctctgtgtccccagggcctggcacattgtagacgcttaataaatgtctgttaaatgaa

SEQ ID NO: 33873 - DNA, 3563 bp, Homo sapiens
  source 1..3563: mol_type = unassigned DNA
aggaagcgaaggaggcgggagcggagacctcgctgcgctcatggcgtcgcccgggcattcagatttgggagaagtagccccagaaataaaagcatcagagagacgaacagctgtggccattgcagatttggaatggagagaaatggaaggagatgattgcgagttccgttatggagatggtacaaatgaggctcaggacaatgattttccaacagtggagagaagcaggcttcaagaaatgctgtcacttttgggcctagagacgtaccaggtccagaaactcagcctccaggactctctgcagatcagttttgacagtatgaagaactgggcccctcaggttcccaaagacttgccctggaatttcctcaggaagttgcaggccctcaatgctgatgccaggaataccactatggtgctggacgtgctcccagacgccaggcctgtggagaaggagagccagatggaagaggagatcatctactgggacccagctgatgaccttgctgccgacatttattccttttctgagctgcccacccctgatacgccagtgaaccccttagaccttctctgtgccctgctgctctcctcagacagtttcctgcaacaagaaatagcgttgaaaatggccctctgccagtttgcactcccactcgtgttgcctgactcggagaaccactaccatacatttctgctgtgggccatgcggggcattgtgaggacatggtggtcccagcccccaaggggcatggggagcttccgggaagacagcgtggtcttgtccagggcgcccgccttcgccttcgtgcgcatggacgtcagtagcaactccaagtcccagcttctcaacgccgtcctcagcccgggccacaggcagtgggactgcttctggcatcgggacctcaacttgggcaccaatgcccgggagatttcggatgggttggtagaaatttcctggttttttcccagcggaagggaggacttggacattttcccagaacctgtggcctttctgaacctgagaggtgacatcgggtctcactggctgcagtttaagctcttgacagaaatctcctccgctgtgtttatattgactgacaatatcagtaagaaggaatacaaattgctgtactccatgaaggagtcaaccacaaaatactacttcatcctgagtccctaccgtgggaagcgcaacacaaacctgagatttctgaataagttaattcctgtgctgaaaatagaccactcacatgtcctggtaaaggtcagcagcactgacagcgacagcttcgtgaagaggatccgggccatcgttgggaatgtgctgcgggcaccctgcaggcgggtatctgtggaggacatggcgcacgcagcccgcaaactgggcctaaaggtcgacgaggactgtgaggagtgtcagaaagcgaaagaccggatggagaggattaccaggaaaatcaaagactcggatgcctacagaagggacgagctgaggctgcagggggacccctggagaaaggcagcccaagtggagaaggagttctgccagctccagtgggccgtggacccccctgagaagcacagggctgagctgaggcggcggctgctagaacttcgaatgcagcagaacggccatgatccctcctcgggggtgcaggagttcatctcggggatcagcagcccctccttgagtgagaagcagtacttcctgaggtggatggagtggggcctggcacgggtggcccagccgcgactgagacagcctccggagacgcttctcaccctgagaccaaagcatgggggcaccacagacgtgggggagccgctctggcctgagcccctaggggtggaacacttcttgcgggagatgggacagttttatgaggctgagagctgtcttgtggaggcagggaggctgccggcaggccagaggcgttttgcccacttcccaggcttggcctcggagctgctgctgacagggctgcctctggagctaatcgatgggagcacgctgagcatgcccgtccgctgggtcacagggctcctgaaggagctgcacgtccgactggagagacggtcaaggctggtggttctgtcaaccgtcggggtgccaggcacgggcaagtccacactcctcaacaccatgtttgggctgcggtttgccacagggaagagctgcggtcctcgaggggccttcatgcagctcatcacagtggctgagggcttcagccaggacctgggctgtgaccacatcctggtgatagactccgggggcttgataggtggggccttgacgtcagctggggacagatttgagctggaggcttccttggccactctgctcatgggactgagcaatgtcaccgtgatcagtctagctgaaaccaaggacattccagcagctattctgcatgcatttctgaggttagaaaaaacggggcacatgcccaactaccagtttgtataccagaaccttcatgatgtatctgttcccggccctaggcccagagacaagagacagctcctggatccacctggtgacctgagcagggctgcagcccagatggagaaacagggcgacggcttccgggcactggcaggcctggccttctgcgaccctgagaagcagcacatctggcacatcccaggcctgtggcacggagcacctcccatggccgcagtgagcttggcctacagtgaagccatatttgaattgaagagatgcctactcgaaaacatcaggaacggcttgtcgaaccaaaacaaaaacatccagcagctcattgagctggtgagacggctgtgagtgtgcagagaaacccagttcaggtgtaggaggctgctgtgggcagccctgtctgatggggcacccgtgtggggctgtgctctggtgcctgagaatggctggtgcccaatcgacatgagaagacgaggaaaagacagggtttggagtctcctcaacagtgttaaaagaggaagtgacctcacagaccagctcagagatgttaccaagaatatcacagcccccagggtagggagacaagcagcagtttgttctgtctcagctcctgtcaaggatcctgcggggtgggccctctgtatagctgctctctgtcactggcccctggagtgggagcagcgtccttagtcactgcaggcccaggcgggcaggtggtcccaggacagaggtggggaagttgtcctgaggaagcagaagtaggccttgctcccgcccaacccaagggcctccagtggaccagcattcaagatgtgagtgcccgtggtgtgcaaggcactcccatggcaccgtatttattgactgatctgtgaaggcttccctgacccctgcccaggaagagttcactggtcgctctgttgtgccccacagcactttgttatacctctgccacacacttcacgcagcgcgttgtaactcatgtgtttacatgtctgtccccccagactgtgagctccttgagggcagggactgtacattctccagctctgtgtccccagggcctggcacattgtagacgcttaataaatgtctgttaaatgaa

SEQ ID NO: 33874 - DNA, 885 bp, Homo sapiens
  source 1..885: mol_type = unassigned DNA
actgtggggccgtcgtcgccgcgtgccgagcgtcctggcgcggccgaggggaagcagcggggctgcccgggttacgctggccacccgcacctggtcctgtggcttcgaccactagtcagcaaggccccggagaggccagcgaagaggaggggctcgttggctttacggagacgcgcggagcaccctcaaggtgccacacgctcgcctgctccctgttcctacatcctgggcgtcttcccaggctgtcatataactcctgagaatagtggttcttaactctgatagaagtggaattactgggcaaagggcattcagatttgggagaagtagccccagaaataaaagcatcagagagacgaacagctgtggccattgcagatttggaatggagagaaatggaaggagatgattgcgagttccgttatggagatggtacaaatgaggctcaggacaatgattttccaacagtggagagaagcaggcttcaagaaatgctgtcacttttgggcctagagacgtaccaggtccagaaactcagcctccaggactctctgcagatcagttttgacagtatgaagaactgggcccctcaggttcccaaagacttgccctggaatttcctcaggaagttgcaggccctcaatgctgatgccaggaataccactatggtgctggacgtgctcccagacgccaggcctgtggagaaggagagccagatggaagaggagatcatctactgggacccagctgatgaccttgctgccgacatttattccttttctgagctgcccacccctgatacgccagtgaaccccttagaccttctctgtgccctgctgctctcctcagacagtttcctgcaacaagaaatagcgttgaaaatgg

SEQ ID NO: 33875 - DNA, 3596 bp, Homo sapiens
  source 1..3596: mol_type = unassigned DNA
cggccgcgcggaggaagcgaaggaggcgggagcggagacctcgctgcgctcatggcgtcgcccggaagtggaattactgggcaaagggcattcagatttgggagaagtagccccagaaataaaagcatcagagagacgaacagctgtggccattgcagatttggaatggagagaaatggaaggagatgattgcgagttccgttatggagatggtacaaatgaggctcaggacaatgattttccaacagtggagagaagcaggcttcaagaaatgctgtcacttttgggcctagagacgtaccaggtccagaaactcagcctccaggactctctgcagatcagttttgacagtatgaagaactgggcccctcaggttcccaaagacttgccctggaatttcctcaggaagttgcaggccctcaatgctgatgccaggaataccactatggtgctggacgtgctcccagacgccaggcctgtggagaaggagagccagatggaagaggagatcatctactgggacccagctgatgaccttgctgccgacatttattccttttctgagctgcccacccctgatacgccagtgaaccccttagaccttctctgtgccctgctgctctcctcagacagtttcctgcaacaagaaatagcgttgaaaatggccctctgccagtttgcactcccactcgtgttgcctgactcggagaaccactaccatacatttctgctgtgggccatgcggggcattgtgaggacatggtggtcccagcccccaaggggcatggggagcttccgggaagacagcgtggtcttgtccagggcgcccgccttcgccttcgtgcgcatggacgtcagtagcaactccaagtcccagcttctcaacgccgtcctcagcccgggccacaggcagtgggactgcttctggcatcgggacctcaacttgggcaccaatgcccgggagatttcggatgggttggtagaaatttcctggttttttcccagcggaagggaggacttggacattttcccagaacctgtggcctttctgaacctgagaggtgacatcgggtctcactggctgcagtttaagctcttgacagaaatctcctccgctgtgtttatattgactgacaatatcagtaagaaggaatacaaattgctgtactccatgaaggagtcaaccacaaaatactacttcatcctgagtccctaccgtgggaagcgcaacacaaacctgagatttctgaataagttaattcctgtgctgaaaatagaccactcacatgtcctggtaaaggtcagcagcactgacagcgacagcttcgtgaagaggatccgggccatcgttgggaatgtgctgcgggcaccctgcaggcgggtatctgtggaggacatggcgcacgcagcccgcaaactgggcctaaaggtcgacgaggactgtgaggagtgtcagaaagcgaaagaccggatggagaggattaccaggaaaatcaaagactcggatgcctacagaagggacgagctgaggctgcagggggacccctggagaaaggcagcccaagtggagaaggagttctgccagctccagtgggccgtggacccccctgagaagcacagggctgagctgaggcggcggctgctagaacttcgaatgcagcagaacggccatgatccctcctcgggggtgcaggagttcatctcggggatcagcagcccctccttgagtgagaagcagtacttcctgaggtggatggagtggggcctggcacgggtggcccagccgcgactgagacagcctccggagacgcttctcaccctgagaccaaagcatgggggcaccacagacgtgggggagccgctctggcctgagcccctaggggtggaacacttcttgcgggagatgggacagttttatgaggctgagagctgtcttgtggaggcagggaggctgccggcaggccagaggcgttttgcccacttcccaggcttggcctcggagctgctgctgacagggctgcctctggagctaatcgatgggagcacgctgagcatgcccgtccgctgggtcacagggctcctgaaggagctgcacgtccgactggagagacggtcaaggctggtggttctgtcaaccgtcggggtgccaggcacgggcaagtccacactcctcaacaccatgtttgggctgcggtttgccacagggaagagctgcggtcctcgaggggccttcatgcagctcatcacagtggctgagggcttcagccaggacctgggctgtgaccacatcctggtgatagactccgggggcttgataggtggggccttgacgtcagctggggacagatttgagctggaggcttccttggccactctgctcatgggactgagcaatgtcaccgtgatcagtctagctgaaaccaaggacattccagcagctattctgcatgcatttctgaggttagaaaaaacggggcacatgcccaactaccagtttgtataccagaaccttcatgatgtatctgttcccggccctaggcccagagacaagagacagctcctggatccacctggtgacctgagcagggctgcagcccagatggagaaacagggcgacggcttccgggcactggcaggcctggccttctgcgaccctgagaagcagcacatctggcacatcccaggcctgtggcacggagcacctcccatggccgcagtgagcttggcctacagtgaagccatatttgaattgaagagatgcctactcgaaaacatcaggaacggcttgtcgaaccaaaacaaaaacatccagcagctcattgagctggtgagacggctgtgagtgtgcagagaaacccagttcaggtgtaggaggctgctgtgggcagccctgtctgatggggcacccgtgtggggctgtgctctggtgcctgagaatggctggtgcccaatcgacatgagaagacgaggaaaagacagggtttggagtctcctcaacagtgttaaaagaggaagtgacctcacagaccagctcagagatgttaccaagaatatcacagcccccagggtagggagacaagcagcagtttgttctgtctcagctcctgtcaaggatcctgcggggtgggccctctgtatagctgctctctgtcactggcccctggagtgggagcagcgtccttagtcactgcaggcccaggcgggcaggtggtcccaggacagaggtggggaagttgtcctgaggaagcagaagtaggccttgctcccgcccaacccaagggcctccagtggaccagcattcaagatgtgagtgcccgtggtgtgcaaggcactcccatggcaccgtatttattgactgatctgtgaaggcttccctgacccctgcccaggaagagttcactggtcgctctgttgtgccccacagcactttgttatacctctgccacacacttcacgcagcgcgttgtaactcatgtgtttacatgtctgtccccccagactgtgagctccttgagggcagggactgtacattctccagctctgtgtccccagggcctggcacattgtagacgcttaataaatgtctgttaaatgaa

SEQ ID NO: 33876 - DNA, 3408 bp, Homo sapiens
  source 1..3408: mol_type = unassigned DNA
actgtggggccgtcgtcgccgcgtgccgagcgtcctggcgcggccgaggggaagcagcggggctgcccgggttacgctggccacccgcacctggtcctgtggcttcgaccactagtcagcaaggccccggagaggccagcgaagaggaggggctcgttggctttacggagacgcgcggagcaccctcaaggtgccacacgctcgcctgctccctgttcctacatcctgggcgtcttcccaggctgtcatataactcctgagaatagtggttcttaactctaaagagtcttgctgtgtcacccaggctggagtgcagtggtgaaatcttggctcactgtggcttcagcctcccaggctcaagagatcctaccatctcagcctcctgagtagctgggactacaggatagaagtggaattactgggcaaagggcattcagatttgggagaagtagccccagaaataaaagcatcagagagacgaacagctgtggccattgcagatttggaatggagagaaatggaaggagatgattgcgagttccgttatggagatggtacaaatgaggctcaggacaatgattttccaacagtggagagaagcaggcttcaagaaatgctgtcacttttgggcctagagacgtaccaggtccagaaactcagcctccaggactctctgcagatcagttttgacagtatgaagaactgggcccctcaggttcccaaagacttgccctggaatttcctcaggaagttgcaggccctcaatgctgatgccaggaataccactatggtgctggacgtgctcccagacgccaggcctgtggagaaggagagccagatggaagaggagatcatctactgggacccagctgatgaccttgctgccgacatttattccttttctgagctgcccacccctgatacgccagtgaaccccttagaccttctctgtgccctgctgctctcctcagacagtttcctgcaacaagaaatagcgttgaaaatggccctctgccagtttgcactcccactcgtgttgcctgactcggagaaccactaccatacatttctgctgtgggccatgcggggcattgtgaggacatggtggtcccagcccccaaggggcatggggagcttccgggaagacagcgtggtcttgtccagggcgcccgccttcgccttcgtgcgcatggacgtcagtagcaactccaagtcccagcttctcaacgccgtcctcagcccgggccacaggcagtgggactgcttctggcatcgggacctcaacttgggcaccaatgcccgggagatttcggatgggttggtagaaatttcctggttttttcccagcggaagggaggacttggacattttcccagaacctgtggcctttctgaacctgagaggtgacatcgggtctcactggctgcagtttaagctcttgacagaaatctcctccgctgtgtttatattgactgacaatatcagtaagaaggaatacaaattgctgtactccatgaaggagtcaaccacaaaatactacttcatcctgagtccctaccgtgggaagcgcaacacaaacctgagatttctgaataagttaattcctgtgctgaaaatagaccactcacatgtcctggtaaaggtcagcagcactgacagcgacagcttcgtgaagaggatccgggccatcgttgggaatgtgctgcgggcaccctgcaggcgggtatctgtggaggacatggcgcacgcagcccgcaaactgggcctaaaggtcgacgaggactgtgaggagtgtcagaaagcgaaagaccggatggagaggattaccaggaaaatcaaagactcggatgcctacagaagggacgagctgaggctgcagggggacccctggagaaaggcagcccaagtggagaaggagttctgccagctccagtgggccgtggacccccctgagaagcacagggctgagctgaggcggcggctgctagaacttcgaatgcagcagaacggccatgatccctcctcgggggtgcaggagttcatctcggggatcagcagcccctccttgagtgagaagcagtacttcctgaggtggatggagtggggcctggcacgggtggcccagccgcgactgagacagcctccggagacgcttctcaccctgagaccaaagcatgggggcaccacagacgtgggggagccgctctggcctgagcccctaggggtggaacacttcttgcgggagatgggacagttttatgaggctgagagctgtcttgtggaggcagggaggctgccggcaggccagaggcgttttgcccacttcccaggcttggcctcggagctgctgctgacagggctgcctctggagctaatcgatgggagcacgctgagcatgcccgtccgctgggtcacagggctcctgaaggagctgcacgtccgactggagagacggtcaaggctggtggttctgtcaaccgtcggggtgccaggcacgggcaagtccacactcctcaacaccatgtttgggctgcggtttgccacagggaagagctgcggtcctcgaggggccttcatgcagctcatcacagtggctgagggcttcagccaggacctgggctgtgaccacatcctggtgatagactccgggggcttgataggtggggccttgacgtcagctggggacagatttgagctggaggcttccttggccactctgctcatgggactgagcaatgtcaccgtgatcagtctagctgaaaccaaggacattccagcagctattctgcatgcatttctgaggttagaaaaaacggggcacatgcccaactaccagtttgtataccagaaccttcatgatgtatctgttcccggccctaggcccagagacaagagacagctcctggatccacctggtgacctgagcagggctgcagcccagatggagaaacagggcgacggcttccgggcactggcaggcctggccttctgcgaccctgagaagcagcacatctggcacatcccaggcctgtggcacggagcacctcccatggccgcagtgagcttggcctacagtgaagccatatttgaattgaagagatgcctactcgaaaacatcaggaacggcttgtcgaaccaaaacaaaaacatccagcagctcattgagctggtgagacggctgtgagtgtgcagagaaacccagttcaggtgtaggaggctgctgtgggcagccctgtctgatggggcacccgtgtggggctgtgctctggtgcctgagaatggctggtgcccaatcgacatgagaagacgaggaaaagacagggtttggagtctcctcaacagtgttaaaagaggaagtgacctcacagaccagctcagagatgttaccaagaatatcacagcccccag

SEQ ID NO: 33877 - DNA, 4042 bp, Homo sapiens
  source 1..4042: mol_type = unassigned DNA
attttacaatgggtaccgtctcagagaggccagcaactcgtccaacacagcactgcaagtaagaagtaggaaagttattgttttgcttaataataaggccttacgcttcagggctaaagaaaagccttttcttacagaaattaaactccaattacagaaaggtgtgaagttcagtaaggccctggggcaggttatcctacagcttttggcaccgcaggcaccgcccggcgagttccggcctccaggcacctgggcaggtgggcgttgggcgggctgcgggctgacctgggccgccccgcccccaccccgccccagctgtccccgggctgctccgagaggaccccgggcccaccttaccccacctcaccccacctccacccctggagcgcgtcccggagcgggcgggcggccggcgggccaggcccctccccggcgccgagccgcggccgcgcggaggaagcgaaggaggcgggagcggagacctcgctgcgctcatggcgtcgcccgggatagaagtggaattactgggcaaagggcattcagatttgggagaagtagccccagaaataaaagcatcagagagacgaacagctgtggccattgcagatttggaatggagagaaatggaaggagatgattgcgagttccgttatggagatggtacaaatgaggctcaggacaatgattttccaacagtggagagaagcaggcttcaagaaatgctgtcacttttgggcctagagacgtaccaggtccagaaactcagcctccaggactctctgcagatcagttttgacagtatgaagaactgggcccctcaggttcccaaagacttgccctggaatttcctcaggaagttgcaggccctcaatgctgatgccaggaataccactatggtgctggacgtgctcccagacgccaggcctgtggagaaggagagccagatggaagaggagatcatctactgggacccagctgatgaccttgctgccgacatttattccttttctgagctgcccacccctgatacgccagtgaaccccttagaccttctctgtgccctgctgctctcctcagacagtttcctgcaacaagaaatagcgttgaaaatggccctctgccagtttgcactcccactcgtgttgcctgactcggagaaccactaccatacatttctgctgtgggccatgcggggcattgtgaggacatggtggtcccagcccccaaggggcatggggagcttccgggaagacagcgtggtcttgtccagggcgcccgccttcgccttcgtgcgcatggacgtcagtagcaactccaagtcccagcttctcaacgccgtcctcagcccgggccacaggcagtgggactgcttctggcatcgggacctcaacttgggcaccaatgcccgggagatttcggatgggttggtagaaatttcctggttttttcccagcggaagggaggacttggacattttcccagaacctgtggcctttctgaacctgagaggtgacatcgggtctcactggctgcagtttaagctcttgacagaaatctcctccgctgtgtttatattgactgacaatatcagtaagaaggaatacaaattgctgtactccatgaaggagtcaaccacaaaatactacttcatcctgagtccctaccgtgggaagcgcaacacaaacctgagatttctgaataagttaattcctgtgctgaaaatagaccactcacatgtcctggtaaaggtcagcagcactgacagcgacagcttcgtgaagaggatccgggccatcgttgggaatgtgctgcgggcaccctgcaggcgggtatctgtggaggacatggcgcacgcagcccgcaaactgggcctaaaggtcgacgaggactgtgaggagtgtcagaaagcgaaagaccggatggagaggattaccaggaaaatcaaagactcggatgcctacagaagggacgagctgaggctgcagggggacccctggagaaaggcagcccaagtggagaaggagttctgccagctccagtgggccgtggacccccctgagaagcacagggctgagctgaggcggcggctgctagaacttcgaatgcagcagaacggccatgatccctcctcgggggtgcaggagttcatctcggggatcagcagcccctccttgagtgagaagcagtacttcctgaggtggatggagtggggcctggcacgggtggcccagccgcgactgagacagcctccggagacgcttctcaccctgagaccaaagcatgggggcaccacagacgtgggggagccgctctggcctgagcccctaggggtggaacacttcttgcgggagatgggacagttttatgaggctgagagctgtcttgtggaggcagggaggctgccggcaggccagaggcgttttgcccacttcccaggcttggcctcggagctgctgctgacagggctgcctctggagctaatcgatgggagcacgctgagcatgcccgtccgctgggtcacagggctcctgaaggagctgcacgtccgactggagagacggtcaaggctggtggttctgtcaaccgtcggggtgccaggcacgggcaagtccacactcctcaacaccatgtttgggctgcggtttgccacagggaagagctgcggtcctcgaggggccttcatgcagctcatcacagtggctgagggcttcagccaggacctgggctgtgaccacatcctggtgatagactccgggggcttgataggtggggccttgacgtcagctggggacagatttgagctggaggcttccttggccactctgctcatgggactgagcaatgtcaccgtgatcagtctagctgaaaccaaggacattccagcagctattctgcatgcatttctgaggttagaaaaaacggggcacatgcccaactaccagtttgtataccagaaccttcatgatgtatctgttcccggccctaggcccagagacaagagacagctcctggatccacctggtgacctgagcagggctgcagcccagatggagaaacagggcgacggcttccgggcactggcaggcctggccttctgcgaccctgagaagcagcacatctggcacatcccaggcctgtggcacggagcacctcccatggccgcagtgagcttggcctacagtgaagccatatttgaattgaagagatgcctactcgaaaacatcaggaacggcttgtcgaaccaaaacaaaaacatccagcagctcattgagctggtgagacggctgtgagtgtgcagagaaacccagttcaggtgtaggaggctgctgtgggcagccctgtctgatggggcacccgtgtggggctgtgctctggtgcctgagaatggctggtgcccaatcgacatgagaagacgaggaaaagacagggtttggagtctcctcaacagtgttaaaagaggaagtgacctcacagaccagctcagagatgttaccaagaatatcacagcccccagggtagggagacaagcagcagtttgttctgtctcagctcctgtcaaggatcctgcggggtgggccctctgtatagctgctctctgtcactggcccctggagtgggagcagcgtccttagtcactgcaggcccaggcgggcaggtggtcccaggacagaggtggggaagttgtcctgaggaagcagaagtaggccttgctcccgcccaacccaagggcctccagtggaccagcattcaagatgtgagtgcccgtggtgtgcaaggcactcccatggcaccgtatttattgactgatctgtgaaggcttccctgacccctgcccaggaagagttcactggtcgctctgttgtgccccacagcactttgttatacctctgccacacacttcacgcagcgcgttgtaactcatgtgtttacatgtctgtccccccagactgtgagctccttgagggcagggactgtacattctccagctctgtgtccccagggcctggcacattgtagacgcttaataaatgtctgttaaatg

SEQ ID NO: 33878 - DNA, 591 bp, Homo sapiens
  source 1..591: mol_type = unassigned DNA
acgctggccacccgcacctggtcctgtggcttcgaccactagtcagcaaggccccggagaggccagcgaagaggaggggctcgttggctttacggagacgcgcggagcaccctcaaggtgccacacgctcgcctgctccctgttcctacatcctgggcgtcttcccaggctgtcatataactcctgagaatagtggttcttaactctatttggaatggagagaaatggaaggagatgattgcgagttccgttatggagatggtacaaatgaggctcaggacaatgattttccaacagtggagagaagcaggcttcaagaaatgctgtcacttttgggcctagagacgtaccaggtccagaaactcagcctccaggactctctgcagatcagttttgacagtatgaagaactgggcccctcaggttcccaaagacttgccctggaatttcctcaggaagttgcaggccctcaatgctgatgccaggaataccactatggtgctggacgtgctcccagacgccaggcctgtggagaaggagagccagatggaagaggagatcatctactgggacccagctgatgaccttgctg

SEQ ID NO: 33879 - DNA, 2074 bp, Homo sapiens
  source 1..2074: mol_type = unassigned DNA
ctgggccgcgaggcgcggggagtggccctaagcgcggggctgtacggggagggccgaggcgtggggcgaacgccggggcggggtcggggcggggccgggggaggcggaagcggcgcgtgaacctaagtcggagtcgcgttgaagccagcgtccggccggcagagcggcgtcggcggggacgcgccagcggagctccggctccttcgccctggacgcggaggccgcggtgtgcggggcgacggcgaggccggaagatggcctgggtgctcaagatggacgaggtgatcgagtccgggctggtgcacgacttcgacgccagcctctcgggcatcgggcaggaactgggcgccggcgcttacagcatgagtgatgtcttggcattgcccattttcaagcaggaagattccagccttccattggatggtgaaacagagcacccaccctttcagtatgtgatgtgtgctgcaacgtcaccagcagtaaaactgcatgatgaaacgcttacttatttgaaccaaggtcagtcatatgaaattcggatgctggataatcggaaaatgggtgatatgcctgagatcaatggaaaattagtaaagagcatcataagggttgtattccatgacagacggctacaatacacagagcatcagcaacttgaaggatggaagtggaatcgcccaggagacagacttcttgatttagatattccaatgtctgtgggaataattgacacaaggacgaatccaagccagttaaatgcggttgaatttctgtgggacccagcaaaacgcacctctgctttcattcaggtacactgcatcagcacagaatttactccacggaagcacggaggtgaaaagggagtgccctttaggatccaggttgacacctttaagcagaatgaaaatggagaatacacagatcatctacactcagctagctgccaaatcaaagtttttaagcctaaaggtgcagacaggaaacaaaaaactgaccgagagaagatggagaagagaacagctcatgaaaaagaaaagtatcagccgtcctatgataccacaatcctcacagagatgaggcttgagcctataattgaagatgcagttgaacatgagcagaaaaagtccagcaagcggactttgccagcagactacggtgattctctggcaaagcgaggcagttgttctccgtggcccgatgcccccacagcctatgtgaataacagcccttccccagcgcccactttcacctccccacagcagagcacttgcagtgtcccagacagcaattcttcttccccaaatcatcagggagatggagcttcacagacctctggtgaacaaattcagccttcagctacgatccaggaaacacagcaatggctgctcaaaaacagattctcttcctacacaagactgttctctaatttttcaggtgccgacttattaaaactgacaaaggaggatttagttcaaatttgtggtgcagccgatggaattcggctctataattcactgaagtcaaggtcggttagaccccgtttaaccatctatgtctgccgggagcagccaagcagcacagtgctgcaagggcagcagcaagctgcaagcagtgcaagcgagaatggcagtggggcaccctatgtttatcatgcaatctacttggaagaaatgattgcctcagaagttgctcgaaaacttgcgctggtgtttaatatccctctccaccaaattaatcaggtttacagacagggtcccaccggtattcacattcttgttagtgatcagatggttcagaattttcaagatgagagttgttttttattctccacagtaaaagctgaaagtagtgatggcatccacataattttgaagtgatgtcttatatagactgaactgtattcagtaccaaatagtcacgcttaaaagtgtgtgaagactgaatccaagaagtcttgggattggattttaccatatgaaatgtttcatattgaaaacacaagatgacctttctaatgagctgtatgagaggtgaatctcctcactgtcactgccatagccaagcatcctcatga

SEQ ID NO: 33880 - DNA, 4148 bp, Homo sapiens
  source 1..4148: mol_type = unassigned DNA
gtcgcgttgaagccagcgtccggccggcagagcggcgtcggcggggttggccggggcggtgtggcgctagagcctgggcgggccgggggcaaggagtcaaggcttgggggcgggtgacgggcgggcggagggcttgcccccgtgtggtcctcggagcggcccgaggtccagcctcccagcggtcccggaggaggatgcgaccggggggccccgggcggggcggtcggcggcggctgcagcgctagcggcgcgggggctgggcggcggcgccggcatgaggcgcagggccggtgtccgcgggagggtggcgctgccggcggcccggccgctcccgctgcaattgctcgctgggctcgtcgtgccctgccagtggggcccccgcagctctcgtcccggccgccgctggtgaccactcgccgcccctccggaggcttcacccgcgccctcccccaggacgcgccagcggagctccggctccttcgccctggacgcggaggccgcggtgtgcggggcgacggcgaggccggaagatggcctgggtgctcaagatggacgaggtgatcgagtccgggctggtgcacgacttcgacgccagcctctcgggcatcgggcaggaactgggcgccggcgcttacagcatgagtgatgtcttggcattgcccattttcaagcaggaagattccagccttccattggatggtgaaacagagcacccaccctttcagtatgtgatgtgtgctgcaacgtcaccagcagtaaaactgcatgatgaaacgcttacttatttgaaccaaggtcagtcatatgaaattcggatgctggataatcggaaaatgggtgatatgcctgagatcaatggaaaattagtaaagagcatcataagggttgtattccatgacagacggctacaatacacagagcatcagcaacttgaaggatggaagtggaatcgcccaggagacagacttcttgatttagatattccaatgtctgtgggaataattgacacaaggacgaatccaagccagttaaatgcggttgaatttctgtgggacccagcaaaacgcacctctgctttcattcaggtacactgcatcagcacagaatttactccacggaagcacggaggtgaaaagggagtgccctttaggatccaggttgacacctttaagcagaatgaaaatggagaatacacagatcatctacactcagctagctgccaaatcaaagtttttaagcctaaaggtgcagacaggaaacaaaaaactgaccgagagaagatggagaagagaacagctcatgaaaaagaaaagtatcagccgtcctatgataccacaatcctcacagagatgaggcttgagcctataattgaagatgcagttgaacatgagcagaaaaagtccagcaagcggactttgccagcagactacggtgattctctggcaaagcgaggcagttgttctccgtggcccgatgcccccacagcctatgtgaataacagcccttccccagcgcccactttcacctccccacagcagagcacttgcagtgtcccagacagcaattcttcttccccaaatcatcagggagatggagcttcacagacctctggtgaacaaattcagccttcagctacgatccaggaaacacagcaatggctgctcaaaaacagattctcttcctacacaagactgttctctaatttttcaggtgccgacttattaaaactgacaaaggaggatttagttcaaatttgtggtgcagccgatggaattcggctctataattcactgaagtcaaggtcggttagaccccgtttaaccatctatgtctgccgggagcagccaagcagcacagtgctgcaagggcagcagcaagctgcaagcagtgcaagcgagaatggcagtggggcaccctatgtttatcatgcaatctacttggaagaaatgattgcctcagaagttgctcgaaaacttgcgctggtgtttaatatccctctccaccaaattaatcaggtttacagacagggtcccaccggtattcacattcttgttagtgatcagatggttcagaattttcaagatgagagttgttttttattctccacagtaaaagctgaaagtagtgatggcatccacataattttgaagtgatgtcttatatagactgaactgtattcagtaccaaatagtcacgcttaaaagtgtgtgaagactgaatccaagaagtcttgggattggattttaccatatgaaatgtttcatattgaaaacacaagatgacctttctaatgagctgtatgagaggtgaatctcctcactgtcactgccatagccaagcatcctcatgagagtgagcacatcggcacagcatgcatccagctctggaggccacggtgcaggcatagctgcctgctgctctggcagaggccagtaaatacagttcctagaagcagcctttgctgtctttttacactgtatgcggtttggaaatgaatgtagaaacttactgtgggcatttacctttctgtgccagtttggcttttattgcctgaaccttatgctgacctggagaggagatgggggacagtgctgttgtggggccagcagtgaatctgtatgcggagagttgtgttgtgctgatgtggccgttggtggtcaggtaagaggctcggcaccttcttggaagaaatcatgtctgagggtgtacgtttgatatgatcatgccagattggagaagatccaagccaggaagatgggcttgaagcaaactgcattatcaggagtaccttggtgagaggatcagtgtaaatcctaataggtacaaagacttttgtgttttggctttgtcacagatttattgaaaaacttttttgcttctgcttccatttttagcattttagtttctggttttcatttttggagattccttgccttttaaactcgtggtttttctctcattttcttccctctctccctccatctctgaccacccccaccctaaccccccacccccaccatcctattaaacatttttaaagccctaccccagacattggaaataggtgacccaagtagggggagaaagtattattgttgatagcttctgactaggtgttaagggatcttcattatgaacaagatgaatttttttctggaaacactagatgttatcaatcaaacactaaaatgtaccatacaaatcccttaagcctctcaaatattgagctttagtacaatcatggatagacattctggtgatgatttaggggctttttatacaccacatactagcttctttctctataagagtgcctctttcataaaaccaaatgcttgtctgctagcatacttttcaaagggaatccactgttttctcactttcctcccatatctccgtccttcatccaaaaccttcccagaatccatcagcaagcatgtttgaggcctgtggtgtaggggactgaattttttttttaacttctattccattttaattgtaggatatctttgtccatatacccaggtgtcctgatttgaatgtactatttgatcctcattgtgttcaggcaaaaaataggaaatgagtaattttgagtttgaaatctctcccagaagacaaactacttcagtgagtaaaagctttgacattttatgttttattcataaagggggttaattatttgctacaaagaagcacgatctattttcatcatcgatttgaaaatatctgtaactcctatagatcctataggcagagagttttcctttctgactttttccctttgctttcgtgtgaccacatgttttctgtaccagtcactggggaaagaagtgagtttatctcgtttgttttaaaagttttgcttgtctatttagcattcctttttgggtctcaagatttatggaacaataaatgtcatttaatgctgtgtgcttattttgaattcctcatcaggttttagaagcggggtaaaaatacttagatgcttatcagacttgaaattatactgagtggcattgaacgtgagtttgtcccagtgaaacaggctaaataaattttggcaccagcaaatttgttactttgtttttttaatagtaggatgtacacatttcagtataataaatgttttctgattgttttgcaaa

SEQ ID NO: 33881 - DNA, 3669 bp, Homo sapiens
  source 1..3669: mol_type = unassigned DNA
agtggggcccccgcagctctcgtcccggccgccgctggtgaccactcgccgcccctccggaggcttcacccgcgccctcccccaggacgcgccagcggagctccggctccttcgccctggacgcggaggccgcggtgtgcggggcgacggcgaggccggaagatggcctgggtgctcaagatggacgaggtgatcgagtccgggctggtgcacgacttcgacgccagcctctcgggcatcgggcaggaactgggcgccggcgcttacagcatgagtgatgtcttggcattgcccattttcaagcaggaagattccagccttccattggatggtgaaacagagcacccaccctttcagtatgtgatgtgtgctgcaacgtcaccagcagtaaaactgcatgatgaaacgcttacttatttgaaccaaggtcagtcatatgaaattcggatgctggataatcggaaaatgggtgatatgcctgagatcaatggaaaattagtaaagagcatcataagggttgtattccatgacagacggctacaatacacagagcatcagcaacttgaaggatggaagtggaatcgcccaggagacagacttcttgatttagatattccaatgtctgtgggaataattgacacaaggacgaatccaagccagttaaatgcggttgaatttctgtgggacccagcaaaacgcacctctgctttcattcaggtacactgcatcagcacagaatttactccacggaagcacggaggtgaaaagggagtgccctttaggatccaggttgacacctttaagcagaatgaaaatggagaatacacagatcatctacactcagctagctgccaaatcaaagtttttaagcctaaaggtgcagacaggaaacaaaaaactgaccgagagaagatggagaagagaacagctcatgaaaaagaaaagtatcagccgtcctatgataccacaatcctcacagagtgttctccgtggcccgatgcccccacagcctatgtgaataacagcccttccccagcgcccactttcacctccccacagcagagcacttgcagtgtcccagacagcaattcttcttccccaaatcatcagggagatggagcttcacagacctctggtgaacaaattcagccttcagctacgatccaggaaacacagcaatggctgctcaaaaacagattctcttcctacacaagactgttctctaatttttcaggtgccgacttattaaaactgacaaaggaggatttagttcaaatttgtggtgcagccgatggaattcggctctataattcactgaagtcaaggtcggttagaccccgtttaaccatctatgtctgccgggagcagccaagcagcacagtgctgcaagggcagcagcaagctgcaagcagtgcaagcgagaatggcagtggggcaccctatgtttatcatgcaatctacttggaagaaatgattgcctcagaagttgctcgaaaacttgcgctggtgtttaatatccctctccaccaaattaatcaggtttacagacagggtcccaccggtattcacattcttgttagtgatcagatggttcagaattttcaagatgagagttgttttttattctccacagtaaaagctgaaagtagtgatggcatccacataattttgaagtgatgtcttatatagactgaactgtattcagtaccaaatagtcacgcttaaaagtgtgtgaagactgaatccaagaagtcttgggattggattttaccatatgaaatgtttcatattgaaaacacaagatgacctttctaatgagctgtatgagaggtgaatctcctcactgtcactgccatagccaagcatcctcatgagagtgagcacatcggcacagcatgcatccagctctggaggccacggtgcaggcatagctgcctgctgctctggcagaggccagtaaatacagttcctagaagcagcctttgctgtctttttacactgtatgcggtttggaaatgaatgtagaaacttactgtgggcatttacctttctgtgccagtttggcttttattgcctgaaccttatgctgacctggagaggagatgggggacagtgctgttgtggggccagcagtgaatctgtatgcggagagttgtgttgtgctgatgtggccgttggtggtcaggtaagaggctcggcaccttcttggaagaaatcatgtctgagggtgtacgtttgatatgatcatgccagattggagaagatccaagccaggaagatgggcttgaagcaaactgcattatcaggagtaccttggtgagaggatcagtgtaaatcctaataggtacaaagacttttgtgttttggctttgtcacagatttattgaaaaacttttttgcttctgcttccatttttagcattttagtttctggttttcatttttggagattccttgccttttaaactcgtggtttttctctcattttcttccctctctccctccatctctgaccacccccaccctaaccccccacccccaccatcctattaaacatttttaaagccctaccccagacattggaaataggtgacccaagtagggggagaaagtattattgttgatagcttctgactaggtgttaagggatcttcattatgaacaagatgaatttttttctggaaacactagatgttatcaatcaaacactaaaatgtaccatacaaatcccttaagcctctcaaatattgagctttagtacaatcatggatagacattctggtgatgatttaggggctttttatacaccacatactagcttctttctctataagagtgcctctttcataaaaccaaatgcttgtctgctagcatacttttcaaagggaatccactgttttctcactttcctcccatatctccgtccttcatccaaaaccttcccagaatccatcagcaagcatgtttgaggcctgtggtgtaggggactgaattttttttttaacttctattccattttaattgtaggatatctttgtccatatacccaggtgtcctgatttgaatgtactatttgatcctcattgtgttcaggcaaaaaataggaaatgagtaattttgagtttgaaatctctcccagaagacaaactacttcagtgagtaaaagctttgacattttatgttttattcataaagggggttaattatttgctacaaagaagcacgatctattttcatcatcgatttgaaaatatctgtaactcctatagatcctataggcagagagttttcctttctgactttttccctttgctttcgtgtgaccacatgttttctgtaccagtcactggggaaagaagtgagtttatctcgtttgttttaaaagttttgcttgtctatttagcattcctttttgggtctcaagatttatggaacaataaatgtcatttaatgctgtgtgcttattttgaattcctcatcaggttttagaagcggggtaaaaatacttagatgcttatcagacttgaaattatactgagtggcattgaacgtgagtttgtcccagtgaaacaggctaaataaattttggcaccagcaaatttgttactttgtttttttaatagtaggatgtacacatttcagtataataaatgttttctgattgttttgc

SEQ ID NO: 33882 - DNA, 581 bp, Homo sapiens
  source 1..581: mol_type = unassigned DNA
gtgcggggacgcagcgaggccaccccggctgggaacagccgcgtgggcggggccgcattgcactctctggacagttcctgggccgcgaggcgcggggagtggccctaagcgcggggctgtacggggagggccggaagatggcctgggtgctcaagatggacgaggtgatcgagtccgggctggtgcacgacttcgacgccagcctctcgggcatcgggcaggaactgggcgccggcgcttacagcatgagtgatgtcttggcattgcccattttcaagcaggaagattccagccttccattggatggtgaaacagagcacccaccctttcagtatgtgatgtgtgctgcaacgtcaccagcagtaaaactgcatgatgaaacgcttacttatttgaaccaaggtcagtcatatgaaattcggatgctggataatcggaaaatgggtgatatgcctgagatcaatggaaaattagtaaagagcatcataagggttgtattccatgacagacggctacaatacacagagcatcagcaacttgaaggatggaagtggaatcgcccaggagacagacttcttgat

SEQ ID NO: 33883 - DNA, 4997 bp, Homo sapiens
  source 1..4997: mol_type = unassigned DNA
agacacacaccagtggcgacaggggagagttggaaagacgcaggagagaagcaggaggcaggaggcagcggggatggagcaatgggagcgggaagcaggcaggtttccttgcaaatccccctccggcctcacgccgtctcgccggccccggcaggggagcgaggaccccggcgaacagatggaggagtggagctcgctctaggcagctgggcttggccggagaatggaggagccaccaagcgaccggctgattggaagagaaacgcagagcgatggaggcggggtaggaggacgatttctctgcggggactggcggcggcgtacacgcccgggtcgggcgctgcagagcttggctggctttcaacccgcgctcgccggctccagccccgcgcgcccccacccctagccctcccggcggctccgcagggtgaggtggctttgaccccgggttgcccggccagcacgaccgaggaggtggctggacagctggaggatgaacggagaagccgactgccccacagacctggaaatggccgcccccaaaggccaagaccgttggtcccaggaagacatgctgactttgctggaatgcatgaagaacaaccttccatccaatgacagctccaagttcaaaaccaccgaatcacacatggactgggaaaaagtagcatttaaagacttttctggagacatgtgcaagctcaaatgggtggagatttctaatgaggtgaggaagttccgtacattgacagaattgatcctcgatgctcaggaacatgttaaaaatccttacaaaggcaaaaaactcaagaaacacccagacttcccaaagaagcccctgaccccttatttccgcttcttcatggagaagcgggccaagtatgcgaaactccaccctgagatgagcaacctggacctaaccaagattctgtccaagaaatacaaggagcttccggagaagaagaagatgaaatatattcaggacttccagagagagaaacaggagttcgagcgaaacctggcccgattcagggaggatcaccccgacctaatccagaatgccaagaaatcggacatcccagagaagcccaaaaccccccagcagctgtggtacacccacgagaagaaggtgtatctcaaagtgcggccagatgccactacgaaggaggtgaaggactccctggggaagcagtggtctcagctctcggacaaaaagaggctgaaatggattcataaggccctggagcagcggaaggagtacgaggagatcatgagagactatatccagaagcacccagagctgaacatcagtgaggagggtatcaccaagtccaccctcaccaaggccgaacgccagctcaaggacaagtttgacgggcgacccaccaagccacctccgaacagctactcgctgtactgcgcagagctcatggccaacatgaaggacgtgcccagcacagagcgcatggtgctgtgcagccagcagtggaagctgctgtcccagaaggagaaggacgcctatcacaagaagtgtgatcagaaaaagaaagattacgaggtggagctgctccgtttcctcgagagcctgcctgaggaggagcagcagcgggtcttgggggaagagaagatgctgaacatcaacaagaagcaggccaccagccccgcctccaagaagccagcccaggaagggggcaagggcggctccgagaagcccaagcggcccgtgtcggccatgttcatcttctcggaggagaaacggcggcagctgcaggaggagcggcctgagctctccgagagcgagctgacccgcctgctggcccgaatgtggaacgacctgtctgagaagaagaaggccaagtacaaggcccgagaggcggcgctcaaggctcagtcggagaggaagcccggcggggagcgcgaggaacggggcaagctgcccgagtcccccaaaagagctgaggagatctggcaacagagcgttatcggcgactacctggcccgcttcaagaatgaccgggtgaaggccttgaaagccatggaaatgacctggaataacatggaaaagaaggagaaactgatgtggattaagaaggcagccgaagaccaaaagcgatatgagagagagctgagtgagatgcgggcacctccagctgctacaaattcttccaagaagatgaaattccagggagaacccaagaagcctcccatgaacggttaccagaagttctcccaggagctgctgtccaatggggagctgaaccacctgccgctgaaggagcgcatggtggagatcggcagtcgctggcagcgcatctcccagagccagaaggagcactacaaaaagctggccgaggagcagcaaaagcagtacaaggtgcacctggacctctgggttaagagcctgtctccccaggaccgtgcagcatataaagagtacatctccaataaacgtaagagcatgaccaagctgcgaggcccaaaccccaaatccagccggactactctgcagtccaagtcggagtccgaggaggatgatgaagaggatgaggatgacgaggacgaggatgaagaagaggaagatgatgagaatggggactcctctgaagatggcggcgactcctctgagtccagcagcgaggacgagagcgaggatggggatgagaatgaagaggatgacgaggacgaagacgacgacgaggatgacgatgaggatgaagataatgagtccgagggcagcagctccagctcctcctcctcaggggactcctcagactctgactccaactgaggctcagccccaccccagggcagccagggagagcccaggagctcccctccccaactgaccacctttgtttctcccccatgttctgtcccttgcccccctggcctcccccactttctttctttctttaaaaaaaaaaaaaaatacggtgggggtagggggctggaggagcccaggccaggactctgcagcctcagagacatcagcccttgggggtcctcctccagggacagcaactatcagactaagccagcaccggaccagcctggcccaccccacccacttctgcacttgcggttccggcatggacaatggaccggagagtgggggtggggggtcccaaagagtttgatgaggccctccacacctgcggcccaatccaaggtggggtggaagcttggggaagacccattccttcccagaggggcctgccacctggacccctgcattggaactggaggcagggaacatggggaggaggagggtcggtgccttcaagaaaacaggcactgccctggtggccctctcccctgccccctgcaggaaggagctgcctggacccgttcatgggggagggggcagaagtgttttttatatatgtgtatatatttttttttaagctctgagctgtcaacgagacgtttcctaccgatctcggctgccgtctctgttgtcatttctgggagagggagggtttaggggtagatttggaaccttttaaaaatggtcttgatgtatgtggaagagagtatgtgtatgtgtgttcctgtacatagcatgggtgcagctgtggatgtgtgcaaaagagtgtgagtgtgtgtgtgtgtgtgtaaaggggtctgtcctagagcccacatcagtttgttgtgaatctggaaaaagggtcggtgagggccgggagatgttgaccctggtgggagcaggctgaggctgccccgttctccacatcctctgttttgcccagtctctgattccattagggggagtgtgctgaagccattctcggatgcttcccagaccaggctccctctgccagagtcacatgcatccgagctgctggtctccattgtccagcaggaaggcggaaaggcaggcaagatggtgtgaagcttaaagcttgtatttgatggaaaaggtctcccctgttcatctgagaggccaagcctggccaccccaggctcagaacctgggcttcaagaaatgtgctgggagctcctaacttacacatccctccagccttccttgaatcctcccaccaccccctatttcctttaatttctcaggtctgctccctcctcccccaaccccacagctgggcaagaagtctgcaaaagctgcatctgcagctgtctctaactcttcccagccatctcccgtattttttggtaccttgattccttgactcttaataagccaagccaccttatctctgtagttcttatttttttgttgactaaatttggggggttcttttttatggtcatgtcactgacctattaaattggggcttggtgcttttccaccttccccctctgaatgaaagccaaggaatgggggaagagcgggaactctgccgcggaggtggagcaagaacggtgaagggccctggtcccagagaggctggtgggtccctctcccaaaggaaggcagacagtctctgctttgccttggaccttggtgctgggggtggggaggcctgggggggacactccccactcccattccccttcctttgtcctaatcctggaattaagtacaggggtttataggttctatttcttcccaagagccctgcaaagaaccccagtttcctatttggatgcccctacactgttgtgtttcagtggaatgtattttcatttaaaaacaactttgaatggggcactttttctttcctgttttaaaaattgaaaaattcttacagtacaaacaggactgtcagggtgggggtgttggtgctgtaagaggtcactcttgagtgcattttggcactgggatgggatggctggggtgggaagacccccatccccacccccaacttcttttctaatatttaaggagtgttttgtaggattcaacaaccaccacaacttgaatttgtatcatgggaggtgggagggagtggcttagaggtgtctgcctatgcttaaagccaactgtggaagttttgttttcccttttttgtataataaagtgaaaaacaaaggtttga

SEQ ID NO: 33884 - DNA, 4684 bp, Homo sapiens
  source 1..4684: mol_type = unassigned DNA
cggagcggcgctgcgctgcgccgaggcgggcgggcgggcgggcggagcggggcgggcggagcgcggcgcgtggggctcgccattagccgtcgctccgcttcgccatctcgggctttgtctggcgactcgctgccccggcgtcggctgcagcggagctgcggctcgactgttcggcccgccgtgctcccaggtgcccccggcctgcgctcccatccacacgctcgggtgaggtggctttgaccccgggttgcccggccagcacgaccgaggaggtggctggacagctggaggatgaacggagaagccgactgccccacagacctggaaatggccgcccccaaaggccaagaccgttggtcccaggaagacatgctgactttgctggaatgcatgaagaacaaccttccatccaatgacagctccaagttcaaaaccaccgaatcacacatggactgggaaaaagtagcatttaaagacttttctggagacatgtgcaagctcaaatgggtggagatttctaatgaggtgaggaagttccgtacattgacagaattgatcctcgatgctcaggaacatgttaaaaatccttacaaaggcaaaaaactcaagaaacacccagacttcccaaagaagcccctgaccccttatttccgcttcttcatggagaagcgggccaagtatgcgaaactccaccctgagatgagcaacctggacctaaccaagattctgtccaagaaatacaaggagcttccggagaagaagaagatgaaatatattcaggacttccagagagagaaacaggagttcgagcgaaacctggcccgattcagggaggatcaccccgacctaatccagaatgccaagaaatcggacatcccagagaagcccaaaaccccccagcagctgtggtacacccacgagaagaaggtgtatctcaaagtgcggccagatgagatcatgagagactatatccagaagcacccagagctgaacatcagtgaggagggtatcaccaagtccaccctcaccaaggccgaacgccagctcaaggacaagtttgacgggcgacccaccaagccacctccgaacagctactcgctgtactgcgcagagctcatggccaacatgaaggacgtgcccagcacagagcgcatggtgctgtgcagccagcagtggaagctgctgtcccagaaggagaaggacgcctatcacaagaagtgtgatcagaaaaagaaagattacgaggtggagctgctccgtttcctcgagagcctgcctgaggaggagcagcagcgggtcttgggggaagagaagatgctgaacatcaacaagaagcaggccaccagccccgcctccaagaagccagcccaggaagggggcaagggcggctccgagaagcccaagcggcccgtgtcggccatgttcatcttctcggaggagaaacggcggcagctgcaggaggagcggcctgagctctccgagagcgagctgacccgcctgctggcccgaatgtggaacgacctgtctgagaagaagaaggccaagtacaaggcccgagaggcggcgctcaaggctcagtcggagaggaagcccggcggggagcgcgaggaacggggcaagctgcccgagtcccccaaaagagctgaggagatctggcaacagagcgttatcggcgactacctggcccgcttcaagaatgaccgggtgaaggccttgaaagccatggaaatgacctggaataacatggaaaagaaggagaaactgatgtggattaagaaggcagccgaagaccaaaagcgatatgagagagagctgagtgagatgcgggcacctccagctgctacaaattcttccaagaagatgaaattccagggagaacccaagaagcctcccatgaacggttaccagaagttctcccaggagctgctgtccaatggggagctgaaccacctgccgctgaaggagcgcatggtggagatcggcagtcgctggcagcgcatctcccagagccagaaggagcactacaaaaagctggccgaggagcagcaaaagcagtacaaggtgcacctggacctctgggttaagagcctgtctccccaggaccgtgcagcatataaagagtacatctccaataaacgtaagagcatgaccaagctgcgaggcccaaaccccaaatccagccggactactctgcagtccaagtcggagtccgaggaggatgatgaagaggatgaggatgacgaggacgaggatgaagaagaggaagatgatgagaatggggactcctctgaagatggcggcgactcctctgagtccagcagcgaggacgagagcgaggatggggatgagaatgaagaggatgacgaggacgaagacgacgacgaggatgacgatgaggatgaagataatgagtccgagggcagcagctccagctcctcctcctcaggggactcctcagactctgactccaactgaggctcagccccaccccagggcagccagggagagcccaggagctcccctccccaactgaccacctttgtttctcccccatgttctgtcccttgcccccctggcctcccccactttctttctttctttaaaaaaaaaaaaaaatacggtgggggtagggggctggaggagcccaggccaggactctgcagcctcagagacatcagcccttgggggtcctcctccagggacagcaactatcagactaagccagcaccggaccagcctggcccaccccacccacttctgcacttgcggttccggcatggacaatggaccggagagtgggggtggggggtcccaaagagtttgatgaggccctccacacctgcggcccaatccaaggtggggtggaagcttggggaagacccattccttcccagaggggcctgccacctggacccctgcattggaactggaggcagggaacatggggaggaggagggtcggtgccttcaagaaaacaggcactgccctggtggccctctcccctgccccctgcaggaaggagctgcctggacccgttcatgggggagggggcagaagtgttttttatatatgtgtatatatttttttttaagctctgagctgtcaacgagacgtttcctaccgatctcggctgccgtctctgttgtcatttctgggagagggagggtttaggggtagatttggaaccttttaaaaatggtcttgatgtatgtggaagagagtatgtgtatgtgtgttcctgtacatagcatgggtgcagctgtggatgtgtgcaaaagagtgtgagtgtgtgtgtgtgtgtgtaaaggggtctgtcctagagcccacatcagtttgttgtgaatctggaaaaagggtcggtgagggccgggagatgttgaccctggtgggagcaggctgaggctgccccgttctccacatcctctgttttgcccagtctctgattccattagggggagtgtgctgaagccattctcggatgcttcccagaccaggctccctctgccagagtcacatgcatccgagctgctggtctccattgtccagcaggaaggcggaaaggcaggcaagatggtgtgaagcttaaagcttgtatttgatggaaaaggtctcccctgttcatctgagaggccaagcctggccaccccaggctcagaacctgggcttcaagaaatgtgctgggagctcctaacttacacatccctccagccttccttgaatcctcccaccaccccctatttcctttaatttctcaggtctgctccctcctcccccaaccccacagctgggcaagaagtctgcaaaagctgcatctgcagctgtctctaactcttcccagccatctcccgtattttttggtaccttgattccttgactcttaataagccaagccaccttatctctgtagttcttatttttttgttgactaaatttggggggttcttttttatggtcatgtcactgacctattaaattggggcttggtgcttttccaccttccccctctgaatgaaagccaaggaatgggggaagagcgggaactctgccgcggaggtggagcaagaacggtgaagggccctggtcccagagaggctggtgggtccctctcccaaaggaaggcagacagtctctgctttgccttggaccttggtgctgggggtggggaggcctgggggggacactccccactcccattccccttcctttgtcctaatcctggaattaagtacaggggtttataggttctatttcttcccaagagccctgcaaagaaccccagtttcctatttggatgcccctacactgttgtgtttcagtggaatgtattttcatttaaaaacaactttgaatggggcactttttctttcctgttttaaaaattgaaaaattcttacagtacaaacaggactgtcagggtgggggtgttggtgctgtaagaggtcactcttgagtgcattttggcactgggatgggatggctggggtgggaagacccccatccccacccccaacttcttttctaatatttaaggagtgttttgtaggattcaacaaccaccacaacttgaatttgtatcatgggaggtgggagggagtggcttagaggtgtctgcctatgcttaaagccaactgtggaagttttgttttcccttttttgtataataaagtgaaaaacaaaggtttga

SEQ ID NO: 33885 - DNA, 2683 bp, Homo sapiens
  source 1..2683: mol_type = unassigned DNA
gcggcggggggtgtgcgagctgaggccggggccggcggcgggcgggctgcctgcaggcggagggcgctgtgctttgtgcttttcgccgcgaggagcagcaggcagcagccacagccgccgccgccgccgccgccgccacagcagcagcagccgccgccccagcgccgccgcctcgcccggaggaggagccgctgccgccgcgggagggagctgcggctgtgcccggccgagcgggggagggcgccgccactcagagccagggagggagccgctggagcgggaagcccggaggccgcgctgcgccggggtgaggtggctttgaccccgggttgcccggccagcacgaccgaggaggtggctggacagctggaggatgaacggagaagccgactgccccacagacctggaaatggccgcccccaaaggccaagaccgttggtcccaggaagacatgctgactttgctggaatgcatgaagaacaaccttccatccaatgacagctccaagttcaaaaccaccgaatcacacatggactgggaaaaagtagcatttaaagacttttctggagacatgtgcaagctcaaatgggtggagatttctaatgaggtgaggaagttccgtacattgacagaattgatcctcgatgctcaggaacatgttaaaaatccttacaaaggcaaaaaactcaagaaacacccagacttcccaaagaagcccctgaccccttatttccgcttcttcatggagaagcgggccaagtatgcgaaactccaccctgagatgagcaacctggacctaaccaagattctgtccaagaaatacaaggagcttccggagaagaagaagatgaaatatattcaggacttccagagagagaaacaggagttcgagcgaaacctggcccgattcagggaggatcaccccgacctaatccagaatgccaagaaatcggacatcccagagaagcccaaaaccccccagcagctgtggtacacccacgagaagaaggtgtatctcaaagtgcggccagatgagatcatgagagactatatccagaagcacccagagctgaacatcagtgaggagggtatcaccaagtccaccctcaccaaggccgaacgccagctcaaggacaagtttgacgggcgacccaccaagccacctccgaacagctactcgctgtactgcgcagagctcatggccaacatgaaggacgtgcccagcacagagcgcatggtgctgtgcagccagcagtggaagctgctgtcccagaaggagaaggacgcctatcacaagaagtgtgatcagaaaaagaaagattacgaggtggagctgctccgtttcctcgagagcctgcctgaggaggagcagcagcgggtcttgggggaagagaagatgctgaacatcaacaagaagcaggccaccagccccgcctccaagaagccagcccaggaagggggcaagggcggctccgagaagcccaagcggcccgtgtcggccatgttcatcttctcggaggagaaacggcggcagctgcaggaggagcggcctgagctctccgagagcgagctgacccgcctgctggcccgaatgtggaacgacctgtctgagaagaagaaggccaagtacaaggcccgagaggcggcgctcaaggctcagtcggagaggaagcccggcggggagcgcgaggaacggggcaagctgcccgagtcccccaaaagagctgaggagatctggcaacagagcgttatcggcgactacctggcccgcttcaagaatgaccgggtgaaggccttgaaagccatggaaatgacctggaataacatggaaaagaaggagaaactgatgtggattaagaaggcagccgaagaccaaaagcgatatgagagagagctgagtgagatgcgggcacctccagctgctacaaattcttccaagaagatgaaattccagggagaacccaagaagcctcccatgaacggttaccagaagttctcccaggagctgctgtccaatggggagctgaaccacctgccgctgaaggagcgcatggtggagatcggcagtcgctggcagcgcatctcccagagccagaaggagcactacaaaaagctggccgaggagcagcaaaagcagtacaaggtgcacctggacctctgggttaagagcctgtctccccaggaccgtgcagcatataaagagtacatctccaataaacgtaagagcatgaccaagctgcgaggcccaaaccccaaatccagccggactactctgcagtccaagtcggagtccgaggaggatgatgaagaggatgaggatgacgaggacgaggatgaagaagaggaagatgatgagaatggggactcctctgaagatggcggcgactcctctgagtccagcagcgaggacgagagcgaggatggggatgagaatgaagaggatgacgaggacgaagacgacgacgaggatgacgatgaggatgaagataatgagtccgagggcagcagctccagctcctcctcctcaggggactcctcagactctgactccaactgaggctcagccccaccccagggcagccagggagagcccaggagctcccctccccaactgaccacctttgtttctcccccatgttctgtcccttgcccccctggcctcccccactttctttctttcttt

SEQ ID NO: 33886 - DNA, 2738 bp, Homo sapiens
  source 1..2738: mol_type = unassigned DNA
agagccagggagggagccgctggagcgggaagcccggaggccgcgctgcgccggggtgaggtggctttgaccccgggttgcccggccagcacgaccgaggaggtggctggacagctggaggatgaacggagaagccgactgccccacagacctggaaatggccgcccccaaaggccaagaccgttggtcccaggaagacatgctgactttgctggaatgcatgaagaacaaccttccatccaatgacagctccaagttcaaaaccaccgaatcacacatggactgggaaaaagtagcatttaaagacttttctggagacatgtgcaagctcaaatgggtggagatttctaatgaggtgaggaagttccgtacattgacagaattgatcctcgatgctcaggaacatgttaaaaatccttacaaaggcaaaaaactcaagaaacacccagacttcccaaagaagcccctgaccccttatttccgcttcttcatggagaagcgggccaagtatgcgaaactccaccctgagatgagcaacctggacctaaccaagattctgtccaagaaatacaaggagcttccggagaagaagaagatgaaatatattcaggacttccagagagagaaacaggagttcgagcgaaacctggcccgattcagggaggatcaccccgacctaatccagaatgccaagaaatcggacatcccagagaagcccaaaaccccccagcagctgtggtacacccacgagaagaaggtgtatctcaaagtgcggccagatgccactacgaaggaggtgaaggactccctggggaagcagtggtctcagctctcggacaaaaagaggctgaaatggattcataaggccctggagcagcggaaggagtacgaggagatcatgagagactatatccagaagcacccagagctgaacatcagtgaggagggtatcaccaagtccaccctcaccaaggccgaacgccagctcaaggacaagtttgacgggcgacccaccaagccacctccgaacagctactcgctgtactgcgcagagctcatggccaacatgaaggacgtgcccagcacagagcgcatggtgctgtgcagccagcagtggaagctgctgtcccagaaggagaaggacgcctatcacaagaagtgtgatcagaaaaagaaagattacgaggtggagctgctccgtttcctcgagagcctgcctgaggaggagcagcagcgggtcttgggggaagagaagatgctgaacatcaacaagaagcaggccaccagccccgcctccaagaagccagcccaggaagggggcaagggcggctccgagaagcccaagcggcccgtgtcggccatgttcatcttctcggaggagaaacggcggcagctgcaggaggagcggcctgagctctccgagagcgagctgacccgcctgctggcccgaatgtggaacgacctgtctgagaagaagaaggccaagtacaaggcccgagaggcggcgctcaaggctcagtcggagaggaagcccggcggggagcgcgaggaacggggcaagctgcccgagtcccccaaaagagctgaggagatctggcaacagagcgttatcggcgactacctggcccgcttcaagaatgaccgggtgaaggccttgaaagccatggaaatgacctggaataacatggaaaagaaggagaaactgatgtggattaagaaggcagccgaagaccaaaagcgatatgagagagagctgagtgagatgcgggcacctccagctgctacaaattcttccaagaagatgaaattccagggagaacccaagaagcctcccatgaacggttaccagaagttctcccaggagctgctgtccaatggggagctgaaccacctgccgctgaaggagcgcatggtggagatcggcagtcgctggcagcgcatctcccagagccagaaggagcactacaaaaagctggccgaggagcagcaaaagcagtacaaggtgcacctggacctctgggttaagagcctgtctccccaggaccgtgcagcatataaagagtacatctccaataaacgtaagagcatgaccaagctgcgaggcccaaaccccaaatccagccggactactctgcagtccaagtcggagtccgaggaggatgatgaagaggatgaggatgacgaggacgaggatgaagaagaggaagatgatgagaatggggactcctctgaagatggcggcgactcctctgagtccagcagcgaggacgagagcgaggatggggatgagaatgaagaggatgacgaggacgaagacgacgacgaggatgacgatgaggatgaagataatgagtccgagggcagcagctccagctcctcctcctcaggggactcctcagactctgactccaactgaggctcagccccaccccagggcagccagggagagcccaggagctcccctccccaactgaccacctttgtttctcccccatgttctgtcccttgcccccctggcctcccccactttctttctttctttaaaaaaaaaaaaaaatacggtgggggtagggggctggaggagcccaggccaggactctgcagcctcagagacatcagcccttgggggtcctcctccagggacagcaactatcagactaagccagcaccggaccagcctggcccaccccacccacttctgcacttgcggttccggcatggacaatggaccggagagt

SEQ ID NO: 33887 - DNA, 2459 bp, Homo sapiens
  source 1..2459: mol_type = unassigned DNA
gcggagccgggctgcaggggctgggggagggggtcacgaggaagaggaggggcgcactcccattcccatagaccccttaagtctaataaggtcatggctgagtctctcagagtgtggacctgcccccttctactctgggcggttagaaagtcgttagtcgttcacctctcagccttcctgagtgggaactggtatgtcttccaaagggtgaggtggctttgaccccgggttgcccggccagcacgaccgaggaggtggctggacagctggaggatgaacggagaagccgactgccccacagacctggaaatggccgcccccaaaggccaagaccgttggtcccaggaagacatgctgactttgctggaatgcatgaagaacaaccttccatccaatgacagctccaagttcaaaaccaccgaatcacacatggactgggaaaaagtagcatttaaagacttttctggagacatgtgcaagctcaaatgggtggagatttctaatgaggtgaggaagttccgtacattgacagaattgatcctcgatgctcaggaacatgttaaaaatccttacaaaggcaaaaaactcaagaaacacccagacttcccaaagaagcccctgaccccttatttccgcttcttcatggagaagcgggccaagtatgcgaaactccaccctgagatgagcaacctggacctaaccaagattctgtccaagaaatacaaggagcttccggagaagaagaagatgaaatatattcaggacttccagagagagaaacaggagttcgagcgaaacctggcccgattcagggaggatcaccccgacctaatccagaatgccaagaaatcggacatcccagagaagcccaaaaccccccagcagctgtggtacacccacgagaagaaggtgtatctcaaagtgcggccagatgagatcatgagagactatatccagaagcacccagagctgaacatcagtgaggagggtatcaccaagtccaccctcaccaaggccgaacgccagctcaaggacaagtttgacgggcgacccaccaagccacctccgaacagctactcgctgtactgcgcagagctcatggccaacatgaaggacgtgcccagcacagagcgcatggtgctgtgcagccagcagtggaagctgctgtcccagaaggagaaggacgcctatcacaagaagtgtgatcagaaaaagaaagattacgaggtggagctgctccgtttcctcgagagcctgcctgaggaggagcagcagcgggtcttgggggaagagaagatgctgaacatcaacaagaagcaggccaccagccccgcctccaagaagccagcccaggaagggggcaagggcggctccgagaagcccaagcggcccgtgtcggccatgttcatcttctcggaggagaaacggcggcagctgcaggaggagcggcctgagctctccgagagcgagctgacccgcctgctggcccgaatgtggaacgacctgtctgagaagaagaaggccaagtacaaggcccgagaggcggcgctcaaggctcagtcggagaggaagcccggcggggagcgcgaggaacggggcaagctgcccgagtcccccaaaagagctgaggagatctggcaacagagcgttatcggcgactacctggcccgcttcaagaatgaccgggtgaaggccttgaaagccatggaaatgacctggaataacatggaaaagaaggagaaactgatgtggattaagaaggcagccgaagaccaaaagcgatatgagagagagctgagtgagatgcgggcacctccagctgctacaaattcttccaagaagatgaaattccagggagaacccaagaagcctcccatgaacggttaccagaagttctcccaggagctgctgtccaatggggagctgaaccacctgccgctgaaggagcgcatggtggagatcggcagtcgctggcagcgcatctcccagagccagaaggagcactacaaaaagctggccgaggagcagcaaaagcagtacaaggtgcacctggacctctgggttaagagcctgtctccccaggaccgtgcagcatataaagagtacatctccaataaacgtaagagcatgaccaagctgcgaggcccaaaccccaaatccagccggactactctgcagtccaagtcggagtccgaggaggatgatgaagaggatgaggatgacgaggacgaggatgaagaagaggaagatgatgagaatggggactcctctgaagatggcggcgactcctctgagtccagcagcgaggacgagagcgaggatggggatgagaatgaagaggatgacgaggacgaagacgacgacgaggatgacgatgaggatgaagataatgagtccgagggcagcagctccagctcctcctcctcaggggactcctcagactctgactccaactgagg

SEQ ID NO: 33888 - DNA, 2570 bp, Homo sapiens
  source 1..2570: mol_type = unassigned DNA
gcggagccgggctgcaggggctgggggagggggtcacgaggaagaggaggggcgcactcccattcccatagaccccttaagtctaataaggtcatggctgagtctctcagagtgtggacctgcccccttctactctgggcggttagaaagtcgttagtcgttcacctctcagccttcctgagtgggaactggtatgtcttccaaagggtgaggtggctttgaccccgggttgcccggccagcacgaccgaggaggtggctggacagctggaggatgaacggagaagccgactgccccacagacctggaaatggccgcccccaaaggccaagaccgttggtcccaggaagacatgctgactttgctggaatgcatgaagaacaaccttccatccaatgacagctccaagttcaaaaccaccgaatcacacatggactgggaaaaagtagcatttaaagacttttctggagacatgtgcaagctcaaatgggtggagatttctaatgaggtgaggaagttccgtacattgacagaattgatcctcgatgctcaggaacatgttaaaaatccttacaaaggcaaaaaactcaagaaacacccagacttcccaaagaagcccctgaccccttatttccgcttcttcatggagaagcgggccaagtatgcgaaactccaccctgagatgagcaacctggacctaaccaagattctgtccaagaaatacaaggagcttccggagaagaagaagatgaaatatattcaggacttccagagagagaaacaggagttcgagcgaaacctggcccgattcagggaggatcaccccgacctaatccagaatgccaagaaatcggacatcccagagaagcccaaaaccccccagcagctgtggtacacccacgagaagaaggtgtatctcaaagtgcggccagatgccactacgaaggaggtgaaggactccctggggaagcagtggtctcagctctcggacaaaaagaggctgaaatggattcataaggccctggagcagcggaaggagtacgaggagatcatgagagactatatccagaagcacccagagctgaacatcagtgaggagggtatcaccaagtccaccctcaccaaggccgaacgccagctcaaggacaagtttgacgggcgacccaccaagccacctccgaacagctactcgctgtactgcgcagagctcatggccaacatgaaggacgtgcccagcacagagcgcatggtgctgtgcagccagcagtggaagctgctgtcccagaaggagaaggacgcctatcacaagaagtgtgatcagaaaaagaaagattacgaggtggagctgctccgtttcctcgagagcctgcctgaggaggagcagcagcgggtcttgggggaagagaagatgctgaacatcaacaagaagcaggccaccagccccgcctccaagaagccagcccaggaagggggcaagggcggctccgagaagcccaagcggcccgtgtcggccatgttcatcttctcggaggagaaacggcggcagctgcaggaggagcggcctgagctctccgagagcgagctgacccgcctgctggcccgaatgtggaacgacctgtctgagaagaagaaggccaagtacaaggcccgagaggcggcgctcaaggctcagtcggagaggaagcccggcggggagcgcgaggaacggggcaagctgcccgagtcccccaaaagagctgaggagatctggcaacagagcgttatcggcgactacctggcccgcttcaagaatgaccgggtgaaggccttgaaagccatggaaatgacctggaataacatggaaaagaaggagaaactgatgtggattaagaaggcagccgaagaccaaaagcgatatgagagagagctgagtgagatgcgggcacctccagctgctacaaattcttccaagaagatgaaattccagggagaacccaagaagcctcccatgaacggttaccagaagttctcccaggagctgctgtccaatggggagctgaaccacctgccgctgaaggagcgcatggtggagatcggcagtcgctggcagcgcatctcccagagccagaaggagcactacaaaaagctggccgaggagcagcaaaagcagtacaaggtgcacctggacctctgggttaagagcctgtctccccaggaccgtgcagcatataaagagtacatctccaataaacgtaagagcatgaccaagctgcgaggcccaaaccccaaatccagccggactactctgcagtccaagtcggagtccgaggaggatgatgaagaggatgaggatgacgaggacgaggatgaagaagaggaagatgatgagaatggggactcctctgaagatggcggcgactcctctgagtccagcagcgaggacgagagcgaggatggggatgagaatgaagaggatgacgaggacgaagacgacgacgaggatgacgatgaggatgaagataatgagtccgagggcagcagctccagctcctcctcctcaggggactcctcagactctgactccaactgagg

SEQ ID NO: 33889 - DNA, 3011 bp, Homo sapiens
  source 1..3011: mol_type = unassigned DNA
cttggctcggctccccggaggccggggcgggggcgccggcggggctgggccgcaggctcgggggaggaggcggcggttcccgccgcggtcgcgcctctgtgccgggctcctccggtgaggtggctttgaccccgggttgcccggccagcacgaccgaggaggtggctggacagctggaggatgaacggagaagccgactgccccacagacctggaaatggccgcccccaaaggccaagaccgttggtcccaggaagacatgctgactttgctggaatgcatgaagaacaaccttccatccaatgacagctccaagttcaaaaccaccgaatcacacatggactgggaaaaagtagcatttaaagacttttctggagacatgtgcaagctcaaatgggtggagatttctaatgaggtgaggaagttccgtacattgacagaattgatcctcgatgctcaggaacatgttaaaaatccttacaaaggcaaaaaactcaagaaacacccagacttcccaaagaagcccctgaccccttatttccgcttcttcatggagaagcgggccaagtatgcgaaactccaccctgagatgagcaacctggacctaaccaagattctgtccaagaaatacaaggagcttccggagaagaagaagatgaaatatattcaggacttccagagagagaaacaggagttcgagcgaaacctggcccgattcagggaggatcaccccgacctaatccagaatgccaagaaatcggacatcccagagaagcccaaaaccccccagcagctgtggtacacccacgagaagaaggtgtatctcaaagtgcggccagatgagatcatgagagactatatccagaagcacccagagctgaacatcagtgaggagggtatcaccaagtccaccctcaccaaggccgaacgccagctcaaggacaagtttgacgggcgacccaccaagccacctccgaacagctactcgctgtactgcgcagagctcatggccaacatgaaggacgtgcccagcacagagcgcatggtgctgtgcagccagcagtggaagctgctgtcccagaaggagaaggacgcctatcacaagaagtgtgatcagaaaaagaaagattacgaggtggagctgctccgtttcctcgagagcctgcctgaggaggagcagcagcgggtcttgggggaagagaagatgctgaacatcaacaagaagcaggccaccagccccgcctccaagaagccagcccaggaagggggcaagggcggctccgagaagcccaagcggcccgtgtcggccatgttcatcttctcggaggagaaacggcggcagctgcaggaggagcggcctgagctctccgagagcgagctgacccgcctgctggcccgaatgtggaacgacctgtctgagaagaagaaggccaagtacaaggcccgagaggcggcgctcaaggctcagtcggagaggaagcccggcggggagcgcgaggaacggggcaagctgcccgagtcccccaaaagagctgaggagatctggcaacagagcgttatcggcgactacctggcccgcttcaagaatgaccgggtgaaggccttgaaagccatggaaatgacctggaataacatggaaaagaaggagaaactgatgtggattaagaaggcagccgaagaccaaaagcgatatgagagagagctgagtgagatgcgggcacctccagctgctacaaattcttccaagaagatgaaattccagggagaacccaagaagcctcccatgaacggttaccagaagttctcccaggagctgctgtccaatggggagctgaaccacctgccgctgaaggagcgcatggtggagatcggcagtcgctggcagcgcatctcccagagccagaaggagcactacaaaaagctggccgaggagcagcaaaagcagtacaaggtgcacctggacctctgggttaagagcctgtctccccaggaccgtgcagcatataaagagtacatctccaataaacgtaagagcatgaccaagctgcgaggcccaaaccccaaatccagccggactactctgcagtccaagtcggagtccgaggaggatgatgaagaggatgaggatgacgaggacgaggatgaagaagaggaagatgatgagaatggggactcctctgaagatggcggcgactcctctgagtccagcagcgaggacgagagcgaggatggggatgagaatgaagaggatgacgaggacgaagacgacgacgaggatgacgatgaggatgaagataatgagtccgagggcagcagctccagctcctcctcctcaggggactcctcagactctgactccaactgaggctcagccccaccccagggcagccagggagagcccaggagctcccctccccaactgaccacctttgtttctcccccatgttctgtcccttgcccccctggcctcccccactttctttctttctttaaaaaaaaaaaaaaatacggtgggggtagggggctggaggagcccaggccaggactctgcagcctcagagacatcagcccttgggggtcctcctccagggacagcaactatcagactaagccagcaccggaccagcctggcccaccccacccacttctgcacttgcggttccggcatggacaatggaccggagagtgggggtggggggtcccaaagagtttgatgaggccctccacacctgcggcccaatccaaggtggggtggaagcttggggaagacccattccttcccagaggggcctgccacctggacccctgcattggaactggaggcagggaacatggggaggaggagggtcggtgccttcaagaaaacaggcactgccctggtggccctctcccctgccccctgcaggaaggagctgcctggacccgttcatgggggagggggcagaagtgttttttatatatgtgtatatatttttttttaagctctgagctgtcaacgagacgtttcctacc

SEQ ID NO: 33890 - DNA, 998 bp, Homo sapiens
  source 1..998: mol_type = unassigned DNA
acttagcactcaggcctgtgaatcaggagatacaaagacctccaaaaaaggaccagttcctcggatgtgccccctcacagagagatgaaggggcagcagaaaacagctgaaacggaagaggggacagtgcagattcaggaaggtgcagtggctactggggaagacccaaccagtgtggctattgccagcatccagtcagctgccaccttccctgaccccaacgtcaagtacgtcttccgaactgagaatgggggccaggtgatgtacagggtgatccaggtgtctgaggggcagctggatggccaaactgagggaactggcgccatcagtggctaccctgccactcaatccatgacccaggcggtgatccagggtgctttcaccagtgatgatgcagttgacacggaggggacagctgctgagacgcactatacttacttccccagcacggcagtgggagatggggcagggggtcaattctttgtgatgatgtcaccacaagaagtactgcagggaggaagccagcgctcaattgcccctaggactcacccttattccccgaagtcagaagctccccggacgactcgggatgagaaacgcagggctcagcataatgaagtggagcgtcgccgccgagacaagatcaacaactggatcgtgcagctctccaagataatcccagactgctctatggagagcaccaagtctggccagagtaaaggtgggattctatccaaagcttgtgattatatccaggagcttcggcagagtaaccaccgcttgtctgaagaactgcagggacttgaccaactgcagctggacaatgacgtgcttcgacaacaggtggaagatcttaaaaacaagaatctgctgcttcgagctcagttgcggcaccacggattagaggtcgtcatcaagaatgacagcaactaactatggggattcaggggctttgggcccaagaactgcagatagcccaggagcaacagcctaatccc

SEQ ID NO: 33891 - DNA, 1717 bp, Homo sapiens
  source 1..1717: mol_type = unassigned DNA
tccattgaaaattttccttggataggaaaggacttagcactcaggcctgtgaatcaggagatacaaagacctccaaaaaaggaccagttcctcggatgtgccccctcacagagagatgaaggggcagcagaaaacagctgaaacggaagaggggacagtgcagattcaggaaggtgcagtggctactggggaagacccaaccagtgtggctattgccagcatccagtcagctgccaccttccctgaccccaacgtcaagtacgtcttccgaactgagaatgggggccaggtgatgtacagggtgatccaggtgtctgaggggcagctggatggccaaactgagggaactggcgccatcagtggctaccctgccactcaatccatgacccaggcggtgatccagggtgctttcaccagtgatgatgcagttgacacggaggggacagctgctgagacgcactatacttacttccccagcacggcagtgggagatggggcagggggtaccacatcggggagtacagctgctgttgttactacccagggctcagaggcactgctggggcaggcgacccctcctggcactggtcaattctttgtgatgatgtcaccacaagaagtactgcagggaggaagccagcgctcaattgcccctaggactcacccttattccccgaagtcagaagctccccggacgactcgggatgagaaacgcagggctcagcataatgaagtggagcgtcgccgccgagacaagatcaacaactggatcgtgcagctctccaagataatcccagactgctctatggagagcaccaagtctggccagagtaaaggtgggattctatccaaagcttgtgattatatccaggagcttcggcagagtaaccaccgcttgtctgaagaactgcagggacttgaccaactgcagctggacaatgacgtgcttcgacaacaggtggaagatcttaaaaacaagaatctgctgcttcgagctcagttgcggcaccacggattagaggtcgtcatcaagaatgacagcaactaactatggggattcaggggctttgggcccaagaactgcagatagcccaggagcaacagcctaatcccgtgcccctttccttcactgccccacttctggcatgggacagggggaagttcagaaggtgtgtccttgaactgaggccctgtgatatggcggcctgcagtggtgtgaaacacacaatgtggacgtgcactgacagccttgcccacccccaccatgcagcccctgggcccttgtgctcctctcgcacaatgcatgtgctgtctccatgctggatactggacacactaaactctggggcttgtcctgtgcttgcttagagtgcccagcagaggtttgctgacaggtgatgctctggcttgccccaggactctggcacttccattggttcttcctttccctggagctgaggtttagatgtgcaacctgtggctcaggggagcaagcttacacaagaagtgagggaaggatgtttagcagtggctggtgcccatgaagaggagattggccagtgagaagctgaggcctatgcagacatctctggagccagagagaacaacaggcaggggcccacttggggccttcccccttgtgggggtcgttttttttttttcttttcttttttttttttttttttttttttttttaagataaaattgttcaaagcca

SEQ ID NO: 33892 - DNA, 1807 bp, Homo sapiens
  source 1..1807: mol_type = unassigned DNA
gcccctcaccaacatggccgcgggctggaagtgcgcatgagcagctgtctatggagatacctaggccgggagagggagaacacagttggagaaaatcggcagctgagacggccttggccggacttagcactcaggcctgtgaatcaggagatacaaagacctccaaaaaaggaccagttcctcggatgtgccccctcacagagagatgaaggggcagcagaaaacagctgaaacggaagaggggacagtgcagattcaggaaggtgcagtggctactggggaagacccaaccagtgtggctattgccagcatccagtcagctgccaccttccctgaccccaacgtcaagtacgtcttccgaactgagaatgggggccaggtgatgtacagggtgatccaggtgtctgaggggcagctggatggccaaactgagggaactggcgccatcagtggctaccctgccactcaatccatgacccaggcggtgatccagggtgctttcaccagtgatgatgcagttgacacggaggggacagctgctgagacgcactatacttacttccccagcacggcagtgggagatggggcagggggtaccacatcggggagtacagctgctgttgttactacccagggctcagaggcactgctggggcaggcgacccctcctggcactggtcaattctttgtgatgatgtcaccacaagaagtactgcagggaggaagccagcgctcaattgcccctaggactcacccttattccccgaagtcagaagctccccggacgactcgggatgagaaacgcagggctcagcataatgaagtggagcgtcgccgccgagacaagatcaacaactggatcgtgcagctctccaagataatcccagactgctctatggagagcaccaagtctggccagagtaaaggtgggattctatccaaagcttgtgattatatccaggagcttcggcagagtaaccaccgcttgtctgaagaactgcagggacttgaccaactgcagctggacaatgacgtgcttcgacaacaggtggaagatcttaaaaacaagaatctgctgcttcgagctcagttgcggcaccacggattagaggtcgtcatcaagaatgacagcaactaactatggggattcaggggctttgggcccaagaactgcagatagcccaggagcaacagcctaatcccgtgcccctttccttcactgccccacttctggcatgggacagggggaagttcagaaggtgtgtccttgaactgaggccctgtgatatggcggcctgcagtggtgtgaaacacacaatgtggacgtgcactgacagccttgcccacccccaccatgcagcccctgggcccttgtgctcctctcgcacaatgcatgtgctgtctccatgctggatactggacacactaaactctggggcttgtcctgtgcttgcttagagtgcccagcagaggtttgctgacaggtgatgctctggcttgccccaggactctggcacttccattggttcttcctttccctggagctgaggtttagatgtgcaacctgtggctcaggggagcaagcttacacaagaagtgagggaaggatgtttagcagtggctggtgcccatgaagaggagattggccagtgagaagctgaggcctatgcagacatctctggagccagagagaacaacaggcaggggcccacttggggccttcccccttgtgggggtcgttttttttttttcttttcttttttttttttttttttttttttttttaagataaaattgttcaaagcca

SEQ ID NO: 33893 - DNA, 1765 bp, Homo sapiens
  source 1..1765: mol_type = unassigned DNA
aacatggccgcgggctggaagtgcgcatgagcagctgtctatggagatacctaggccgggagagggagaacacagttggagaaaatcggcagctgagacggccttggccggacttagcactcaggcctgtgaatcaggagatacaaagacctccaaaaaaggaccagttcctcggatgtgccccctcacagagagatgaaggggcagcagaaaacagctgaaacggaagaggggacagtgcagattcaggaaggtgcagtggctactggggaagacccaaccagtgtggctattgccagcatccagtcagctgccaccttccctgaccccaacgtcaagtgatgtacagggtgatccaggtgtctgaggggcagctggatggccaaactgagggaactggcgccatcagtggctaccctgccactcaatccatgacccaggcggtgatccagggtgctttcaccagtgatgatgcagttgacacggaggggacagctgctgagacgcactatacttacttccccagcacggcagtgggagatggggcagggggtaccacatcggggagtacagctgctgttgttactacccagggctcagaggcactgctggggcaggcgacccctcctggcactggtcaattctttgtgatgatgtcaccacaagaagtactgcagggaggaagccagcgctcaattgcccctaggactcacccttattccccgaagtcagaagctccccggacgactcgggatgagaaacgcagggctcagcataatgaagtggagcgtcgccgccgagacaagatcaacaactggatcgtgcagctctccaagataatcccagactgctctatggagagcaccaagtctggccagagtaaaggtgggattctatccaaagcttgtgattatatccaggagcttcggcagagtaaccaccgcttgtctgaagaactgcagggacttgaccaactgcagctggacaatgacgtgcttcgacaacaggtggaagatcttaaaaacaagaatctgctgcttcgagctcagttgcggcaccacggattagaggtcgtcatcaagaatgacagcaactaactatggggattcaggggctttgggcccaagaactgcagatagcccaggagcaacagcctaatcccgtgcccctttccttcactgccccacttctggcatgggacagggggaagttcagaaggtgtgtccttgaactgaggccctgtgatatggcggcctgcagtggtgtgaaacacacaatgtggacgtgcactgacagccttgcccacccccaccatgcagcccctgggcccttgtgctcctctcgcacaatgcatgtgctgtctccatgctggatactggacacactaaactctggggcttgtcctgtgcttgcttagagtgcccagcagaggtttgctgacaggtgatgctctggcttgccccaggactctggcacttccattggttcttcctttccctggagctgaggtttagatgtgcaacctgtggctcaggggagcaagcttacacaagaagtgagggaaggatgtttagcagtggctggtgcccatgaagaggagattggccagtgagaagctgaggcctatgcagacatctctggagccagagagaacaacaggcaggggcccacttggggccttcccccttgtgggggtcgttttttttttttcttttcttttttttttttttttttttttttttttaagataaaattgttcaaagcc

SEQ ID NO: 33894 - DNA, 2290 bp, Homo sapiens
  source 1..2290: mol_type = unassigned DNA
aaccgagaggcgaagggcaaggggcgaagggcaagcgccggatcctttcgccccctccccacgtgaggccctggaggctgattggccgtgtgctgcggaggcggcaagaggaacgtgtcctggcacgtgccgaaggagcgctaaaggccaggggcggtcccacccgcgaagccctggaaggcggattggctgcgcgaggaagtggcgtgtcctcacttgagctgtctgggagcgagagtaagagataaaggcaagggcgcctgaccgggcctgggcacctcctcccactgcgggcaaagggcaggcagttcgtgcgcggacacaagcactggcggaccgtggccatggcgggcgctgagtggaagtcgctggaggaatgcttggagaagcacctgccgctccccgacttgcaggaagtgaagcgcgttctctatggcaaggaactcaggaagcttgatctgcccagggaagctttcgaagctgcctccagagaagactttgaactgcagggatatgcctttgaagcagcggaggagcagctgagacgaccccgcattgtgcacgtggggctggttcagaacagaatccccctccccgcaaatgcccctgtggcagaacaggtctctgcccttcatagacgcataaaggctatcgtagaggtggctgcaatgtgtggagtcaacatcatctgtttccaggaagcatggactatgccctttgccttctgtacgagagagaagcttccttggacagaatttgctgagtcagcagaggatgggcccaccaccagattctgtcagaagctggcgaagaaccatgacatggtggtggtgtctcccatcctggaacgagacagcgagcatggggatgttttgtggaatacagccgtggtgatctccaattccggagcagtcctgggaaagaccaggaaaaaccacatccccagagtgggtgatttcaacgagtcaacttactacatggagggaaacctgggccaccccgtgttccagacgcagttcggaaggatcgcggtgaacatttgctacgggcggcaccaccccctcaactggcttatgtacagcatcaacggggctgagatcatcttcaacccctcggccacgataggagcactcagcgagtccctgtggcccatcgaggccagaaacgcagccattgccaatcactgcttcacctgcgccatcaatcgagtgggcaccgagcacttcccgaacgagtttacctcgggagatggaaagaaagctcaccaggactttggctacttttatggctcgagctatgtggcagcccctgacagcagccggactcctgggctgtcccgtagccgggatggactgctagttgctaagctcgacctaaacctctgccagcaggtgaatgatgtctggaacttcaagatgacgggcaggtatgagatgtacgcacgggagctcgccgaagctgtcaagtccaactacagccccaccatcgtgaaagagtagccggcttcagtgcctgccttggggtgaggaagacacctctgccccagtggattagcaagtgtggcaggcttaacatgtccaggttctccccaataacattgtccaggttggttttaaaattcccaggcagggggagagtggcatggggagtgacttcttaatgggtaaggggctgcttacttctggggtattggaaatgtttggggactaggtagaggtgaatgtactaaatgccactgaatttgtatacttcagaatgtttgttatgtaaattttacctcaactaaaaaaaaaaatgcccaggtactgcttgtgcaggtggatttgaggttaggcagatgatgctgtccatcccgtacaccagtgggaagagggtgagggctgatccagagaccctgagcctacagcaaggctgtggtgggtcggatggtctttggatgtgtcagcttagctaggccacagtcaccagtaattcaatcagacactaatctaggtatttctgtgaaggtattttgtagatgtgacagaagtccattcccaattgactaagtaagtgagattatctcagataatctgggtcagcctgacctgattagtcagaaggcctaaagaacagagctaagggtttccctgaggaagaaattctgcctgaggacagcagcccagtgcttggcgagagttcctgacagtctgcccttctgatagcctgcctcacagagtttagacatgactagccagctcctacaatcactgaagtcaattccttgcaataaatctcaatatatccccta

SEQ ID NO: 33895 - DNA, 3418 bp, Homo sapiens
  source 1..3418: mol_type = unassigned DNA
aggagacctaggtaccagactttgctttgccagtgcctctttctgtggccttgggtaagtttttcccctctctgggcctcagtttcccatttgcaaaataaaagtgtttaagactaggttccaagattttccaattctaatgctgagaggatacagaggaaaacagaaagaatgctggctgaggaaccaggagacttgccttcttgtcccagctctgccactgacctgacctctttgggcctctgcttcctcatctataaaataagataaagcaacagaagcctccagcgactaagttaaactttcctggggtcacaaggtttacaagtggctgaataggatttctacagactggttccttcacccggctgcccgccgaagtaagcgggccttactgccctaattctcaataggaccccaaagaggacgcttctttgctcctgaagggatggcaccctctggattcgcggtaacagcaaatggggctctcactcctaccatctcagtgacagtttaaagcgcaccctaccgcaggaaagtgcccatatttgcacacacgcggcagagggcagggctgaaaaggggccctagggtgcagggggcgcgccctcacccggggaccccgcattttacaatattagctccaccgaggcgcacggaaccgcaggcgagcaactgaccttcggctccagcggccccaaagccgggggtgggaacgcgcgacccaggtagcggcatggactccgagcctggcccctcgggggttaaaactccccagacataaaggctccggacgacagaggtgcagccgccgcgtgcccgtgggacactgaaactcttcccttaccttcctcggtagtcctgtgagggaggctggcccggccggctgccctacggtgcggacaggaggtcgcggtcgggaggggccctgcccggcggttgctgctggaaccagcccccgcaagggcccgcagcggccgggccgtttacctcagacccgcgccgcagcctcccggagcccgcgcccaggactccctcacgacctctccagggtcccggcccgacaccaaggggcaggtgaggggtggaacctggaggcacccgcgccagggcccctgagggaggcgggagggggacagcctcagtcctgactcgcagccgaggcgcgacgactccgcgcagtcccgcctgtggaggggcgtgcctcatcgcttgctaaccgagaggcgaagggcaaggggcgaagggcaagcgccggatcctttcgccccctccccacgtgaggccctggaggctgattggccgtgtgctgcggaggcggcaagaggaacgtgtcctggcacgtgccgaaggagcgctaaaggccaggggcggtcccacccgcgaagccctggaaggcggattggctgcgcgaggaagtggcgtgtcctcacttgagctgtctgggagcgagagtaagagataaaggcaagggcgcctgaccgggcctgggcacctcctcccactgcgggcaaagggcaggcagttcgtgcgcggacacaagcactggcggaccgtggccatggcgggcgctgagtggaagtcgctggaggaatgcttggagaagcacctgccgctccccgacttgcaggaagtgaagcgcgttctctatggcaaggaactcaggtctctgcccttcatagacgcataaaggctatcgtagaggtggctgcaatgtgtggagtcaacatcatctgtttccaggaagcatggactatgccctttgccttctgtacgagagagaagcttccttggacagaatttgctgagtcagcagaggatgggcccaccaccagattctgtcagaagctggcgaagaaccatgacatggtggtggtgtctcccatcctggaacgagacagcgagcatggggatgttttgtggaatacagccgtggtgatctccaattccggagcagtcctgggaaagaccaggaaaaaccacatccccagagtgggtgatttcaacgagtcaacttactacatggagggaaacctgggccaccccgtgttccagacgcagttcggaaggatcgcggtgaacatttgctacgggcggcaccaccccctcaactggcttatgtacagcatcaacggggctgagatcatcttcaacccctcggccacgataggagcactcagcgagtccctgtggcccatcgaggccagaaacgcagccattgccaatcactgcttcacctgcgccatcaatcgagtgggcaccgagcacttcccgaacgagtttacctcgggagatggaaagaaagctcaccaggactttggctacttttatggctcgagctatgtggcagcccctgacagcagccggactcctgggctgtcccgtagccgggatggactgctagttgctaagctcgacctaaacctctgccagcaggtgaatgatgtctggaacttcaagatgacgggcaggtatgagatgtacgcacgggagctcgccgaagctgtcaagtccaactacagccccaccatcgtgaaagagtagccggcttcagtgcctgccttggggtgaggaagacacctctgccccagtggattagcaagtgtggcaggcttaacatgtccaggttctccccaataacattgtccaggttggttttaaaattcccaggcagggggagagtggcatggggagtgacttcttaatgggtaaggggctgcttacttctggggtattggaaatgtttggggactaggtagaggtgaatgtactaaatgccactgaatttgtatacttcagaatgtttgttatgtaaattttacctcaactaaaaaaaaaaatgcccaggtactgcttgtgcaggtggatttgaggttaggcagatgatgctgtccatcccgtacaccagtgggaagagggtgagggctgatccagagaccctgagcctacagcaaggctgtggtgggtcggatggtctttggatgtgtcagcttagctaggccacagtcaccagtaattcaatcagacactaatctaggtatttctgtgaaggtattttgtagatgtgacagaagtccattcccaattgactaagtaagtgagattatctcagataatctgggtcagcctgacctgattagtcagaaggcctaaagaacagagctaagggtttccctgaggaagaaattctgcctgaggacagcagcccagtgcttggcgagagttcctgacagtctgcccttctgatagcctgcctcacagagtttagacatgactagccagctcctacaatcactgaagtcaattccttgcaataaatctcaatatatcccctactggttctgcttctctagttgaatctgactgatacagattttggtgccaaaagtggttctagaaaaatagaatcttaaagatg

SEQ ID NO: 33896 - DNA, 4726 bp, Homo sapiens
  source 1..4726: mol_type = unassigned DNA
ggattggctgcgcgaggaagtggcgtgtcctcacttgagctgtctgggagcgagagtaagagataaaggcaagggcgcctgaccgggcctgggcacctcctcccactgcgggcaaagggcaggcagttcgtgcgcggacacaagcactggcggaccgtggccatggcgggcgctgagtggaagtcgctggaggaatgcttggagaagcacctgccgctccccgacttgcaggaagtgaagcgcgttctctatggcaaggaactcaggaagcttgatctgcccagggaagctttcgaagctgcctccagagaagactttgaactgcagggatatgcctttgaagcagcggaggagcagctgagacgaccccgcattgtgcacgtggggctggttcagaacagaatccccctccccgcaaatgcccctgtggcagaacaggtctctgcccttcatagacgcataaaggctatcgtagaggtggctgcaatgtgtggagtcaacatcatctgtttccaggaagcatggattctccgtccacatcaccaggaaccccggcctccctgctgttacgcaccgagctgttgtctgattccttcagttttcccacatcgttctgaatccattcgctcctctccatctctctaccaccacctggtccaagcccctggcagctcacctctggcttttgtaattccctccagctggtctcctgtgccctcctgaccaggacttctttaccttcagatctcagcccagagccagcccccccatctaaacatcctggtagtatgtacctttgtggtttttatttttatcagagttttacatgctcatggtttagagtcagatgggtgtacaaggtctgttaccaaaaaatagctattatccccagcatcaacactgagctagttcctttggaatttacctttgttagtgttgctacttcctaattttttagttttgcatcacctattgacttccccctatggaagatgtcagtgttagccctttcttgcctcctcctggcccttcgacatacatgtgtccttgttctatccccccagcccattttgtcaactttgattccttttctttttttttaagacaaggacttactctgtcacccaggcttagagtacaatcacagctcactgcagccttgatcccaggcccaagcaatcctcccacctcagcctcccaagtagctgggaccacaggtgcacaccatcacgcccagctaattgaaaaaaaaaagtttgtagagatggagatctcactatattgctaggctgaactttgatttcttttcctgaattattttctgttttccctagagtttgctttgttttctacttgccacgcattcaaccccaaactttctatcaattcctaaatctcccttaatgtgttttagacgcatcaaacagtctatcagtttcatctcctccaaggaatctgccccagagccttgtgactgctgtggtctgaatcaggtgccccctctgctggccacacagttattgtcctgggatcccccctcatcatcaccctggggaatccctttgccttgctcttgtgtttctctgttcccacagcttcctctttcttggtttatacccttattttagtggagtggtgtagtggatccttatagatttatgttgcctcggcatccatgttgaatacaagtttaactctctcataccagcggcagggctcggtcacgctggacacagtttccagatctacaccacaccgagatggctcaagccaagtggccagaggtaagaacttaagaggcctctctcccaccagcagactgggctgcccactttcctgctgcttcctttaaatggaccatccaggcatttggccattaacttaaggtgaccacatcttagtcattatgtgtactgctagttgccccatactctctctgactcttcatttctccctcatctgacctggggacagaggactgccctcctgactcatggcactctccttgcccaggatctgtaagtaaaaaaatctttaaacttgtttcctattgcgattgtgtgttgaatttgcaccttccatgagaagaaccaggggctgccccaggctgggttttccttgggataccggtggaaacacaaagttgggctcctagggccagagtggtagtcaggcagggacaggtcaggcaagagctgccacacagcatgtgccagtataaacaagtttcacgtatgagggaccccctggtcacgggttggacagacaggcattaggctgtccaccatgtacaagatgtatcctgtgaaaggcacactgtagagaccacatccagctcccttcatttcctgttagtgctgggttgccaaccgctctggtactggagcccccatttagctagggactctcagaacaagtagttccctgaggaagaacacatcagaggtaaactttttgaggccttgcccatctgaaaatatgttccttctacaattttcttgatagtttggttgagcatcaaattttaggttagaaatcattttccttcagaagtttgaacacattgttccattgtcttctagttttttgggcattgttgagtagtccacagccattttaatttgtgacccattgtctatgacttgtttttctctggaagactgtaggagtttctctttttcaccagtactctacaatttcataatgatattccattgtgtatatctattttaatccactctaggcactcagtgggttcttttagtctagaaacttgggttctgaagctctaggaaatgttcttgcattatttcattcattattttcccctctttttttctctttctagacagtcctactattaggatgttggaaccctggactagttccctaattttgttatgtatttcctccttttttttttttttttttttttgatacgtggtcttactctgtcactgaggctgtagtgcagtggcacaatcacagctcactgcagccttgacctcccaggatcaagcaatcctcccgccccagcctcctgagtagctgggaccatagatgcataccaccacacctggctaattttcttgaatttttttttttttttttttttgtaaagatgagatctgtgttgcccaggcaggtctcaaattcctgggcccaagcaattctcccaccttggactcccaaaatgctgcaactataggcgtgagccacagggcccagtcaccactttgtctttttgctcaattttctggtggatttgatctgatttgtcagtcagccctcctattcaacctttcatttctgctgtcaaattttgaatttactagtgttcttttggtctgaaagtccctgttgtattacatcctgttcttgcatcatggttgcgatatcttctcttacctctaaggatactaatattaagtaaattttgttttctctcttattccaagagtccttattccaagttggacgctttgtttgattgctcatattttaagaattggggattaaaaatctgtgagctctgagtttgtagtaggggctcacccactgagctccattatagggtgatctgatttagtggtaattcccaggtaatcccagtgttagtatctctgggtcattcttttcaggctggtcagagtccccagagatttttctgcccttgtgccaagaagggaaggagaacaaaggttcagcatgctgatgtttactcaatccctctgttttgacacttcacttgctttcatctgccctgctccaaagccagagagcctctgctgaaccatctctggaggatgagcctctggccttcttctggggtagatggggcaggtcccagcctcttggtgtggagaaaggacctggatttctaactgcttctttttttatttttatttttatttttttttgaggtggagtcttggtctgtcacccaggctggagggcagtggcgcgatctcagctcactgcaacctctgcctcctggattcaagcgatttttctgcctcagcctcctgaggtcaggagtttgagaccagcctggccaacatgatgaaaacccatctctactaaaaatacaaaaaaaattagatgggcatggtggtgggctcctgtaatttcagctacttgggaggctgaggcagaagaatcgcttgaacccaggaggtggaggtttcagtgagccaagatcgtgccattgcactccagcctgggcaacaagaacaagactccatctcaaaagaaaagaaaaaaagaaagaaatgcacttgggttattgtgaggtgggagatctacaaagtatactgaattagtccagacaaggattgagttctccacattgagaaagaaaaagacgaatagcacagtaggaaataggcaaagggtatgaacaaaaaaatgtaggggaggaatccagactggccagtgaatgtgtggtgaggggttcagcctcaccggggatatgggaaacatttactcacagtgaggcaccgttcacaccagcagactggcaggtactaaaggtaactccatgcactgcagatattcacgtgtggctgggctgtagagcagcattaggcacatagccaaaggtcccaagggcccaccccagcggagtcccctccatcccctgcataggagactgctctgaacttggtgtgcatggagatgaccagtatctttgaactgttaatctgtgtgtatgtacctactgttt

SEQ ID NO: 33897 - DNA, 2658 bp, Homo sapiens
  source 1..2658: mol_type = unassigned DNA
ctgcagacgaggcaggcggaagaggcgggacttcgcgggtgacgtcatcggggcgccggaggcccggggcgcctgggaatttgaagcaaacaggcagcgcgcgacaatggcggtcgctcgtgcagctttggggccattggtgacgggtctgtacgacgtgcaggctttcaagtttggggacttcgtgctgaagagcgggctttcctcccccatctacatcgatctgcggggcatcgtgtctcgaccgcgtcttctgagtcaggttgcagatattttattccaaactgcccaaaatgcaggcatcagttttgacaccgtgtgtggagtgccttatacagctttgccattggctacagttatctgttcaaccaatcaaattccaatgcttattagaaggaaagaaacaaaggattatggaactaagcgtcttgtagaaggaactattaatccaggagaaacctgtttaatcattgaagatgttgtcaccagtggatctagtgttttggaaactgttgaggttcttcagaaggagggcttgaaggtcactgatgccatagtgctgttggacagagagcagggaggcaaggacaagttgcaggcgcacgggatccgcctccactcagtgtgtacattgtccaaaatgctggagattctcgagcagcagaaaaaagttgatgctgagacagttgggagagtgaagaggtttattcaggagaatgtctttgtggcagcgaatcataatggttctcccctttctataaaggaagcacccaaagaactcagcttcggtgcacgtgcagagctgcccaggatccacccagttgcatcgaagcttctcaggcttatgcaaaagaaggagaccaatctgtgtctatctgctgatgtttcactggccagagagctgttgcagctagcagatgctttaggacctagtatctgcatgctgaagactcatgtagatattttgaatgattttactctggatgtgatgaaggagttgataactctggcaaaatgccatgagttcttgatatttgaagaccggaagtttgcagatataggaaacacagtgaaaaagcagtatgaaggaggtatctttaaaatagcttcctgggcagatctagtaaatgctcacgtggtgccaggctcaggagttgtgaaaggcctgcaagaagtgggcctgcctttgcatcgggggtgcctccttattgcggaaatgagctccaccggctccctggccactggggactacactagagcagcggttagaatggctgaggagcactctgaatttgttgttggttttatttctggctcccgagtaagcatgaaaccagaatttcttcacttgactccaggagttcagttggaagcaggaggagataatcttggccaacagtacaatagcccacaagaagttattggcaaacgaggttccgatatcatcattgtaggtcgtggcataatctcagcagctgatcgtctggaagcagcagagatgtacagaaaagctgcttgggaagcgtatttgagtagacttggtgtttgagtgcttcagatacatttttcagatacaatgtgaagacattgaagatatgtggtcctcctgaaagtcactggctggaaataatccaattattcctgcttggattcttccacagggcctgtgtaagaatgggttctggagttctcatggtctttaggaaatattgagtaatttgtaatcaccgcattgatactataataagttcattcttaagcttgctttttttgagactggtgtttgttagacagccacagtcctgtctgggttagggtcttccacatttgaggatccttcctatctctccatgggactagactgctttgttattctatttattttttaatttttttcgagacaggatctcactctgttgcccaggatggagtgcagtggtgagatcacggctcattgcagcctcgacctcccaggtgatcctcccacctcagcttccagattagctggtgctataggcatgcaccaccacgtccatctaaatttctttattatttgtagagatgaggtcttgccatgttacccaggctggtctcaactcctgggctcaagcgatcctcctgcctcagtctctcaaagtgctgggattacaggtgtgagccactgtgcccagcctaattgcagtaagacaaaaattctagggcaccaagaggctaaagtcagcacagcttttcttgtgtcctgtattctctgtctaatgtgttgcccaaataatacctaattgttagccattcccctccatctctggcctaaaagtgatagtccaggtatccacatgggctggttcccagaactgccattgctcactctccaaagaggggaaggtggggaaggggaaggtgactatagctcagctcctgagctagtatctggctgttatttcaacaaccggagttggggtttgggctcattttttcccctagccagcaattatggaccagtagtaacacaagtgacagcttcctgtgactgacttcacaattaggaggtctaagattccatttgggtatttgcttaaggatcccacataattgtcccaacggtcattagtagaggggaggtaagccttcattaataataaagagaaagcccacattcaa

SEQ ID NO: 33898 - DNA, 1691 bp, Homo sapiens
  source 1..1691: mol_type = unassigned DNA
caaacaggcagcgcgcgacaatggcggtcgctcgtgcagctttggggccattggtgacgggtctgtacgacgtgcaggctttcaagtttggggacttcgtgctgaagagcgggctttcctcccccatctacatcgatctgcggggcatcgtgtctcgaccgcgtcttctgagtcaggaactaagcgtcttgtagaaggaactattaatccaggagaaacctgtttaatcattgaagatgttgtcaccagtggatctagtgttttggaaactgttgaggttcttcagaaggagggcttgaaggtcactgatgccatagtgctgttggacagagagcagggaggcaaggacaagttgcaggcgcacgggatccgcctccactcagtgtgtacattgtccaaaatgctggagattctcgagcagcagaaaaaagttgatgctgagacagttgggagagtgaagaggtttattcaggagaatgtctttgtggcagcgaatcataatggttctcccctttctataaaggaagcacccaaagaactcagcttcggtgcacgtgcagagctgcccaggatccacccagttgcatcgaagcttctcaggcttatgcaaaagaaggagaccaatctgtgtctatctgctgatgtttcactggccagagagctgttgcagctagcagatgctttaggacctagtatctgcatgctgaagactcatgtagatattttgaatgattttactctggatgtgatgaaggagttgataactctggcaaaatgccatgagttcttgatatttgaagaccggaagtttgcagatataggaaacacagtgaaaaagcagtatgaaggagataatcttggccaacagtacaatagcccacaagaagttattggcaaacgaggttccgatatcatcattgtaggtcgtggcataatctcagcagctgatcgtctggaagcagcagagatgtacagaaaagctgcttgggaagcgtatttgagtagacttggtgtttgagtgcttcagatacatttttcagatacaatgtgaagacattgaagatatgtggtcctcctgaaagtcactggctggaaataatccaattattcctgcttggattcttccacagggcctgtgtaagaatgggttctggagttctcatggtctttaggaaatattgagtaatttgtaatcaccgcattgatactataataagttcattcttaagcttgctttttttgagactggtgtttgttagacagccacagtcctgtctgggttagggtcttccacatttgaggatccttcctatctctccatgggactagactgctttgttattctatttattttttaatttttttcgagacaggatctcactctgttgcccaggatggagtgcagtggtgagatcacggctcattgcagcctcgacctcccaggtgatcctcccacctcagcttccagattagctggtgctataggcatgcaccaccacgtccatctaaatttctttattatttgtagagatgaggtcttgccatgttacccaggctggtctcaactcctgggctcaagcgatcctcctgcctcagtctctcaaagtgctgggattacaggtgtgagccactgtgcccagcctaattgcagtaagacaaaaattctagggcaccaagaggctaaagtcagc

SEQ ID NO: 33899 - DNA, 2235 bp, Homo sapiens
  source 1..2235: mol_type = unassigned DNA
caaacaggcagcgcgcgacaatggcggtcgctcgtgcagctttggggccattggtgacgggtctgtacgacgtgcaggctttcaagtttggggacttcgtgctgaagagcgggctttcctcccccatctacatcgatctgcggggcatcgtgtctcgaccgcgtcttctgagtcagatgggatctctcttacgtcacccaggctggagtgcagctctgtgatcatagctcactgcagcctggaactcctgggcttaagagatcttcttgcctcgggttgcagatattttattccaaactgcccaaaatgcaggcatcagttttgacaccgtgtgtggagtgccttatacagctttgccattggctacagttatctgttcaaccaatcaaattccaatgcttattagaaggaaagaaacaaaggattatggaactaagcgtcttgtagaaggaactattaatccaggagaaacctgtttaatcattgaagatgttgtcaccagtggatctagtgttttggaaactgttgaggttcttcagaaggagggcttgaaggtcactgatgccatagtgctgttggacagagagcagggaggcaaggacaagttgcaggcgcacgggatccgcctccactcagtgtgtacattgtccaaaatgctggagattctcgagcagcagaaaaaagttgatgctgagacagttgggagagtgaagaggtttattcaggagaatgtctttgtggcagcgaatcataatggttctcccctttctataaaggaagcacccaaagaactcagcttcggtgcacgtgcagagctgcccaggatccacccagttgcatcgaagcttctcaggcttatgcaaaagaaggagaccaatctgtgtctatctgctgatgtttcactggccagagagctgttgcagctagcagatgctttaggacctagtatctgcatgctgaagactcatgtagatattttgaatgattttactctggatgtgatgaaggagttgataactctggcaaaatgccatgagttcttgatatttgaagaccggaagtttgcagatataggaaacacagtgaaaaagcagtatgaaggaggtatctttaaaatagcttcctgggcagatctagtaaatgctcacgtggtgccaggctcaggagttgtgaaaggcctgcaagaagtgggcctgcctttgcatcgggggtgcctccttattgcggaaatgagctccaccggctccctggccactggggactacactagagcagcggttagaatggctgaggagcactctgaatttgttgttggttttatttctggctcccgagtaagcatgaaaccagaatttcttcacttgactccaggagttcagttggaagcaggaggagataatcttggccaacagtacaatagcccacaagaagttattggcaaacgaggttccgatatcatcattgtaggtcgtggcataatctcagcagctgatcgtctggaagcagcagagatgtacagaaaagctgcttgggaagcgtatttgagtagacttggtgtttgagtgcttcagatacatttttcagatacaatgtgaagacattgaagatatgtggtcctcctgaaagtcactggctggaaataatccaattattcctgcttggattcttccacagggcctgtgtaagaatgggttctggagttctcatggtctttaggaaatattgagtaatttgtaatcaccgcattgatactataataagttcattcttaagcttgctttttttgagactggtgtttgttagacagccacagtcctgtctgggttagggtcttccacatttgaggatccttcctatctctccatgggactagactgctttgttattctatttattttttaatttttttcgagacaggatctcactctgttgcccaggatggagtgcagtggtgagatcacggctcattgcagcctcgacctcccaggtgatcctcccacctcagcttccagattagctggtgctataggcatgcaccaccacgtccatctaaatttctttattatttgtagagatgaggtcttgccatgttacccaggctggtctcaactcctgggctcaagcgatcctcctgcctcagtctctcaaagtgctgggattacaggtgtgagccactgtgcccagcctaattgcagtaagacaaaaattctagggcaccaagaggctaaagtcagc

SEQ ID NO: 33900 - DNA, 1982 bp, Homo sapiens
  source 1..1982: mol_type = unassigned DNA
caaacaggcagcgcgcgacaatggcggtcgctcgtgcagctttggggccattggtgacgggtctgtacgacgtgcaggctttcaagtttggggacttcgtgctgaagagcgggctttcctcccccatctacatcgatctgcggggcatcgtgtctcgaccgcgtcttctgagtcaggaactaagcgtcttgtagaaggaactattaatccaggagaaacctgtttaatcattgaagatgttgtcaccagtggatctagtgttttggaaactgttgaggttcttcagaaggagggcttgaaggtcactgatgccatagtgctgttggacagagagcagggaggcaaggacaagttgcaggcgcacgggatccgcctccactcagtgtgtacattgtccaaaatgctggagattctcgagcagcagaaaaaagttgatgctgagacagttgggagagtgaagaggtttattcaggagaatgtctttgtggcagcgaatcataatggttctcccctttctataaaggaagcacccaaagaactcagcttcggtgcacgtgcagagctgcccaggatccacccagttgcatcgaagcttctcaggcttatgcaaaagaaggagaccaatctgtgtctatctgctgatgtttcactggccagagagctgttgcagctagcagatgctttaggacctagtatctgcatgctgaagactcatgtagatattttgaatgattttactctggatgtgatgaaggagttgataactctggcaaaatgccatgagttcttgatatttgaagaccggaagtttgcagatataggaaacacagtgaaaaagcagtatgaaggaggtatctttaaaatagcttcctgggcagatctagtaaatgctcacgtggtgccaggctcaggagttgtgaaaggcctgcaagaagtgggcctgcctttgcatcgggggtgcctccttattgcggaaatgagctccaccggctccctggccactggggactacactagagcagcggttagaatggctgaggagcactctgaatttgttgttggttttatttctggctcccgagtaagcatgaaaccagaatttcttcacttgactccaggagttcagttggaagcaggaggagataatcttggccaacagtacaatagcccacaagaagttattggcaaacgaggttccgatatcatcattgtaggtcgtggcataatctcagcagctgatcgtctggaagcagcagagatgtacagaaaagctgcttgggaagcgtatttgagtagacttggtgtttgagtgcttcagatacatttttcagatacaatgtgaagacattgaagatatgtggtcctcctgaaagtcactggctggaaataatccaattattcctgcttggattcttccacagggcctgtgtaagaatgggttctggagttctcatggtctttaggaaatattgagtaatttgtaatcaccgcattgatactataataagttcattcttaagcttgctttttttgagactggtgtttgttagacagccacagtcctgtctgggttagggtcttccacatttgaggatccttcctatctctccatgggactagactgctttgttattctatttattttttaatttttttcgagacaggatctcactctgttgcccaggatggagtgcagtggtgagatcacggctcattgcagcctcgacctcccaggtgatcctcccacctcagcttccagattagctggtgctataggcatgcaccaccacgtccatctaaatttctttattatttgtagagatgaggtcttgccatgttacccaggctggtctcaactcctgggctcaagcgatcctcctgcctcagtctctcaaagtgctgggattacaggtgtgagccactgtgcccagcctaattgcagtaagacaaaaattctagggcaccaagaggctaaagtcagc

SEQ ID NO: 33901 - DNA, 1932 bp, Homo sapiens
  source 1..1932: mol_type = unassigned DNA
gcgggaactcccaggatcaggaaggtcccagagaaactccccaggggggaagccgaggccgtccagagagatccagggtacacacagtgacagtgccagctccacattcccgaccaccgggccagggctggttccacgctgtcatttctctccgctggccccagccgcggggccaccgccagacagacagaccggggatcctgcctggcggcgtgaccttgggttagtcctagagccgcttctagcccggtttcctccgccccaggttaggaccacgtggggcggggccgctcgcagactccatatgagattcacctcgcaggtggttccctcattcgagtgctccggcgcacagacccgcgccccgccgtctgcgagcctcccgagagccgtcccttcgtccggccctggagcattgcgtttgtcgccggtgtcgcagtgcgaggatggcgccgcgggtgtagcggctctctgcgcaggccgagtgggcttggtgaggtgactcgcggtcgcgggtgactcgccggcaggacactgcctggaacgcctggagcgcctcccactgcagacgtctgtccgcctccagccgctctcctctgacgggtcctgcctcagttggcggaatggcggccacgggagccaatgcagagaaagctgaaagtcacaatgattgccccgtcagacttttaaatccaaacatagcaaaaatgaaagaagatattctctatcatttcaatctcaccactagcagacacaatttcccagccttgtttggagatgtgaagtttgtgtgtgttggtggaagcccctcccggatgaaagccttcatcaggtgcgttggtgcagagctgggccttgactgcccaggtagagactatcccaacatctgtgcgggaactgaccgctatgccatgtataaagtaggaccggtgctgtctgtcagtcatggtatgggcattccttctatctcaatcatgttgcatgagctcataaagctgctgtactatgcccggtgctccaacgtcactatcatccgcattggcacttctggtgggataggtctggagcccggcactgtggtcataacagagcaggcagtggatacctgcttcaaggcagagtttgagcagattgtcctggggaagcgggtcatccggaaaacggaccttaacaagaagctggtgcaggagctgttgctgtgttctgcagagctgagcgagttcaccacagtggtggggaacaccatgtgcaccttggacttctatgaagggcaaggccgtctggatggggctctctgctcctacacggagaaggacaagcaggcgtatctggaggcagcctatgcagccggcgtccgcaatatcgagatggagtcctcggtgtttgccgccatgtgcagcgcctgcggcctccaagcggccgtggtgtgtgtcaccctcctgaaccgcctggaaggggaccagatcagcagccctcgcaatgtgctcagcgagtaccagcagaggccgcagcggctggtgagctacttcatcaagaagaaactgagcaaggcctgagcgctgccctgcacctccgcagacctgctgtgatgacttgccattaaaagcattgtccaaaatcccctgttgtgtggactttgagcacactttacacaagaatctagaaaatcagatcgcgattaagagacagagaatcttggattaaccgcatgggagatgttcttccttttgaagtttcattggagcattttcaatgatgttagcctgatttggggtttcttcaagaacattctaccaaatttttgtactatttctagggaaatttttcagactttaaaattctaatggtagtcagatttcatgtcactaaacaagaaatctgacaatagtgccaggaaactaatttcctgatacattaaaaaaattccatgca

SEQ ID NO: 33902 - DNA, 1822 bp, Homo sapiens
  source 1..1822: mol_type = unassigned DNA
caccgggccagggctggttccacgctgtcatttctctccgctggccccagccgcggggccaccgccagacagacagaccggggatcctgcctggcggcgtgaccttgggttagtcctagagccgcttctagcccggtttcctccgccccaggttaggaccacgtgggtggttccctcattcgagtgctccggcgcacagacccgcgccccgccgtctgcgagcctcccgagagccgtcccttcgtccggccctggagcattgcgtttgtcgccggtgtcgcagtgcgaggatggcgccgcgggtgtagcggctctctgcgcaggccgagtgggcccagagaagcgaggaactccgcagctcgtcgacacgtctcgtctcctgtcccaattcagggcttggtgaggtgactcgcggtcgcgggtgactcgccggcaggacactgcctggaacgcctggagcgcctcccactgcagacgtctgtccgcctccagccgctctcctctgacgggtcctgcctcagttggcggaatggcggccacgggagccaatgcagagaaagctgaaagtcacaatgattgccccgtcagacttttaaatccaaacatagcaaaaatgaaagaagatattctctatcatttcaatctcaccactagcagacacaatttcccagccttgtttggagatgtgaagtttgtgtgtgttggtggaagcccctcccggatgaaagccttcatcaggtgcgttggtgcagagctgggccttgactgcccaggtagagactatcccaacatctgtgcgggaactgaccgctatgccatgtataaagtaggaccggtgctgtctgtcagtcatggtatgggcattccttctatctcaatcatgttgcatgagctcataaagctgctgtactatgcccggtgctccaacgtcactatcatccgcattggcacttctggtgggataggtctggagcccggcactgtggtcataacagagcaggcagtggatacctgcttcaaggcagagtttgagcagattgtcctggggaagcgggtcatccggaaaacggaccttaacaagaagctggtgcaggagctgttgctgtgttctgcagagctgagcgagttcaccacagtggtggggaacaccatgtgcaccttggacttctatgaagggcaaggccgtctggatggggctctctgctcctacacggagaaggacaagcaggcgtatctggaggcagcctatgcagccggcgtccgcaatatcgagatggagtcctcggtgtttgccgccatgtgcagcgcctgcggcctccaagcggccgtggtgtgtgtcaccctcctgaaccgcctggaaggggaccagatcagcagccctcgcaatgtgctcagcgagtaccagcagaggccgcagcggctggtgagctacttcatcaagaagaaactgagcaaggcctgagcgctgccctgcacctccgcagacctgctgtgatgacttgccattaaaagcattgtccaaaatcccctgttgtgtggactttgagcacactttacacaagaatctagaaaatcagatcgcgattaagagacagagaatcttggattaaccgcatgggagatgttcttccttttgaagtttcattggagcattttcaatgatgttagcctgatttggggtttcttcaagaacattctaccaaatttttgtactatttctagggaaatttttcagactttaaaattctaatggtagtcagatttcatgtcactaaacaagaaatctgacaatagtgccaggaaactaatttcctgatacatt

SEQ ID NO: 33903 - DNA, 1375 bp, Homo sapiens
  source 1..1375: mol_type = unassigned DNA
tgagattcacctcgcaggtggttccctcattcgagtgctccggcgcacagacccgcgccccgccgtctgcgagcctcccgagagccgtcccttcgtccggccctggagcattgcgtttgtcgccggtgtcgcagtgcgaggatggcgccgcgggtgtagcggctctctgcgcaggccgagtgggcccagagaagcgaggaactccgcagctcgtcgacacgtctcgtctcctgtcccaattcagggcttggtgaggtgactcgcggtcgcgggtgactcgccggcaggacactgcctggaacgcctggagcgcctcccactgcagacgtctgtccgcctccagccgctctcctctgacgggtcctgcctcagttggcggaatggcggccacgggagccaatgcagagaaagctgaaagtcacaatgattgccccgtcagacttttaaatccaaacatagcaaaaatgaaagaagatattctctatcatttcaatctcaccactagcagacacaatttcccagccttgtttggagatgtgaagtttgtgtgtgttggtggaagcccctcccggatgaaagccttcatcaggtgcgttggtgcagagctgggccttgactgcccaggtagagactatcccaacatctgtgcgggaactgaccgctatgccatgtataaagtaggaccggtgctgtctgtcagtcatggtatgggcattccttctatctcaatcatgttgcatgagctcataaagctgctgtactatgcccggtgctccaacgtcactatcatccgcattggcacttctggtgggataggtctggagcccggcactgtggtcataacagagcaggcagtggatacctgcttcaaggcagagtttgagcagattgtcctggggaagcgggtcatccggaaaacggaccttaacaagaagctggtgcaggagctgttgctgtgttctgcagagctgagcgagttcaccacagtggtggggaacaccatgtgcaccttggacttctatgaagggcaaggccgtctggatggggctctctgctcctacacggagaaggacaagcaggcgtatctggaggcagcctatgcagccggcgtccgcaatatcgagatggagtcctcggtgtttgccgccatgtgcagcgcctgcggcctccaagcggccgtggtgtgtgtcaccctcctgaaccgcctggaaggggaccagatcagcagccctcgcaatgtgctcagcgagtaccagcagaggccgcagcggctggtgagctacttcatcaagaagaaactgagcaaggcctgagcgctgccctgcacctccgcagacctgctgtgatgacttgccattaaaagcattgtccaaaa

SEQ ID NO: 33904 - DNA, 864 bp, Homo sapiens
  source 1..864: mol_type = unassigned DNA
ggctttgccccagcaagcgggaactcccaggatcaggaaggtcccagagaaactccccaggggggaagccgaggccgtccagagagatccagggtacacacagtgacagtgccagctccacattcccgaccaccgggccagggctggttccacgctgtcatttctctccgctggccccagccgcggggccaccgccagacagacagaccggggatcctgcctggcggcgtgaccttgggttagtcctagagccgcttctagcccggtttcctccgccccaggttaggaccacgtggggcttggtgaggtgactcgcggtcgcgggtgactcgccggcaggacactgcctggaacgcctggagcgcctcccactgcagacgtctgtccgcctccagccgctctcctctgacgggtcctgcctcagttggcggaatggcggccacgggagccaatgcagagaaagctgaaagtcacaatgattgccccgtcagacttttaaatccaaacatagcaaaaatgaaagaagatattctctatcatttcaatctcaccactagcagacacaatttcccagccttgtttggagatgtgaagtttgtgtgtgttggtggaagcccctcccggatgaaagccttcatcaggtgcgttggtgcagagctgggccttgactgcccaggtagagactatcccaacatctgtgcgggaactgaccgctatgccatgtataaagtaggaccggtgctgtctgtcagtcatggtatgggcattccttctatctcaatcatgttgcatgagctcataaagctgctgtactatgcccggtgctccaacgtcactatcatccgcattggcacttctggtggg

SEQ ID NO: 33905 - DNA, 974 bp, Homo sapiens
  source 1..974: mol_type = unassigned DNA
agactccatatgagattcacctcgcaggtggttccctcattcgagtgctccggcgcacagacccgcgccccgccgtctgcgagcctcccgagagccgtcccttcgtccggccctggagcattgcgtttgtcgccggtgtcgcagtgcgaggatggcgccgcgggtgtagcggctctctgcgcaggccgagtgggcttggtgaggtgactcgcggtcgcgggtgactcgccggcaggacactgcctggaacgcctggagcgcctcccactgcagacgtctgtccgcctccagccgctctcctctgacgggtcctgcctcagttggcggaatggcggccacgggagccaatgcagagaaagctgaaagtcacaatgattgccccgtcagacttttaaatccaaacatagcaaaaatgaaagaagatattctctatcatttcaatctcaccactagcagacacaatttcccagccttgtttggagatgtgaagtttgtgtgtgttggtggaagcccctcccggatgaaagccttcatcaggtgcgttggtgcagagctgggccttgactgcccaggtagagactatcccaacatctgtgcgggaactgaccgctatgccatgtataaagtaggaccggtgctgtctgtcagtcatggtatgggcattccttctatctcaatcatgttgcatgagctcataaagctgctgtactatgcccggtgctccaacgtcactatcatccgcattggcacttctggtgggatagggattttgaagcaccttaggagaaaagacacaggaaaatcaaaggggggaagagagaggcgcagtacaaaactcagataagtgtccttaaattagcttaaaatgtccctatcctcaacagggacattttttttttgtttaaaaaacaaagatggttggccgggcgcggtggctcacacctgtaatcccagcacattgggaggccgaggcg

SEQ ID NO: 33906 - DNA, 778 bp, Homo sapiens
  source 1..778: mol_type = unassigned DNA
ggatggcgccgcgggtgtagcggctctctgcgcaggccgagtgggcttggtgaggtgactcgcggtcgcgggtgactcgccggcaggacactgcctggaacgcctggagcgcctcccactgcagacgtctgtccgcctccagccgctctcctctgacgggtcctgcctcagttggcggaatggcggccacgggagccaatgcagagaaagctgaaagtcacaagtctggagcccggcactgtggtcataacagagcaggcagtggatacctgcttcaaggcagagtttgagcagattgtcctggggaagcgggtcatccggaaaacggaccttaacaagaagctggtgcaggagctgttgctgtgttctgcagagctgagcgagttcaccacagtggtggggaacaccatgtgcaccttggacttctatgaagggcaaggccgtctggatggggctctctgctcctacacggagaaggacaagcaggcgtatctggaggcagcctatgcagccggcgtccgcaatatcgagatggagtcctcggtgtttgccgccatgtgcagcgcctgcggcctccaagcggccgtggtgtgtgtcaccctcctgaaccgcctggaaggggaccagatcagcagccctcgcaatgtgctcagcgagtaccagcagaggccgcagcggctggtgagctacttcatcaagaagaaactgagcaaggcctgagcgctgccctgcacctccgcagacctgctgtgatgacttgccattaaaagcattgtcc

SEQ ID NO: 33907 - DNA, 682 bp, Homo sapiens
  source 1..682: mol_type = unassigned DNA
caggaaggtcccagagaaactccccaggggggaagccgaggccgtccagagagatccagggtacacacagtgacagtgccagctccacattcccgaccaccgggccagggctggttccacgctgtcatttctctccgctggccccagccgcggggccaccgccagacagacagaccggggatcctgcctggcggcgtgaccttgggttagtcctagagccgcttctagcccggtttcctccgccccagtgctccggcgcacagacccgcgccccgccgtctgcgagcctcccgagagccgtcccttcgtccggccctggagcattgcgtttgtcgccggtgtcgcagtgcgaggatggcgccgcgggtgtagcggctctctgcgcaggccgagtgggcccagagaagcgaggaactccgcagctcgtcgacacgtctcgtctcctgtcccaattcagggcttggtgaggtgactcgcggtcgcgggtgactcgccggcaggacactgcctggaacgcctggagcgcctcccactgcagacgtctgtccgcctccagccgctctcctctgacgggtcctgcctcagttggcggaatggcggccacgggagccaatgcagagaaagctgaaagtcacaatgattgccccgtcagacttttaaatccaaacatagcaaaaatgaa

SEQ ID NO: 33908 - DNA, 918 bp, Homo sapiens
  source 1..918: mol_type = unassigned DNA
attcgagtgctccggcgcacagacccgcgccccgccgtctgcgagcctcccgagagccgtcccttcgtccggccctggagcattgcgtttgtcgccggtgtcgcagtgcgaggatggcgccgcgggtgtagcggctctctgcgcaggccgagtggggcggtgacggaggctctggtgcaccttggctgtgagctgcagaggagcagagagcggcccggcgcggctgcgcggggaggcgggcgcgcggccgggaggttctggggctggtgtgtgcggagcgagggcccagagaagcgaggaactccgcagctcgtcgacacgtctcgtctcctgtcccaattcagggcttggtgaggtgactcgcggtcgcgggtgactcgccggcaggacactgcctggaacgcctggagcgcctcccactgcagacgtctgtccgcctccagccgctctcctctgacgggtcctgcctcagttggcggaatggcggccacgggagccaatgcagagaaagctgaaagtcacaatgattgccccgtcagacttttaaatccaaacatagcaaaaatgaaagaagatattctctatcatttcaatctcaccactagcagacacaatttcccagccttgtttggagatgtgaagtttgtgtgtgttggtggaagcccctcccggatgaaagccttcatcaggtgcgttggtgcagagctgggccttgactgcccaggtagagactatcccaacatctgtgcgggaactgaccgctatgccatgtataaagtaggaccggtgctgtctgtcagtcatggtatgggcattccttctatctcaatcatgttgcatgagctcataaagctgctgtactatgcccggtgctccaacgtcactatcatccgcattggcacttctggtgggataggt

SEQ ID NO: 33909 - DNA, 2063 bp, Homo sapiens
  source 1..2063: mol_type = unassigned DNA
gcctccgacctcggcgctgggcgggcgcgccgggcctggggaaggggcgggcgcggggacccgatgcgcgggagcggaggccgagatggcttcggcgggaggcgaagactgcgagagccccgcgccggaggccgaccgtccgcaccagcggcccttcctgataggggtgagcggcggcactgccagcgggaagtcgaccgtgtgtgagaagatcatggagttgctgggacagaacgaggtggaacagcggcagcggaaggtggtcatcctgagccaggacaggttctacaaggtcctgacggcagagcagaaggccaaggccttgaaaggacagtacaattttgaccatccagatgcctttgataatgatttgatgcacaggactctgaagaacatcgtggagggcaaaacggtggaggtgccgacctatgattttgtgacacactcaaggttaccagagaccacggtggtctaccctgcggacgtggttctgtttgagggcatcttggtgttctacagccaggagatccgggacatgttccacctgcgcctcttcgtggacaccgactccgacgtcaggctgtctcgaagagacaaagaagtatgccgatgtgatcatcccgcgaggagtggacaatatggttgccatcaacctgatcgtgcagcacatccaggacattctgaatggtgacatctgcaaatggcaccgaggagggtccaatgggcggagctacaagcggaccttttctgagccaggggaccaccctgggatgctgacctctggcaaacggtcacatttggagtccagcagcagaccccactgaggggctgccgagcctcagggcaggtctcccgcccggcatgtgtgttcagggactgagcctggggacgcccacccacacccactgcttcctctcggcgcaccccaggggagtgttagcagcgaggccttcctcactcaggagtggaaactcagatgtgtcactcagactcaacttgctgggacactgacaggcgttcctgaggttttcagccacttaggctcgttgcggtttaaagatccctctaggtcactgagaaatgccacagaatgtgcaggaagcctgggaggcttctgtgaggaatgtgaggcacattattggggaaattgaggagacagcctagacactggctggcctgatgttttgttgacagtgaacccacagtgggagagagttttttccagtctgatctggttcttacacactcacacacataactcaaaagttttgtgaacaagtactttccttttttacatgttacatgtcctcatgttttctgttttctgtttcataacacaaggctggttgtggcctacaaacctaatttcatgacccagtggtttgcagtccagcgtggcctacacggatatggggagccactgagggatgttttccccccttgcttgtgccttaaaggcagagaagcgaggcggatgccctggaagcacccagcatcacacccaggcttgtgcggggccaggctgggagcccatgcagtagggcagaaggcagcggaggccaggtctgtcccggctggagaacagcgtccacgcagtcctgcctggggtcaggccctcactgaccctcaggggagcccccaaggtgctgtctgtctagacaggctgtcccaccccagggtggctagtggccatatgcagggaatggtgcttctggctgtggcacgcactggatcacccaggtcccagcagacatggccgcccaaagtcagcaagcctcctttgtgctatgtggagctcacagcctcacatgtgaacacccgtgtctgggttgcctggggtgatcctccctcctgcgtggtggctgtctctggaaagcatcccttgccgctgccatgggcagccccagcccccgtccgtccaggctcacccacagtagtgatgcagacgtgacgtgggggaagggggctgagccctgtggctgggttctgacaactgtaacggttttgtcgagcttaggcccctttggagggagaatcaataaataacaaacaccaactacaaa

SEQ ID NO: 33910 - DNA, 2051 bp, Homo sapiens
  source 1..2051: mol_type = unassigned DNA
ccgagatggcttcggcgggaggcgaagactgcgagagccccgcgccggaggccgaccgtccgcaccagcggcccttcctgatagggtcgaccgtgtgtgagaagatcatggagttgctgggacagaacgaggtggaacagcggcagcggaaggtggtcatcctgagccaggacaggttctacaaggtcctgacggcagagcagaaggccaaggccttgaaaggacagtacaattttgaccatccagatgcctttgataatgatttgatgcacaggactctgaagaacatcgtggagggcaaaacggtggaggtgccgacctatgattttgtgacacactcaaggttaccagagaccacggtggtctaccctgcggacgtggttctgtttgagggcatcttggtgttctacagccaggagatccgggacatgttccacctgcgcctcttcgtggacaccgactccgacgtcaggctgtctcgaagagttctccgggacgtgcgccgagggagggacctggagcagattctgacgcagtacaccaccttcgtgaagccggccttcgaggagttctgcctgccgacaaagaagtatgccgatgtgatcatcccgcgaggagtggacaatatggttgccatcaacctgatcgtgcagcacatccaggacattctgaatggtgacatctgcaaatggcaccgaggagggtccaatgggcggagctacaagcggaccttttctgagccaggggaccaccctgggatgctgacctctggcaaacggtcacatttggagtccagcagcagaccccactgaggggctgccgagcctcagggcaggtctcccgcccggcatgtgtgttcagggactgagcctggggacgcccacccacacccactgcttcctctcggcgcaccccaggggagtgttagcagcgaggccttcctcactcaggagtggaaactcagatgtgtcactcagactcaacttgctgggacactgacaggcgttcctgaggttttcagccacttaggctcgttgcggtttaaagatccctctaggtcactgagaaatgccacagaatgtgcaggaagcctgggaggcttctgtgaggaatgtgaggcacattattggggaaattgaggagacagcctagacactggctggcctgatgttttgttgacagtgaacccacagtgggagagagttttttccagtctgatctggttcttacacactcacacacataactcaaaagttttgtgaacaagtactttccttttttacatgttacatgtcctcatgttttctgttttctgtttcataacacaaggctggttgtggcctacaaacctaatttcatgacccagtggtttgcagtccagcgtggcctacacggatatggggagccactgagggatgttttccccccttgcttgtgccttaaaggcagagaagcgaggcggatgccctggaagcacccagcatcacacccaggcttgtgcggggccaggctgggagcccatgcagtagggcagaaggcagcggaggccaggtctgtcccggctggagaacagcgtccacgcagtcctgcctggggtcaggccctcactgaccctcaggggagcccccaaggtgctgtctgtctagacaggctgtcccaccccagggtggctagtggccatatgcagggaatggtgcttctggctgtggcacgcactggatcacccaggtcccagcagacatggccgcccaaagtcagcaagcctcctttgtgctatgtggagctcacagcctcacatgtgaacacccgtgtctgggttgcctggggtgatcctccctcctgcgtggtggctgtctctggaaagcatcccttgccgctgccatgggcagccccagcccccgtccgtccaggctcacccacagtagtgatgcagacgtgacgtgggggaagggggctgagccctgtggctgggttctgacaactgtaacggttttgtcgagcttaggcccctttggagggagaatcaataaataacaaacaccaactacaaa

SEQ ID NO: 33911 - DNA, 2114 bp, Homo sapiens
  source 1..2114: mol_type = unassigned DNA
cccgatgcgcgggagcggaggccgagatggcttcggcgggaggcgaagactgcgagagccccgcgccggaggccgaccgtccgcaccagcggcccttcctgataggggacgagcggttccaggcgggaatcccgcttctgtgtctccagtcgaccgtgtgtgagaagatcatggagttgctgggacagaacgaggtggaacagcggcagcggaaggtggtcatcctgagccaggacaggttctacaaggtcctgacggcagagcagaaggccaaggccttgaaaggacagtacaattttgaccatccagatgcctttgataatgatttgatgcacaggactctgaagaacatcgtggagggcaaaacggtggaggtgccgacctatgattttgtgacacactcaaggttaccagagaccacggtggtctaccctgcggacgtggttctgtttgagggcatcttggtgttctacagccaggagatccgggacatgttccacctgcgcctcttcgtggacaccgactccgacgtcaggctgtctcgaagagttctccgggacgtgcgccgagggagggacctggagcagattctgacgcagtacaccaccttcgtgaagccggccttcgaggagttctgcctgccgacaaagaagtatgccgatgtgatcatcccgcgaggagtggacaatatggttgccatcaacctgatcgtgcagcacatccaggacattctgaatggtgacatctgcaaatggcaccgaggagggtccaatgggcggagctacaagcggaccttttctgagccaggggaccaccctgggatgctgacctctggcaaacggtcacatttggagtccagcagcagaccccactgaggggctgccgagcctcagggcaggtctcccgcccggcatgtgtgttcagggactgagcctggggacgcccacccacacccactgcttcctctcggcgcaccccaggggagtgttagcagcgaggccttcctcactcaggagtggaaactcagatgtgtcactcagactcaacttgctgggacactgacaggcgttcctgaggttttcagccacttaggctcgttgcggtttaaagatccctctaggtcactgagaaatgccacagaatgtgcaggaagcctgggaggcttctgtgaggaatgtgaggcacattattggggaaattgaggagacagcctagacactggctggcctgatgttttgttgacagtgaacccacagtgggagagagttttttccagtctgatctggttcttacacactcacacacataactcaaaagttttgtgaacaagtactttccttttttacatgttacatgtcctcatgttttctgttttctgtttcataacacaaggctggttgtggcctacaaacctaatttcatgacccagtggtttgcagtccagcgtggcctacacggatatggggagccactgagggatgttttccccccttgcttgtgccttaaaggcagagaagcgaggcggatgccctggaagcacccagcatcacacccaggcttgtgcggggccaggctgggagcccatgcagtagggcagaaggcagcggaggccaggtctgtcccggctggagaacagcgtccacgcagtcctgcctggggtcaggccctcactgaccctcaggggagcccccaaggtgctgtctgtctagacaggctgtcccaccccagggtggctagtggccatatgcagggaatggtgcttctggctgtggcacgcactggatcacccaggtcccagcagacatggccgcccaaagtcagcaagcctcctttgtgctatgtggagctcacagcctcacatgtgaacacccgtgtctgggttgcctggggtgatcctccctcctgcgtggtggctgtctctggaaagcatcccttgccgctgccatgggcagccccagcccccgtccgtccaggctcacccacagtagtgatgcagacgtgacgtgggggaagggggctgagccctgtggctgggttctgacaactgtaacggttttgtcgagcttaggcccctttggagggagaatcaataaataacaaacaccaactacaaa

SEQ ID NO: 33912 - DNA, 2167 bp, Homo sapiens
  source 1..2167: mol_type = unassigned DNA
gctccggttgcctccgacctcggcgctgggcgggcgcgccgggcctggggaaggggcgggcgcggggacccgatgcgcgggagcggaggccgagatggcttcggcgggaggcgaagactgcgagagccccgcgccggaggccgaccgtccgcaccagcggcccttcctgataggggtgagcggcggcactgccagcgggaagtcgaccgtgtgtgagaagatcatggagttgctgggacagaacgaggtggaacagcggcagcggaaggtggtcatcctgagccaggacaggttctacaaggtcctgacggcagagcagaaggccaaggccttgaaaggacagtacaattttgaccatccagatgcctttgataatgatttgatgcacaggactctgaagaacatcgtggagggcaaaacggtggaggtgccgacctatgattttgtgacacactcaaggttaccagagaccacggtggtctaccctgcggacgtggttctgtttgagggcatcttggtgttctacagccaggagatccgggacatgttccacctgcgcctcttcgtggacaccgactccgacgtcaggctgtctcgaagagttctccgggacgtgcgccgagggagggacctggagcagattctgacgcagtacaccaccttcgtgaagccggccttcgaggagttctgcctgccgacaaagaagtatgccgatgtgatcatcccgcgaggagtggacaatatggttgccatcaacctgatcgtgcagcacatccaggacattctgaatggtgacatctgcaaatggcaccgaggagggtccaatgggcggagctacaagcggaccttttctgagccaggggaccaccctgggatgctgacctctggcaaacggtcacatttggagtccagcagcagaccccactgaggggctgccgagcctcagggcaggtctcccgcccggcatgtgtgttcagggactgagcctggggacgcccacccacacccactgcttcctctcggcgcaccccaggggagtgttagcagcgaggccttcctcactcaggagtggaaactcagatgtgtcactcagactcaacttgctgggacactgacaggcgttcctgaggttttcagccacttaggctcgttgcggtttaaagatccctctaggtcactgagaaatgccacagaatgtgcaggaagcctgggaggcttctgtgaggaatgtgaggcacattattggggaaattgaggagacagcctagacactggctggcctgatgttttgttgacagtgaacccacagtgggagagagttttttccagtctgatctggttcttacacactcacacacataactcaaaagttttgtgaacaagtactttccttttttacatgttacatgtcctcatgttttctgttttctgtttcataacacaaggctggttgtggcctacaaacctaatttcatgacccagtggtttgcagtccagcgtggcctacacggatatggggagccactgagggatgttttccccccttgcttgtgccttaaaggcagagaagcgaggcggatgccctggaagcacccagcatcacacccaggcttgtgcggggccaggctgggagcccatgcagtagggcagaaggcagcggaggccaggtctgtcccggctggagaacagcgtccacgcagtcctgcctggggtcaggccctcactgaccctcaggggagcccccaaggtgctgtctgtctagacaggctgtcccaccccagggtggctagtggccatatgcagggaatggtgcttctggctgtggcacgcactggatcacccaggtcccagcagacatggccgcccaaagtcagcaagcctcctttgtgctatgtggagctcacagcctcacatgtgaacacccgtgtctgggttgcctggggtgatcctccctcctgcgtggtggctgtctctggaaagcatcccttgccgctgccatgggcagccccagcccccgtccgtccaggctcacccacagtagtgatgcagacgtgacgtgggggaagggggctgagccctgtggctgggttctgacaactgtaacggttttgtcgagcttaggcccctttggagggagaatcaataaataacaaacaccaactacaaa

SEQ ID NO: 33913 - DNA, 1833 bp, Homo sapiens
  source 1..1833: mol_type = unassigned DNA
tgcgcgccgcccggccaggcccgcaaagaggcctccgagcgccatggctgcgcccccggcccgcgcggacgctgatccttcgcccacgtcgccacctacggcccgagacacaccaggccggcaggctgagaaaagcgagaccgcgtgcgaggaccgcagcaatgcagagtccctggacaggctcctgccacctgtgggcactgggcgctctccccggaagcggaccaccagccagtgcaagtcagagcctcccctgctgcgtacaagcaagcgtaccatctacaccgccgggcggccgccctggtacaatgaacacggcacgcaatccaaagaggccttcgccatcggcttgggaggcggcagtgcctctgggaagaccactgtggccagaatgatcatcgaggccctggatgtgccctgggtggtcttgctgtccatggactccttctacaaggtgctgactgagcagcagcaggaacaggccgcacacaacaacttcaacttcgaccacccagatgcctttgacttcgacctcatcatttccaccctcaagaagctgaagcaggggaagagtgtcaaggtgcccatttatgacttcaccacgcacagccggaagaaggactggaaaacactgtatggtgcaaacgtcatcatctttgagggcatcatggcctttgctgacaagacactgttggagctcctggacatgaagatctttgtggacacagactccgacatccgcctggtacggcggctgcgccgggacatcagtgagcgcggccgggacatcgagggtgtcatcaagcagtacaacaagtttgtcaagccctccttcgaccagtacatccagcccaccatgcgcctggcagacatcgtggtccccagagggagcggcaacacggtggccatcgacctgattgtgcagcacgtgcacagccagctggaggagcgtgaactcagcgtcagggctgcgctggcctcggcacaccagtgccacccgctgccccggacgctgagcgtcctgaagagcacgccgcaggtacggggcatgcacaccatcatcagggacaaggagaccagtcgcgacgagttcatcttctactccaagagactgatgcggctgctcatcgagcacgcgctctccttcctgccctttcaggactgcgtcgtacagaccccgcaggggcaggactatgcgggcaagtgctatgcggggaagcagatcaccggtgtgtccattctgcgcgccggtgaaaccatggagcccgcgctgcgcgctgtgtgcaaagacgtgcgcatcggcaccatcctcatccagaccaaccagcttaccggggagcccgagctccactacctgaggctgcccaaggacatcagcgatgaccacgtgatcctcatggactgcaccgtgtccacgggcgcggcggccatgatggcagtgcgcgtgctcctggaccacgacgtgcctgaggacaagatctttttgctgtcgctgctcatggcagagatgggcgtgcactcagtggcctatgcatttccgcgagtgagaatcatcaccacggcggtggacaagcgggtcaatgaccttttccgcatcatcccaggcattgggaactttggcgaccgctactttgggacagacgcggtccccgatggcagtgacgaggaggaagtggcctacacgggttagctgcccagtgagccatcccgtccccaccaccctcctcctgcctcctgacccaggactgctgaatacaaagatgttaatttttaaaatgttactagtataatttattctatgcattttataaaataaataaagctttagaaaaa

SEQ ID NO: 33914 - DNA, 1876 bp, Homo sapiens
  source 1..1876: mol_type = unassigned DNA
atgcgcgccgcccggccaggcccgcaaagaggcctccgagcgccatggctgcgcccccggcccgcgcggacgctgatccttcgcccacgtcgccacctacggcccgagacacaccaggccggcaggctgagaaaagcgagaccgcgtgcgaggaccgcagcaatgcagagtccctggacaggctcctgccacctgtgggcactgggcgctctccccggaagcggaccaccagccagtgcaagtcagagcctcccctgctgcgtacaagcaagcgtaccatctacaccgccgggcggccgccctggtacaatgaacacggcacgcaatccaaagaggccttcgccatcggcttgggaggcggcagtgcctctgggaagaccactgtggccagaatgatcatcgaggccctggatgtgccctgggtggtcttgctgtccatggactccttctacaaggtgctgactgagcagcagcaggaacaggccgcacacaacaacttcaacttcgaccacccagatgcctttgacttcgacctcatcatttccaccctcaagaagctgaagcaggggaagagtgtcaaggtgcccatttatgacttcaccacgcacagccggaagaaggactggaaaacactgtatggtgcaaacgtcatcatctttgagggcatcatggcctttgctgacaagacactgttggagctcctggacatgaagatctttgtggacacagactccgacatccgcctggtacggcggctgcgccgggacatcagtgagcgcggccgggacatcgagggtgtcatcaagcagtacaacaagtttgtcaagccctccttcgaccagtacatccagcccaccatgcgcctggcagacatcgtggtccccagagggagcggcaacacggtggccatcgacctgattgtgcagcacgtgcacagccagctggaggagggctgcgctggcctcggcacaccagtgccacccgctgccccggacgctgagcgtcctgaagagcacgccgcaggtacggggcatgcacaccatcatcaggtgagggcccacctggggacggggcggccccgggcgcgtgctcccgctcaactgttggccccacagggacaaggagaccagtcgcgacgagttcatcttctactccaagagactgatgcggctgctcatcgagcacgcgctctccttcctgccctttcaggactgcgtcgtacagaccccgcaggggcaggactatgcgggcaagtgctatgcggggaagcagatcaccggtgtgtccattctgcgcgccggtgaaaccatggagcccgcgctgcgcgctgtgtgcaaagacgtgcgcatcggcaccatcctcatccagaccaaccagcttaccggggagcccgagctccactacctgaggctgcccaaggacatcagcgatgaccacgtgatcctcatggactgcaccgtgtccacgggcgcggcggccatgatggcagtgcgcgtgctcctggaccacgacgtgcctgaggacaagatctttttgctgtcgctgctcatggcagagatgggcgtgcactcagtggcctatgcatttccgcgagtgagaatcatcaccacggcggtggacaagcgggtcaatgaccttttccgcatcatcccaggcattgggaactttggcgaccgctactttgggacagacgcggtccccgatggcagtgacgaggaggaagtggcctacacgggttagctgcccagtgagccatcccgtccccaccaccctcctcctgcctcctgacccaggactgctgaatacaaagatgttaatttttaaaatgttactagtataatttattctatgcattttataaaataaataaagcttt

SEQ ID NO: 33915 - DNA, 1827 bp, Homo sapiens
  source 1..1827: mol_type = unassigned DNA
atgcgcgccgcccggccaggcccgcaaagaggcctccgagcgccatggctgcgcccccggcccgcgcggacgctgatccttcgcccacgtcgccacctacggcccgagacacaccaggccggcaggctgagaaaagcgagaccgcgtgcgaggaccgcagcaatgcagagtccctggacaggctcctgccacctgtgggcactgggcgctctccccggaagcggaccaccagccagtgcaagtcagagcctcccctgctgcgtacaagcaagcgtaccatctacaccgccgggcggccgccctggtacaatgaacacggcacgcaatccaaagaggccttcgccatcggcttgggaggcggcagtgcctctgggaagaccactgtggccagaatgatcatcgaggccctggatgtgccctgggtggtcttgctgtccatggactccttctacaaggtgctgactgagcagcagcaggaacaggccgcacacaacaacttcaacttcgaccacccagatgcctttgacttcgacctcatcatttccaccctcaagaagctgaagcaggggaagagtgtcaaggtgcccatttatgacttcaccacgcacagccggaagaaggactggaaaacactgtatggtgcaaacgtcatcatctttgagggcatcatggcctttgctgacaagacactgttggagctcctggacatgaagatctttgtggacacagactccgacatccgcctggtacggcggctgcgccgggacatcagtgagcgcggccgggacatcgagggtgtcatcaagcagtacaacaagtttgtcaagccctccttcgaccagtacatccagcccaccatgcgcctggcagacatcgtggtccccagagggagcggcaacacggtggccatcgacctgattgtgcagcacgtgcacagccagctggaggagctcaggtttgtccccagggctgcgctggcctcggcacaccagtgccacccgctgccccggacgctgagcgtcctgaagagcacgccgcaggtacggggcatgcacaccatcatcagggacaaggagaccagtcgcgacgagttcatcttctactccaagagactgatgcggctgctcatcgagcacgcgctctccttcctgccctttcaggactgcgtcgtacagaccccgcaggggcaggactatgcgggcaagtgctatgcggggaagcagatcaccggtgtgtccattctgcgcgccggtgaaaccatggagcccgcgctgcgcgctgtgtgcaaagacgtgcgcatcggcaccatcctcatccagaccaaccagcttaccggggagcccgagctccactacctgaggctgcccaaggacatcagcgatgaccacgtgatcctcatggactgcaccgtgtccacgggcgcggcggccatgatggcagtgcgcgtgctcctggaccacgacgtgcctgaggacaagatctttttgctgtcgctgctcatggcagagatgggcgtgcactcagtggcctatgcatttccgcgagtgagaatcatcaccacggcggtggacaagcgggtcaatgaccttttccgcatcatcccaggcattgggaactttggcgaccgctactttgggacagacgcggtccccgatggcagtgacgaggaggaagtggcctacacgggttagctgcccagtgagccatcccgtccccaccaccctcctcctgcctcctgacccaggactgctgaatacaaagatgttaatttttaaaatgttactagtataatttattctatgcattttataaaataaataaagcttt

SEQ ID NO: 33916 - DNA, 1954 bp, Homo sapiens
  source 1..1954: mol_type = unassigned DNA
agtacggtggaggcttcaagggcctcctagctgctgtgcctctgctgacatttggcaggcagcttctgccagccaagggtctcaccccagccacccggctctgcacccactgtgctgcccacaggagtggtcctgcccatggaagggccagttcaggtggccggagctcctgagctgccctaggggactgctgtgggtctgaggtggtgatgtcccccacggctgcctgcgcctgagcccccacgcatccacccctggggccactctgctgttcaggagcacccacccgtgtcctcgaccatgagcagccccccagcttaccctggcatcaggatctcagggtgccgggcccttggagcagaaggcagcagcaatgcagagtccctggacaggctcctgccacctgtgggcactgggcgctctccccggaagcggaccaccagccagtgcaagtcagagcctcccctgctgcgtacaagcaagcgtaccatctacaccgccgggcggccgccctggtacaatgaacacggcacgcaatccaaagaggccttcgccatcggcttgggaggcggcagtgcctctgggaagaccactgtggccagaatgatcatcgaggccctggatgtgccctgggtggtcttgctgtccatggactccttctacaaggtgctgactgagcagcagcaggaacaggccgcacacaacaacttcaacttcgaccacccagatgcctttgacttcgacctcatcatttccaccctcaagaagctgaagcaggggaagagtgtcaaggtgcccatttatgacttcaccacgcacagccggaagaaggactggaaaacactgtatggtgcaaacgtcatcatctttgagggcatcatggcctttgctgacaagacactgttggagctcctggacatgaagatctttgtggacacagactccgacatccgcctggtacggcggctgcgccgggacatcagtgagcgcggccgggacatcgagggtgtcatcaagcagtacaacaagtttgtcaagccctccttcgaccagtacatccagcccaccatgcgcctggcagacatcgtggtccccagagggagcggcaacacggtggccatcgacctgattgtgcagcacgtgcacagccagctggaggagcgtgaactcagcgtcagggctgcgctggcctcggcacaccagtgccacccgctgccccggacgctgagcgtcctgaagagcacgccgcaggtacggggcatgcacaccatcatcagggacaaggagaccagtcgcgacgagttcatcttctactccaagagactgatgcggctgctcatcgagcacgcgctctccttcctgccctttcaggactgcgtcgtacagaccccgcaggggcaggactatgcgggcaagtgctatgcggggaagcagatcaccggtgtgtccattctgcgcgccggtgaaaccatggagcccgcgctgcgcgctgtgtgcaaagacgtgcgcatcggcaccatcctcatccagaccaaccagcttaccggggagcccgagctccactacctgaggctgcccaaggacatcagcgatgaccacgtgatcctcatggactgcaccgtgtccacgggcgcggcggccatgatggcagtgcgcgtgctcctggaccacgacgtgcctgaggacaagatctttttgctgtcgctgctcatggcagagatgggcgtgcactcagtggcctatgcatttccgcgagtgagaatcatcaccacggcggtggacaagcgggtcaatgaccttttccgcatcatcccaggcattgggaactttggcgaccgctactttgggacagacgcggtccccgatggcagtgacgaggaggaagtggcctacacgggttagctgcccagtgagccatcccgtccccaccaccctcctcctgcctcctgaccca

SEQ ID NO: 33917 - DNA, 422 bp, Homo sapiens
  source 1..422: mol_type = unassigned DNA
catggaagggccagttcaggtggccggagctcctgagctgccctaggggactgctgtgggtctgaggtggtgatgtcccccacggctgcctgcgcctgagcccccacgcatccacccctggggccactctgctgttcaggagcacccacccgtgtcctcgaccatgagcagccccccagcttaccctggcatcaggatctcagggtgccgggcccttggagcagaaggcagcagcaatgcagagtccctggacaggctcctgccacctgtgggcactgggcgctctccccggaagcggaccaccagccagtgcaagtcagagcctcccctgctgcgtacaagcaagcgtaccatctacaccgccgggcggccgccctggtacaatgaacacggcacgcaatccaaagaggccttcgccatcg

SEQ ID NO: 33918 - DNA, 888 bp, Homo sapiens
  source 1..888: mol_type = unassigned DNA
ctttagttcccccggggagaggctggggacaagctacccattctggggtatgacacctatcagcacgtgtgagcccgccctgtgcccggcccacttctgcttcctcttagcgcaggaggggtcccgcactgggaggggccctcacagcctaccccgctagctttctgcctgatggtgagcttgccccgttgttcgccgccatctttcgcctttgcctgacagctcaggtagggcgacgtctccccccagctcagccccaggcagaagtcaggcccgctctgcacctcgtgctgtgcctggcccgtgtgttcccctcacagtgacgcacagccgtcctgtggggagggagggctctgggaaaagacccccttcttgagtgttccccatcggtttgtccccagggctgcgctggcctcggcacaccagtgccacccgctgccccggacgctgagcgtcctgaagagcacgccgcaggtacggggcatgcacaccatcatcagggacaaggagaccagtcgcgacgagttcatcttctactccaagagactgatgcggctgctcatcgagcacgcgctctccttcctgccctttcaggactgcgtcgtacagaccccgcaggggcaggactatgcgggcaagtgctatgcggggaagcagatcaccggtgtgtccattctgcgcgccggtgaaaccatggagcccgcgctgcgcgctgtgtgcaaagacgtgcgcatcggcaccatcctcatccagaccaaccagcttaccggggagcccgagctccactacctgaggctgcccaaggacatcagcgatgaccacgtgatcctcatggactgcaccgtgtccacgggcgcggcggccatgatggcagtgcgcgtgctcctg

SEQ ID NO: 33919 - DNA, 1375 bp, Homo sapiens
  source 1..1375: mol_type = unassigned DNA
ctcgccgcctccgcctcggcgaatagcagcgcgctgcccgcccggattggagcagcagcatcacgctgacctctgcctgggatgtaaaccggaccagccgctgcgggcaaaggaaggctcttggctccttcgggaaacccagccccgtcaccgggctccgagcggctcgcaggcgagcgacagcggcctcagccccggcagcgcccagcggcggctgcggaaagcggagggagtccgacgcgggcgcgggcggggagcgtgcgtccgttcgcacaggcagcgggaggaggggcggcgcgaaccatggccggggacagcgagcagaccctgcagaaccaccagcagcccaacggcggcgagcccttccttataggcgtcagcgggggaacagctagcggcaagtcttccgtgtgtgctaagatcgtgcagctcctggggcagaatgaggtggactatcgccagaagcaggtggtcatcctgagccaggatagcttctaccgtgtccttacctcggagcagaaggccaaagccctgaagggccagttcaactttgaccacccggatgcctttgacaatgaactcattctcaaaacactcaaagaaatcactgaagggaaaacagtccagatccccgtgtatgactttgtctcccattcccggaaggaggagacagttactgtctatcccgcagacgtggtgctctttgaagggatcctggccttctactcccaggaggtacgagacctgttccagatgaagctttttgtggatacagatgcggacacccggctctcacgcagagtattaagggacatcagcgagagaggcagggatcttgagcagattttatctcagtacattacgttcgtcaagcctgcctttgaggaattctgcttgccaacaaagaagtatgctgatgtgatcatccctagaggtgcagataatctggtggccatcaacctcatcgtgcagcacatccaggacatcctgaatggagggccctccaaacggcagaccaatggctgtctcaacggctacaccccttcacgcaagaggcaggcatcggagtccagcagcaggccgcattgacccgtctccatcggaccccagcccctatctccaagagacagaggaggggtcaggaggcactgctcatctgtacatactgtttcctatgacattactgtatttaagaaaacaccatggagatgaaatgcctttgattttttttttctttttgtactttggaacgacaaaatgaaacagaacttgaccctgagcttaaataacaaaactgtgccaactactactggtgatgcctaattatgaatccaacgtgtaaccagttataaatacatatatatataaaaaagga

SEQ ID NO: 33920 - DNA, 1202 bp, Homo sapiens
  source 1..1202: mol_type = unassigned DNA
gcggcgcgaaccatggccggggacagcgagcagaccctgcagaaccaccagcagcccaacggcggcgagcccttccttataggcgtcagcgggggaacagctagcggcaagtcttccgtgtgtgctaagatcgtgcagctcctggggcagaatgaggtggactatcgccagaagcaggtggtcatcctgagccaggatagcttctaccgtgtccttacctcggagcagaaggccaaagccctgaagggccagttcaactttgaccacccggatgcctttgacaatgaactcattctcaaaacactcaaagaaatcactgaagggaaaacagtccagatccccgtgtatgactttgtctcccattcccgtattaagggacatcagcgagagaggcagggatcttgagcagattttatctcagtacattacgttcgtcaagcctgcctttgaggaattctgcttgccaacaaagaagtatgctgatgtgatcatccctagaggtgcagataatctggtggccatcaacctcatcgtgcagcacatccaggacatcctgaatggagggccctccaaacggcagaccaatggctgtctcaacggctacaccccttcacgcaagaggcaggcatcggagtccagcagcaggccgcattgacccgtctccatcggaccccagcccctatctccaagagacagaggaggggtcaggaggcactgctcatctgtacatactgtttcctatgacattactgtatttaagaaaacaccatggagatgaaatgcctttgattttttttttctttttgtactttggaacgacaaaatgaaacagaacttgaccctgagcttaaataacaaaactgtgccaactactactggtgatgcctaattatgaatccaacgtgtaaccagttataaatacatatatatataaaaaaggatctatttttgtgtaaatgtacaaatactgtaaagctgtttgccataagtattttgcaggagggtctgtacttgagtgttttaggactggagctggaatttcaccaaggggaaattgcctgttgtgtcccagggtggggaggctcgggcatctgtgagagacagggagggtggctaaggtccagttgcttttgagtgccccgtggaacttgatgggaatggggttggaaaaccttgattgcctcctctgtcacatgccactc

SEQ ID NO: 33921 - DNA, 3149 bp, Homo sapiens
  source 1..3149: mol_type = unassigned DNA
agtctcttcctggcctccccacagtgctggcctctgcctccatctcagtcacacatgtctagcctccaggcgctgtgctctggcctgcccctgcggcccctcccagagaaccggggacgccaggctggggtgccccatgcccctgtcaggacccccagcctcagccctgtggagaaacagctggcgctgaggaacgccctgcgctacttccccccggatgtccaggagctgctggccccagagtttgcccaggagctgcaactgtacggacacatctacatgtaccggttttgccccgacattgaaatgagggcctacccgattgagcagtacccctgccagacgaaagtggctgccgccatcatgcacatgattatgaacaacctggatcctgccgtggcccagtttccccaggagctggtgacctatggaggaaatgggcaggtgttcagcaactgggctcagttctggctgaccatgttctacttgtcgaagatgacagaggagcagactttggtcatgtacagtgggcacccacttggcctctttcccagcagccgcagtgccccacggctcgtcatcaccaatgggatggtcattcccaactactcctcccggacggagtatgagaagctctttgccttgggggttacaatgtacggccagatgacagcaggtagctactgctacatcggtccccagggaatcgttcatggcactgtgctcaccgtgttgaatgctgcacgtcggtacctgggcatcgaggacttggctgggaaggtctttgtcacctctgggctcggcggaatgagtggggctcaggccaaggccgcagtcatcgtggggtgcatcggtgtgatagcagaggtggataaagcagcccttgagaaacgccacaggcagggctggctgatggaagtgactgacagcttggaccgctgcatccagaggctcagggaagcaaggaaaaaaaaggaggtgctcagccttggttaccatggcaacgtggtggctctttgggagcgcctggtccacgaattggacacgacgggggagtgcttggtggacctggggtcagatcagacatcctgccacaacccgttcaatggcggctactaccctgtgcagctcagcttcacggaggcccagagcctcatggcctccaaccctgctgtgttcaaggacctggtccaggaaagcctgaggaggcaagtctcagccatcaacaggttggccgaggagaagttcttcttctgggactacggcaatgccttcctcttggaggcccagagagcaggagcggatgtggagaagaaaggtgctggcaggacagagttccgctacccttcctatgtgcagcacatcatgggggacatattctcccagggatttgggcctttccgctgggtgtgcacatcgggggacccccaggacctggcggtcacagacgaactggccacatctgtgctggaggaagccattgctgatggagtgaaggtgtctgtgaagctgcagtacatggacaacatccgctggatccgggaggccgccaggcaccggctggtggtgggctcccaggcaaggatcctgtactcagaccagaagggccgcgtggccatcgctgtggccattaaccaggccatcgcctgcaggaggatcaaggcgccggtggtcctgagccgagatcaccatgacgtgagcggcaccgacagcccctttagggagacctccaacatttacgacggctctgccttctgtgcagacatggctgtgcagaacttcgtgggagatgcctgtcgcggagccacctgggtcgcccttcacaacggagggggcgtgggctggggtgaggtgatcaacgggggattcggcctcgtgctggacggtaccccggaggccgaggggagagccaggctgatgctcagctgggatgtctccaatggtgtggcccggcgctgctggtcagggaaccagaaggcctatgagatcatctgccagaccatgcaggagaacagcaccttggtggtgacactgcctcacaaggtggaggacgagcgggtgctccagcaggccctgcagctctgagggagccaggagtcgcggcccctgcctcccttcctccctggcgatcctcacctgcccagccatggcacacacccttcctgcacacccgcactacctgcacttctcgcacatcctcacgtggcccttatggtgccctgtgcagggtgccaccacagcctcattttacagacagccccctgaggcccagagacatgcagctctctgtccacaaccatgccacttgcatgggagccctgaaggctgtcaaagtccatttagggccaagtcccaagcctgcccgggggccctgcggtgaacactggtcaagctctctccggctgggatgatcacaccctctgcttcctggccacctgccagcctccatgcaactctgtctgtctgctgcccatctgctgtctgtgcaagcaacttctggaccctggcaccctgggctgctggcctggaggagttcgggaaggaggatagaccaggaaataaagggtcaacagagctgtgtgctgcactgtgggctggtgggacgggcaggccgggtctgccctaaggataaatgatcacttactggggaagaaatgagagagcaggggcacccccctaggccagcacagcctgaggggtacagcaaaggggaccctttgctggcccctgaggctggagtctggcaccccttccccaatcccatagcccggtaatgactgggtccagagcctcgtgagaggtcaccgggatgggggaagtggcctctgtcagggccagggctcatgaatctcattctcttagctgggcgtgcaacagaccaacagataactcatcctaaacagagaaatgagaaagagtctgtgggtgggcctctgagggccacagaaaaccagacaccccacatgtcggtggattggagaggggcaggccactgccctctccaggaccaagccgggttcttggtccccaccctccctgcactccgcatctcctccccagcagccattctcccctttcccttgtgaacaaaagcctagttttgtgtgggcagcaatatagggtaaataaaaccacctgattctccagcc

SEQ ID NO: 33922 - DNA, 2735 bp, Homo sapiens
  source 1..2735: mol_type = unassigned DNA
acagtgctggcctctgcctccatctcagtcacacatgtctagcctccaggcgctgtgctctggcctgcccctgcggcccctcccagagaaccggggacgccaggctggggtgccccatgcccctgtcaggacccccagcctcagccctgtggagaaacagctggcgctgaggaacgccctgcgctacttccccccggatgtccaggagctgctggccccagagtttgcccaggagctgcaactgtacggacacatctacatgtaccggttttgccccgacattgaaatgagggcctacccgattgagcagtacccctgccagacgaaagtggctgccgccatcatgcacatgattatgaacaacctggatcctgccgtggcccagtttccccaggagctggtgacctatggaggaaatgggcaggtgttcagcaactgggctcagttctggctgaccatgttctacttgtcgaagatgacagaggagcagactttggtcatgtacagtgggcacccacttggcctctttcccagcagccgcagtgccccacggctcgtcatcaccaatgggatggtcattcccaactactcctcccggacggagtatgagaagctctttgccttgggggttacaatgtacggccagatgacagcaggtagctactgctacatcggtccccagggaatcgttcatggcactgtgctcaccgtgttgaatgctgcacgtcggtacctgggcatcgaggacttggctgggaaggtctttgtcacctctgggctcggcggaatgagtggggctcaggccaaggccgcagtcatcgtggggtgcatcggtgtgatagcagaggtggataaagcagcccttgagaaacgccacaggcagggctggctgatggaagtgactgacagcttggaccgctgcatccagaggctcagggtccttcagctgggattgcaacaagccctgggctgggccggcctccctgctgccctgggactgtgtgtcctttcctgctttgtcaaccttgcacccctgggggaggggaggtgcctggctccctcgggcttctccaggccactcctgggggcacctgttctgcttttgtgtccttccagggaagcaaggaaaaaaaaggaggtgctcagccttggttaccatggcaacgtggtggctctttgggagcgcctggtccacgaattggacacgacgggggagtgcttggtggacctggggtcagatcagacatcctgccacaacccgttcaatggcggctactaccctgtgcagctcagcttcacggaggcccagagcctcatggcctccaaccctgctgtgttcaaggacctggtccaggaaagcctgaggaggcaagtctcagccatcaacaggttggccgaggagaagttcttcttctgggactacggcaatgccttcctcttggaggcccagagagcaggagcggatgtggagaagaaaggtgctggcaggacagagttccgctacccttcctatgtgcagcacatcatgggggacatattctcccagggatttgggcctttccgctgggtgtgcacatcgggggacccccaggacctggcggtcacagacgaactggccacatctgtgctggaggaagccattgctgatggagtgaaggtgtctgtgaagctgcagtacatggacaacatccgctggatccgggaggccgccaggcaccggctggtggtgggctcccaggcaaggatcctgtactcagaccagaagggccgcgtggccatcgctgtggccattaaccaggccatcgcctgcaggaggatcaaggcgccggtggtcctgagccgagatcaccatgacgtgagcggcaccgacagcccctttagggagacctccaacatttacgacggctctgccttctgtgcagacatggctgtgcagaacttcgtgggagatgcctgtcgcggagccacctgggtcgcccttcacaacggagggggcgtgggctggggtgaggtgatcaacgggggattcggcctcgtgctggacggtaccccggaggccgaggggagagccaggctgatgctcagctgggatgtctccaatggtgtggcccggcgctgctggtcagggaaccagaaggcctatgagatcatctgccagaccatgcaggagaacagcaccttggtggtgacactgcctcacaaggtggaggacgagcgggtgctccagcaggccctgcagctctgagggagccaggagtcgcggcccctgcctcccttcctccctggcgatcctcacctgcccagccatggcacacacccttcctgcacacccgcactacctgcacttctcgcacatcctcacgtggcccttatggtgccctgtgcagggtgccaccacagcctcattttacagacagccccctgaggcccagagacatgcagctctctgtccacaaccatgccacttgcatgggagccctgaaggctgtcaaagtccatttagggccaagtcccaagcctgcccgggggccctgcggtgaacactggtcaagctctctccggctgggatgatcacaccctctgcttcctggccacctgccagcctccatgcaactctgtctgtctgctgcccatctgctgtctgtgcaagcaacttctggaccctggcaccctgggctgctggcctggaggagttcgggaaggaggatagaccaggaaataaagggtcaacagag

SEQ ID NO: 33923 - DNA, 795 bp, Homo sapiens
  source 1..795: mol_type = unassigned DNA
tgcgtccagtgctgcttccagcgctagccccaggggcacgaaggctggtgtagggaggtgcgcccctccgggggcccgccagccgtcagactcgaagctgtggctgtcattgcttctacaatcagtgcatgttcttcgctgacgtcagtcggagctgtcctggcactatataaggctggcgacagccccgggacagaccctgtgttccccaaggcgtcttcagcctgccccgagggacagagactggagctcaatcttggaccgtacagacgctcgccgacaacctggccggcggcaccatgaggcaggcgggacgcgcagcgctgctggccgcgctgctgctcctggtacagctgtgccctgggagcagccagaggagccccgaggcggccggggtccaggacccgagtctgcgctggagccccggggcacggaaccagggtggcggggcccgcgcgctcctcttgctgctggcggagcgcttcccgcgccgcgcggggcccggccgattgggactcgggacggcaggcgagcggccgcggcgggacaacccttctctgtccattgacctcacctttcacctgctgcggaccctgctggagctggcgcggacgcagagccagcgggagcgcgccgagcagaaccgcatcatattcgactcggtgggcaagtgatggcccggtttggggctgcgaaaacgttgacccctttcccccaccccagagttgggatgcggggcagagccaccagggcactgtctgcgtgactattttttaataaaagtactgaagaccc

SEQ ID NO: 33924 - DNA, 1481 bp, Homo sapiens
  source 1..1481: mol_type = unassigned DNA
ggacagtagtgcctggccccagccccaggcagccacagcaggctgccttaccccagaagcagctggtggcgcctgacctcacgatgaccaggtgtgctctgctgttgctgatggtcctgatgttgggcagagtcctggttgtcccagtgacccctatcccaaccttccagctccgccctcagaattctccccagaccactccccgacctgcggcctcagagagcccctcagctgctcccacatggccgtgggctgcccagagccactgcagccccacccgccaccctggctcgcgcattgtcctatcgctggatgtccccatcggcctcttgcagatcttactggagcaagcccgggccagggctgccagggagcaggccaccaccaacgcccgcatcctggcccgtgtcggccactgctgagcctgagagagggggtcacagtgatagggccaccctggatgggaagacctggagggcagccacacagctggacggatgctgccacatctgggcatacagtgtctggacgctgccacatctgggcatacagtgtctggacactgccacatggagccactgtcatgcaggtcatatcagatctgagtgccccacagagtcacagtgtgtctggacagcctggacattggacattgctaagttgggtcactgccacatggagtcttgccatgcctgtgtgccccacagacctaatatatgtccggacagcttggatgctgccacgtaaggtcactgctgtggcgagtcttgctatgtctgggtgccccatagtcacagaacacctggacaccgccacatgcagtcatcatcatgttactttcaggagcctcaacacgagagctcaacactgcctccgaccagtccctctgaggcccacaggtctgtcatcccataggccaccacacagagaaatgctggctgagggtcacttgcttgctctgtgccccatgaggcagcacctgccccagatggacggggctgtgaggggtgtctccaggcacaaaggcccgaacacaggaagcctgtgaccatggcagccttgtcttatgggcgcatatgtgcgtgtgtggctgagtctctgacagctgtgagtgtgtgtgagcagggtaagggtacgtgaggggtctgagaggagtgggtgcttgtcccccaaacctgcatgaagcaagaacaactcctggccaggccctgtcctccccacgtacccctgcatccccagcctcgacccagggacatgcagggctcacaggagacagggctcaggctgccggagctccaaccaaactctgtcccacttcacgcacggactgtcctgggcaaaggtgttcacctttccgagcctcggtttccttatctgtaaagcaaagcgacaccagcaagcctgtgagcattgtgtatatagcagacatggaggtcctgcagcaggaggtgctcaataaacacaaagcgactgaaggatgg

SEQ ID NO: 33925 - DNA, 2251 bp, Homo sapiens
  source 1..2251: mol_type = unassigned DNA
agactaactctacctttctggcttcaggtgctatctagacctgaagtagcgggaagagcagaaaggatggggcagccatctctgacttggatgctgatggtggtggtggcctcttggttcatcacaactgcagccactgacacctcagaagcaagatggtgctctgaatgtcacagcaatgccacctgcacggaggatgaggccgttacgacgtgcacctgtcaggagggcttcaccggcgatggcctgacctgcgtggacctggatgagtgcgccattcctggagctcacaactgctccgccaacagcagctgcgtaaacacgccaggctccttctcctgcgtctgccccgaaggcttccgcctgtcgcccggtctcggctgcacagacgtggatgagtgcgctgagcctgggcttagccactgccacgccctggccacatgtgtcaatgtggtgggcagctacttgtgcgtatgccccgcgggctaccggggggatggatggcactgtgagtgctccccgggctcctgcgggccggggttggactgcgtgcccgagggcgacgcgctcgtgtgcgcggatccgtgccaggcgcaccgcaccctggacgagtactggcgcagcaccgagtacggggagggctacgcctgcgacacggacctgcgcggctggtaccgcttcgtgggccagggcggtgcgcgcatggccgagacctgcgtgccagtcctgcgctgcaacacggccgcccccatgtggctcaatggcacgcatccgtccagcgacgagggcatcgtgagccgcaaggcctgcgcgcactggagcggccactgctgcctgtgggatgcgtccgtccaggtgaaggcctgtgccggcggctactacgtctacaacctgacagcgccccccgagtgtcacctggcgtactgcacagaccccagctccgtggaggggacgtgtgaggagtgcagtatagacgaggactgcaaatcgaataatggcagatggcactgccagtgcaaacaggacttcaacatcactgatatctccctcctggagcacaggctggaatgtggggccaatgacatgaaggtgtcgctgggcaagtgccagctgaagagtctgggcttcgacaaggtcttcatgtacctgagtgacagccggtgctcgggcttcaatgacagagacaaccgggactgggtgtctgtagtgaccccagcccgggatggcccctgtgggacagtgttgacgaggaatgaaacccatgccacttacagcaacaccctctacctggcagatgagatcatcatccgtgacctcaacatcaaaatcaactttgcatgctcctaccccctggacatgaaagtcagcctgaagaccgccctacagccaatggtcagtgctctaaacatcagagtgggcgggaccggcatgttcaccgtgcggatggcgctcttccagaccccttcctacacgcagccctaccaaggctcctccgtgacactgtccactgaggcttttctctacgtgggcaccatgttggatgggggcgacctgtcccgatttgcactgctcatgaccaactgctatgccacacccagtagcaatgccacggaccccctgaagtacttcatcatccaggacagatgcccacacactagagactcaactatccaagtggtggagaatggggagtcctcccagggccgattttccgtccagatgttccggtttgctggaaactatgacctagtctacctgcactgtgaagtctatctctgtgacaccatgaatgaaaagtgcaagcctacctgctctgggaccagattccgaagtgggagtgtcatagatcaatcccgtgtcctgaacttgggtcccatcacacggaaaggtgtccaggccacagtctcaagggcttttagcagcttggggctcctgaaagtctggctgcctctgcttctctcggccaccttgaccctgacttttcagtgactgacagcggaaagccctgtgctccatggctgccatctcacctcctgctgggcagggggcatgatgcgggccagtgctccagccacagaaaagaaagttcatgctttgttcagcctgccttcttttctcccttttaatcctggctgtcgagaaacagcctgtgtctttaaatgctgctttttctcaaaatgggacttgtgacggtgtacctgaggcccccatctccttaaagagtgtggcaaaataatgatttttaaatctc

SEQ ID NO: 33926 - DNA, 2409 bp, Homo sapiens
  source 1..2409: mol_type = unassigned DNA
aactctacctttctggcttcaggacaccagacatcagagacagagagaaaaattcaaagggccaacccgtctttcctttgggcaggtgctatctagacctgaagtagcgggaagagcagaaaggatggggcagccatctctgacttggatgctgatggtggtggtggcctcttggttcatcacaactgcagccactgacacctcagaagcaagaacaaagtacaactgcccagccaggtggagttggaggactccgcagagaggaggcgacactgagcagggtcctgatgaagatttcaccagccagggaagatggtgctctgaatgtcacagcaatgccacctgcacggaggatgaggccgttacgacgtgcacctgtcaggagggcttcaccggcgatggcctgacctgcgtggacctggatgagtgcgccattcctggagctcacaactgctccgccaacagcagctgcgtaaacacgccaggctccttctcctgcgtctgccccgaaggcttccgcctgtcgcccggtctcggctgcacagacgtggatgagtgcgctgagcctgggcttagccactgccacgccctggccacatgtgtcaatgtggtgggcagctacttgtgcgtatgccccgcgggctaccggggggatggatggcactgtgagtgctccccgggctcctgcgggccggggttggactgcgtgcccgagggcgacgcgctcgtgtgcgcggatccgtgccaggcgcaccgcaccctggacgagtactggcgcagcaccgagtacggggagggctacgcctgcgacacggacctgcgcggctggtaccgcttcgtgggccagggcggtgcgcgcatggccgagacctgcgtgccagtcctgcgctgcaacacggccgcccccatgtggctcaatggcacgcatccgtccagcgacgagggcatcgtgagccgcaaggcctgcgcgcactggagcggccactgctgcctgtgggatgcgtccgtccaggtgaaggcctgtgccggcggctactacgtctacaacctgacagcgccccccgagtgtcacctggcgtactgcacagaccccagctccgtggaggggacgtgtgaggagtgcagtatagacgaggactgcaaatcgaataatggcagatggcactgccagtgcaaacaggacttcaacatcactgatatctccctcctggagcacaggctggaatgtggggccaatgacatgaaggtgtcgctgggcaagtgccagctgaagagtctgggcttcgacaaggtcttcatgtacctgagtgacagccggtgctcgggcttcaatgacagagacaaccgggactgggtgtctgtagtgaccccagcccgggatggcccctgtgggacagtgttgacgaggaatgaaacccatgccacttacagcaacaccctctacctggcagatgagatcatcatccgtgacctcaacatcaaaatcaactttgcatgctcctaccccctggacatgaaagtcagcctgaagaccgccctacagccaatggtcagtgctctaaacatcagagtgggcgggaccggcatgttcaccgtgcggatggcgctcttccagaccccttcctacacgcagccctaccaaggctcctccgtgacactgtccactgaggcttttctctacgtgggcaccatgttggatgggggcgacctgtcccgatttgcactgctcatgaccaactgctatgccacacccagtagcaatgccacggaccccctgaagtacttcatcatccaggacagatgcccacacactagagactcaactatccaagtggtggagaatggggagtcctcccagggccgattttccgtccagatgttccggtttgctggaaactatgacctagtctacctgcactgtgaagtctatctctgtgacaccatgaatgaaaagtgcaagcctacctgctctgggaccagattccgaagtgggagtgtcatagatcaatcccgtgtcctgaacttgggtcccatcacacggaaaggtgtccaggccacagtctcaagggcttttagcagcttggggctcctgaaagtctggctgcctctgcttctctcggccaccttgaccctgacttttcagtgactgacagcggaaagccctgtgctccatggctgccatctcacctcctgctgggcagggggcatgatgcgggccagtgctccagccacagaaaagaaagttcatgctttgttcagcctgccttcttttctcccttttaatcctggctgtcgagaaacagcctgtgtctttaaatgctgctttttctcaaaatgggacttgtgacggtgtacctgaggcccccatctccttaaagagtgtggcaaaataatgatttttaaatctca

SEQ ID NO: 33927 - DNA, 2315 bp, Homo sapiens
  source 1..2315: mol_type = unassigned DNA
agactaactctacctttctggcttcaggacaccagacatcagagacagagagaaaaattcaaagggccaacccgtctttcctttgggcaggtgctatctagacctgaagtagcgggaagagcagaaaggatggggcagccatctctgacttggatgctgatggtggtggtggcctcttggttcatcacaactgcagccactgacacctcagaagcaagatggtgctctgaatgtcacagcaatgccacctgcacggaggatgaggccgttacgacgtgcacctgtcaggagggcttcaccggcgatggcctgacctgcgtggacctggatgagtgcgccattcctggagctcacaactgctccgccaacagcagctgcgtaaacacgccaggctccttctcctgcgtctgccccgaaggcttccgcctgtcgcccggtctcggctgcacagacgtggatgagtgcgctgagcctgggcttagccactgccacgccctggccacatgtgtcaatgtggtgggcagctacttgtgcgtatgccccgcgggctaccggggggatggatggcactgtgagtgctccccgggctcctgcgggccggggttggactgcgtgcccgagggcgacgcgctcgtgtgcgcggatccgtgccaggcgcaccgcaccctggacgagtactggcgcagcaccgagtacggggagggctacgcctgcgacacggacctgcgcggctggtaccgcttcgtgggccagggcggtgcgcgcatggccgagacctgcgtgccagtcctgcgctgcaacacggccgcccccatgtggctcaatggcacgcatccgtccagcgacgagggcatcgtgagccgcaaggcctgcgcgcactggagcggccactgctgcctgtgggatgcgtccgtccaggtgaaggcctgtgccggcggctactacgtctacaacctgacagcgccccccgagtgtcacctggcgtactgcacagaccccagctccgtggaggggacgtgtgaggagtgcagtatagacgaggactgcaaatcgaataatggcagatggcactgccagtgcaaacaggacttcaacatcactgatatctccctcctggagcacaggctggaatgtggggccaatgacatgaaggtgtcgctgggcaagtgccagctgaagagtctgggcttcgacaaggtcttcatgtacctgagtgacagccggtgctcgggcttcaatgacagagacaaccgggactgggtgtctgtagtgaccccagcccgggatggcccctgtgggacagtgttgacgaggaatgaaacccatgccacttacagcaacaccctctacctggcagatgagatcatcatccgtgacctcaacatcaaaatcaactttgcatgctcctaccccctggacatgaaagtcagcctgaagaccgccctacagccaatggtcagtgctctaaacatcagagtgggcgggaccggcatgttcaccgtgcggatggcgctcttccagaccccttcctacacgcagccctaccaaggctcctccgtgacactgtccactgaggcttttctctacgtgggcaccatgttggatgggggcgacctgtcccgatttgcactgctcatgaccaactgctatgccacacccagtagcaatgccacggaccccctgaagtacttcatcatccaggacagatgcccacacactagagactcaactatccaagtggtggagaatggggagtcctcccagggccgattttccgtccagatgttccggtttgctggaaactatgacctagtctacctgcactgtgaagtctatctctgtgacaccatgaatgaaaagtgcaagcctacctgctctgggaccagattccgaagtgggagtgtcatagatcaatcccgtgtcctgaacttgggtcccatcacacggaaaggtgtccaggccacagtctcaagggcttttagcagcttggggctcctgaaagtctggctgcctctgcttctctcggccaccttgaccctgacttttcagtgactgacagcggaaagccctgtgctccatggctgccatctcacctcctgctgggcagggggcatgatgcgggccagtgctccagccacagaaaagaaagttcatgctttgttcagcctgccttcttttctcccttttaatcctggctgtcgagaaacagcctgtgtctttaaatgctgctttttctcaaaatgggacttgtgacggtgtacctgaggcccccatctccttaaagagtgtggcaaaataatgatttttaaatctca

SEQ ID NO: 33928 - DNA, 2290 bp, Homo sapiens
  source 1..2290: mol_type = unassigned DNA
caggacaccagacatcagagacagagagaaaaattcaaagggccaacccgtctttcctttgggcaggtgctatctagacctgaagtagcgggaagagcagaaaggatggggcagccatctctgacttggatgctgatggtggtggtggcctcttggttcatcacaactgcagccactgacacctcagaagcaagatggtgctctgaatgtcacagcaatgccacctgcacggaggatgaggccgttacgacgtgcacctgtcaggagggcttcaccggcgatggcctgacctgcgtggacctggatgagtgcgccattcctggagctcacaactgctccgccaacagcagctgcgtaaacacgccaggctccttctcctgcgtctgccccgaaggcttccgcctgtcgcccggtctcggctgcacagacgtggatgagtgcgctgagcctgggcttagccactgccacgccctggccacatgtgtcaatgtggtgggcagctacttgtgcgtatgccccgcgggctaccggggggatggatggcactgtgagtgctccccgggctcctgcgggccggggttggactgcgtgcccgagggcgacgcgctcgtgtgcgcggatccgtgccaggcgcaccgcaccctggacgagtactggcgcagcaccgagtacggggagggctacgcctgcgacacggacctgcgcggctggtaccgcttcgtgggccagggcggtgcgcgcatggccgagacctgcgtgccagtcctgcgctgcaacacggccgcccccatgtggctcaatggcacgcatccgtccagcgacgagggcatcgtgagccgcaaggcctgcgcgcactggagcggccactgctgcctgtgggatgcgtccgtccaggtgaaggcctgtgccggcggctactacgtctacaacctgacagcgccccccgagtgtcacctggcgtactgcacagaccccagctccgtggaggggacgtgtgaggagtgcagtatagacgaggactgcaaatcgaataatggcagatggcactgccagtgcaaacaggacttcaacatcactgatatctccctcctggagcacaggctggaatgtggggccaatgacatgaaggtgtcgctgggcaagtgccagctgaagagtctgggcttcgacaaggtcttcatgtacctgagtgacagccggtgctcgggcttcaatgacagagacaaccgggactgggtgtctgtagtgaccccagcccgggatggcccctgtgggacagtgttgacgaggaatgaaacccatgccacttacagcaacaccctctacctggcagatgagatcatcatccgtgacctcaacatcaaaatcaactttgcatgctcctaccccctggacatgaaagtcagcctgaagaccgccctacagccaatggtcagtgctctaaacatcagagtgggcgggaccggcatgttcaccgtgcggatggcgctcttccagaccccttcctacacgcagccctaccaaggctcctccgtgacactgtccactgaggcttttctctacgtgggcaccatgttggatgggggcgacctgtcccgatttgcactgctcatgaccaactgctatgccacacccagtagcaatgccacggaccccctgaagtacttcatcatccaggacagatgcccacacactagagactcaactatccaagtggtggagaatggggagtcctcccagggccgattttccgtccagatgttccggtttgctggaaactatgacctagtctacctgcactgtgaagtctatctctgtgacaccatgaatgaaaagtgcaagcctacctgctctgggaccagattccgaagtgggagtgtcatagatcaatcccgtgtcctgaacttgggtcccatcacacggaaaggtgtccaggccacagtctcaagggcttttagcagcttggggctcctgaaagtctggctgcctctgcttctctcggccaccttgaccctgacttttcagtgactgacagcggaaagccctgtgctccatggctgccatctcacctcctgctgggcagggggcatgatgcgggccagtgctccagccacagaaaagaaagttcatgctttgttcagcctgccttcttttctcccttttaatcctggctgtcgagaaacagcctgtgtctttaaatgctgctttttctcaaaatgggacttgtgacggtgtacctgaggcccccatctccttaaagagtgtggcaaaataatgatttttaaatctc

SEQ ID NO: 33929 - DNA, 2350 bp, Homo sapiens
  source 1..2350: mol_type = unassigned DNA
agactaactctacctttctggcttcaggtgctatctagacctgaagtagcgggaagagcagaaaggatggggcagccatctctgacttggatgctgatggtggtggtggcctcttggttcatcacaactgcagccactgacacctcagaagcaagaacaaagtacaactgcccagccaggtggagttggaggactccgcagagaggaggcgacactgagcagggtcctgatgaagatttcaccagccagggaagatggtgctctgaatgtcacagcaatgccacctgcacggaggatgaggccgttacgacgtgcacctgtcaggagggcttcaccggcgatggcctgacctgcgtggacctggatgagtgcgccattcctggagctcacaactgctccgccaacagcagctgcgtaaacacgccaggctccttctcctgcgtctgccccgaaggcttccgcctgtcgcccggtctcggctgcacagacgtggatgagtgcgctgagcctgggcttagccactgccacgccctggccacatgtgtcaatgtggtgggcagctacttgtgcgtatgccccgcgggctaccggggggatggatggcactgtgagtgctccccgggctcctgcgggccggggttggactgcgtgcccgagggcgacgcgctcgtgtgcgcggatccgtgccaggcgcaccgcaccctggacgagtactggcgcagcaccgagtacggggagggctacgcctgcgacacggacctgcgcggctggtaccgcttcgtgggccagggcggtgcgcgcatggccgagacctgcgtgccagtcctgcgctgcaacacggccgcccccatgtggctcaatggcacgcatccgtccagcgacgagggcatcgtgagccgcaaggcctgcgcgcactggagcggccactgctgcctgtgggatgcgtccgtccaggtgaaggcctgtgccggcggctactacgtctacaacctgacagcgccccccgagtgtcacctggcgtactgcacagaccccagctccgtggaggggacgtgtgaggagtgcagtatagacgaggactgcaaatcgaataatggcagatggcactgccagtgcaaacaggacttcaacatcactgatatctccctcctggagcacaggctggaatgtggggccaatgacatgaaggtgtcgctgggcaagtgccagctgaagagtctgggcttcgacaaggtcttcatgtacctgagtgacagccggtgctcgggcttcaatgacagagacaaccgggactgggtgtctgtagtgaccccagcccgggatggcccctgtgggacagtgttgacgaggaatgaaacccatgccacttacagcaacaccctctacctggcagatgagatcatcatccgtgacctcaacatcaaaatcaactttgcatgctcctaccccctggacatgaaagtcagcctgaagaccgccctacagccaatggtcagtgctctaaacatcagagtgggcgggaccggcatgttcaccgtgcggatggcgctcttccagaccccttcctacacgcagccctaccaaggctcctccgtgacactgtccactgaggcttttctctacgtgggcaccatgttggatgggggcgacctgtcccgatttgcactgctcatgaccaactgctatgccacacccagtagcaatgccacggaccccctgaagtacttcatcatccaggacagatgcccacacactagagactcaactatccaagtggtggagaatggggagtcctcccagggccgattttccgtccagatgttccggtttgctggaaactatgacctagtctacctgcactgtgaagtctatctctgtgacaccatgaatgaaaagtgcaagcctacctgctctgggaccagattccgaagtgggagtgtcatagatcaatcccgtgtcctgaacttgggtcccatcacacggaaaggtgtccaggccacagtctcaagggcttttagcagcttggggctcctgaaagtctggctgcctctgcttctctcggccaccttgaccctgacttttcagtgactgacagcggaaagccctgtgctccatggctgccatctcacctcctgctgggcagggggcatgatgcgggccagtgctccagccacagaaaagaaagttcatgctttgttcagcctgccttcttttctcccttttaatcctggctgtcgagaaacagcctgtgtctttaaatgctgctttttctcaaaatgggacttgtgacggtgtacctgaggcccccatctccttaaagagtgtggcaaaataatgatttttaaatctc

SEQ ID NO: 33930 - DNA, 2180 bp, Homo sapiens
  source 1..2180: mol_type = unassigned DNA
aactctacctttctggcttcaggtgctatctagacctgaagtagcgggaagagcagaaaggatggggcagccatctctgacttggatgctgatggtggtggtggcctcttggttcatcacaactgcagccactgacacctcagaagcaagatggtgctctgaatgtcacagcaatgccacctgcacggaggatgaggccgttacgacgtgcacctgtcaggagggcttcaccggcgatggcctgacctgcgtggacctggatgagtgcgccattcctggagctcacaactgctccgccaacagcagctgcgtaaacacgccaggctccttctcctgcgtctgccccgaaggcttccgcctgtcgcccggtctcggctgcacagacgtggatgagtgcgctgagcctgggcttagccactgccacgccctggccacatgtgtcaatgtggtgggctcctgcgggccggggttggactgcgtgcccgagggcgacgcgctcgtgtgcgcggatccgtgccaggcgcaccgcaccctggacgagtactggcgcagcaccgagtacggggagggctacgcctgcgacacggacctgcgcggctggtaccgcttcgtgggccagggcggtgcgcgcatggccgagacctgcgtgccagtcctgcgctgcaacacggccgcccccatgtggctcaatggcacgcatccgtccagcgacgagggcatcgtgagccgcaaggcctgcgcgcactggagcggccactgctgcctgtgggatgcgtccgtccaggtgaaggcctgtgccggcggctactacgtctacaacctgacagcgccccccgagtgtcacctggcgtactgcacagaccccagctccgtggaggggacgtgtgaggagtgcagtatagacgaggactgcaaatcgaataatggcagatggcactgccagtgcaaacaggacttcaacatcactgatatctccctcctggagcacaggctggaatgtggggccaatgacatgaaggtgtcgctgggcaagtgccagctgaagagtctgggcttcgacaaggtcttcatgtacctgagtgacagccggtgctcgggcttcaatgacagagacaaccgggactgggtgtctgtagtgaccccagcccgggatggcccctgtgggacagtgttgacgaggaatgaaacccatgccacttacagcaacaccctctacctggcagatgagatcatcatccgtgacctcaacatcaaaatcaactttgcatgctcctaccccctggacatgaaagtcagcctgaagaccgccctacagccaatggtcagtgctctaaacatcagagtgggcgggaccggcatgttcaccgtgcggatggcgctcttccagaccccttcctacacgcagccctaccaaggctcctccgtgacactgtccactgaggcttttctctacgtgggcaccatgttggatgggggcgacctgtcccgatttgcactgctcatgaccaactgctatgccacacccagtagcaatgccacggaccccctgaagtacttcatcatccaggacagatgcccacacactagagactcaactatccaagtggtggagaatggggagtcctcccagggccgattttccgtccagatgttccggtttgctggaaactatgacctagtctacctgcactgtgaagtctatctctgtgacaccatgaatgaaaagtgcaagcctacctgctctgggaccagattccgaagtgggagtgtcatagatcaatcccgtgtcctgaacttgggtcccatcacacggaaaggtgtccaggccacagtctcaagggcttttagcagcttggggctcctgaaagtctggctgcctctgcttctctcggccaccttgaccctgacttttcagtgactgacagcggaaagccctgtgctccatggctgccatctcacctcctgctgggcagggggcatgatgcgggccagtgctccagccacagaaaagaaagttcatgctttgttcagcctgccttcttttctcccttttaatcctggctgtcgagaaacagcctgtgtctttaaatgctgctttttctcaaaatgggacttgtgacggtgtacctgaggcccccatctccttaaagagtgtggcaaaataatgatttttaaatctc

SEQ ID NO: 33931 - DNA, 1221 bp, Homo sapiens
  source 1..1221: mol_type = unassigned DNA
atgctcaggacctcggggctggcactgctggctctggtcagtgctgtgggcccaagccaggccagcggcttcacagaaaaaggcctctccctgttgggctaccagctatgcagccaccgtgtgacccacactgtacagaaggtggaggccgtgcagacgtcctacacgtcctatgtgtcctgcggcggctggatcccctggaggcggtgccctaagatggtttaccggacacagtacctggtagtggaggtccccgagtccaggaacgtgactgactgctgtgagggctatgaacagctcggcctctactgtgtcttgcccctgaatcagtccgggcagttcacgtcaagacctggggcctgccccgcagaggggcctgaaccatccacctccccctgcagcttggacatcgactgtcctggacttgagaagtgctgcccctggtcaggggggcgctactgcatggcccctgcaccccaagctccagagagggaccctgtgggctcctggtacaacgtcaccatactggtgaaaatggacttcaaggaactccagcaagtggaccccaggctcctgaaccacatgcgccttctgcattccttggtcaccagcgccctgcaaccaatggcctccaccgtccaccacctgcactcagcccctgggaacgcctccaccacagtgtcgcggctgctactgggcctgccacggccactgcctgtggctgacgtctccaccctgctgggtgacattgcgaagcgtgtctatgaagtgatcagcgtccaggtgcaagatgtcaatgagtgtttctatgaggagctcaatgcctgctctggaagggaactgtgcgcaaacctggagggctcgtactggtgcgtctgtcaccaggaagctccagccacgtctccacggaagctgaacctggagtgggaagattgtcctccagtcagtgactacgtggtcctcaacgtcaccagtgacagttttcaagtatcctggcgtttaaattctacacagaaccacactttccatgtccgggtttaccggggtatggagttgctcaggagcgccaggacacagagccaggcactggcagtggctgggctggaggctggagtgctgtacagggtgaagaccagctaccaggggtgcggggccgacgtctccaccacgctgaccatcaaaaccaagtacgttcttgagaagttggactttcagagctaa

SEQ ID NO: 33932 - DNA, 1017 bp, Homo sapiens
  source 1..1017: mol_type = unassigned DNA
atgctcaggacctcggggctggcactgctggctctggtcagtgctgtgggcccaagccaggccagcggcttcacagaaaaaggcctctccctgttgggctaccagctatgcagccaccgtgtgacccacactgtacagaaggtggaggccgtgcagacgtcctacacgtcctatgtgtcctgcggcggctggatcccctggaggcggtgccctaagatggtttaccggacacagtacctggtagtggaggtccccgagtccaggaacgtgactgactgctgtgagggctatgaacagctcggcctctactgtgtcttgcccctgaatcagtccgggcagttcacgtcaagacctggggcctgccccgcagaggggcctgaaccatccacctccccctgcagcttggacatcgactgtcctggacttgagaagtgctgcccctggtcaggggggcgctactgcatggcccctgcaccccaagctccagagagggaccctgtgggctcctggtacaacgtcaccatactggtgaaaatggacttcaaggaactccagcaagtggaccccaggctcctgaaccacatgcgccttctgcattccttggtcaccagcgccctgcaaccaatggcctccaccgtccaccacctgcactcagcccctgggaacgcctccaccacagtgtcgcggctgctactgggcctgccacggccactgcctgtggctgacgtctccaccctgctgggtgacattgcgaagcgtgtctatgaagtgatcagcgtccaggtgcaagatgtcaatgagtgtttctatgaggagctcaatgcctgctctggaagggaactgtgcgcaaacctggagggctcgtactggtgcgtctgtcaccaggaagctccagccacgtctccacggaagctgaacctggagtgggaagcacgtggccttgagatccacttagaacttcgcgccacgtccacatcccacggcaccccactaagctctgcagagaactgtctatag

SEQ ID NO: 33933 - DNA, 5058 bp, Homo sapiens
  source 1..5058: mol_type = unassigned DNA
cgctggtttcctctggaggctgcgagggagaaaccgtcccctgcctctcccaggctctggggtgagcccttcctggcatcccgggctcattgtagatggatcactccaatctccatggcttctcagggcttccctccatgcacctcaaatctctctctccttccttttgtaaggatgccagtcattggatttaggttcaccttaaatccaggatgatctcatctaaattacatctgcaaaaagaccctttttccaaaaaaaggcctctccctgttgggctaccagctatgcagccaccgtgtgacccacactgtacagaaggtggaggccgtgcagacgtcctacacgtcctatgtgtcctgcggcggctggatcccctggaggcggtgccctaagatggtttaccggacacagtacctggtagtggaggtccccgagtccaggaacgtgactgactgctgtgagggctatgaacagctcggcctctactgtgtcttgcccctgaatcagtccgggcagttcacgtcaagacctggggcctgccccgcagaggggcctgaaccatccacctccccctgcagcttggacatcgactgtcctggacttgagaagtgctgcccctggtcaggggggcgctactgcatggcccctgcaccccaagctccagagagggaccctgtgggctcctggtacaacgtcaccatactggtgaaaatggacttcaaggaactccagcaagtggaccccaggctcctgaaccacatgcgccttctgcattccttggtcaccagcgccctgcaaccaatggcctccaccgtccaccacctgcactcagcccctgggaacgcctccaccacagtgtcgcggctgctactgggcctgccacggccactgcctgtggctgacgtctccaccctgctgggtgacattgcgaagcgtgtctatgaagtgatcagcgtccaggtgcaagatgtcaatgagtgtttctatgaggagctcaatgcctgctctggaagggaactgtgcgcaaacctggagggctcgtactggtgcgtctgtcaccaggaagctccagccacgtctccacggaagctgaacctggagtgggaagattgtcctccagtcagtgactacgtggtcctcaacgtcaccagtgacagttttcaagtatcctggcgtttaaattctacacagaaccacactttccatgtccgggtttaccggggtatggagttgctcaggagcgccaggacacagagccaggcactggcagtggctgggctggaggctggagtgctgtacagggtgaagaccagctaccaggggtgcggggccgacgtctccaccacgctgaccatcaaaaccaatgcccaggtatttgaagtcacaataaagattgtaaaccacaacctgacggagaagttactcaaccgcagcagtgtggagtaccaggacttttctagacaactgcttcacgaggtcgagagctccttcccaccagtggtgtctgacttgtaccgaagtgggaagctgagaatgcagatcgtgtctctccaggcgggaagtgtggtcgtgaggctcaagctcaccgtgcaggaccccgggtttcccatgggcatctccacgctggcccccatactccagcccctgttggcaagcacagtgttccagattgaccggcaggggacacgcgtgcaagactgggacgagtgtgtggacagcgcggaacacgactgctcaccggctgcctggtgcatcaacctggagggctcctacacctgccagtgccgtaccaccagggacgccaccccctcccgcgcaggccgggcctgtgagggtgacctggtgagccccatgggcggtggactgtctgcggcaacaggggtaacggtcccaggtcttggcacgggaacagcagccctcggcctagagaacttcaccttgtcacccagtcctgggtaccctcagggcaccccggcagcaggccaggcctggaccccagagccctcacccagaagagggggcagcaatgtggtcgggtatgacaggaacaacacaggaaaaggcgtggagcaggagctacagggaaactccatcatggagccaccctcctggccttcccctactgaggaccccaccggccacttcctgtggcatgccacccgttccacccgggaaacacttctgaatcccacgtggctgcgaaatgaggacagtggaccctccggttctgtagacctgccattgacctccaccctcacagctctgaagacccccgcctgtgttcctgtctccattgggaggatcatggtctccaatgtgaccagcaccggcttccacctggcatgggaggcggatcttgctatggactccaccttccagctcactctgacttccatgtggagccctgctgtggtcctagagacctggaacacgagtgtgacactgtcggggctggagcctggggtcttgcacctggttgagatcatggccaaagcatgtgggaaagaaggtgccagagctcatctgaaagtgaggacagcagcccggaagctcattggaaaggtcagaatcaaaaatgtcaggtactcagaatcctttcgcaacgcaagcagccaggagtatcgagatttcctagaactattcttcaggatggtgcggggctccctgccagccaccatgtgtcagcacatggacgctggtggggtcaggatggaagtcgtcagcgtcaccaacggcagcatcgtggtggagtttcacttgctgataatcgcagatgtggatgtccaggaggtgtcagctgcatttctcaccgccttccagaccgtgcctctgctggaggtgatcagaggcgacaccttcatacaggattacgatgagtgtgaaaggaaggaggacgactgtgtgccggggacatcctgtcgaaacaccctcgggtctttcacttgtagctgcgagggaggagcccccgacttccctgtggaatattctgagagaccctgtgaaggtgactctcctggcaatgaaacctgggccaccagcccagagaggcctctcaccacagcagggaccaaggctgcctttgtgcaaggcaccagccccaccccccaaggcctgccccagcggctgaacctgaccggagcagtcagggtgctctgtgagatcgagaaggtggttgtcgccatccagaagcgcttcctgcagcaggaatccatccccgagtcctcgttgtacctcagccacccctcctgcaacgtgagccacagcaatggcacacacgtgctcctggaggccggctggagcgagtgtgggaccctcatgcagagcaacatgacgaacaccgtggtgaggaccacgctgaggaacgacctgtcccaggagggcatcatccaccacctgaagatcctgagccccatctactgcgccttccagaatgacctgctgacatcctccggcttcaccctggagtggggggtttacaccatcatcgaggacctccacggcgctgggaattttgttaccgaaatgcagttgtttatcggagactctcccatacctcagaattatagcgtgtctgccagtgacgatgtcaggatcgaagtggggctctacaggcagaaaagcaacctcaaggtggtcctgacggagtgctgggcaaccccgtctagcaacgcccgggaccccatcaccttcagcttcattaacaacagctgccctgtgcccaacacatacaccaacgtgattgagaacggcaactccaataaggcccagttcaagctgaggatcttttcctttatcaacgactccatcgtctacctgcactgcaaactccgcgtctgcatggaatcccccggagccacgtgcaaaatcaattgcaataactttcggttgctgcaaaatagtgaaacctctgccacacaccagatgtcctggggacccctcatccggtctgaaggtgagcctcctcatgcagaagcaggcctgggtgccggttatgtggtccttattgtggtggccatcttcgtgctggtggcgggaacagccacccttctgatcgtgcgctaccagagaatgaatgggagatacaactttaaaatccagtccaacaacttcagctaccaggtgttctacgaataggaggcgcaggctgacaggaaggtcgccgtgagtcaagctgcctccagaacctcagagcttccctggtgggctcccccgggatccccagtgtctctctgcacctccacccatccctcggttcttaactcttcaagccttaacggaggtctgctctgacgggtgggctctgccagagcccgggtgagcccagaaaggaagacagcagccaccgtctgtcccgaagaggcaggccgtcctgtaggtcctagaggagccacagcccaggggcagatgaaggggctgcggaagacgggggcagtcctgggggtgctgcggctacaccaccacccgcgcggcccccgcagcctagacctcccaggcctgtgaccctccacaccagccctcagaaccctcctgggcttgccctcccttggcgtccgtcaccctttggcaaatatagaatatttcacattctcagagagacccgaccgcgctcttgatgctctttcgaaaataggtcagtcttagaaatacactgctaatgttatttttagtggatgtttatgctgtttgacttttctcctgtgtaccaaggtattgcttttatttacacgacagcgactcaaaaggcactcgattaatgtgacaaccttttcaataagcagaaataacgtaggtacacatcactctttacatttttctaagcattttcacagccgtttcttcatataatccgaccacagtgggaggtgtgatttacccattacacaatgagaaaccagaggagccgatgagttacttaattgaggtcacagaatgaattagcaagaaaatggttctaaaatctaagtattttagtctagaattttctccattacatcatcctaagagataatgctctgtacttcatttgaaataaactggaattgtattagatagctc

SEQ ID NO: 33934 - DNA, 5442 bp, Homo sapiens
  source 1..5442: mol_type = unassigned DNA
cgctggtttcctctggaggctgcgagggagaaaccgtcccctgcctctcccaggctctggggtgagcccttcctggcatcccgggctcattgtagatggatcactccaatctccatggcttctcagggcttccctccatgcacctcaaatctctctctccttccttttgtaaggatgccagtcattggatttaggttcaccttaaatccaggatgatctcatctaaattacatctgcaaaaagaccctttttccaaaaaaaggcctctccctgttgggctaccagctatgcagccaccgtgtgacccacactgtacagaaggtggaggccgtgcagacgtcctacacgtcctatgtgtcctgcggcggctggatcccctggaggcggtgccctaagatggtttaccggacacagtacctggtagtggaggtccccgagtccaggaacgtgactgactgctgtgagggctatgaacagctcggcctctactgtgtcttgcccctgaatcagtccgggcagttcacgtcaagacctggggcctgccccgcagaggggcctgaaccatccacctccccctgcagcttggacatcgactgtcctggacttgagaagtgctgcccctggtcaggggggcgctactgcatggcccctgcaccccaagctccagagagggaccctgtgggctcctggtacaacgtcaccatactggtgaaaatggacttcaaggaactccagcaagtggaccccaggctcctgaaccacatgcgccttctgcattccttggtcaccagcgccctgcaaccaatggcctccaccgtccaccacctgcactcagcccctgggaacgcctccaccacagtgtcgcggctgctactgggcctgccacggccactgcctgtggctgacgtctccaccctgctgggtgacattgcgaagcgtgtctatgaagtgatcagcgtccaggtgcaagatgtcaatgagtgtttctatgaggagctcaatgcctgctctggaagggaactgtgcgcaaacctggagggctcgtactggtgcgtctgtcaccaggaagctccagccacgtctccacggaagctgaacctggagtgggaagattgtcctccagtcagtgactacgtggtcctcaacgtcaccagtgacagttttcaagtatcctggcgtttaaattctacacagaaccacactttccatgtccgggtttaccggggtatggagttgctcaggagcgccaggacacagagccaggcactggcagtggctgggctggaggctggagtgctgtacagggtgaagaccagctaccaggggtgcggggccgacgtctccaccacgctgaccatcaaaaccaatgcccaggtatttgaagtcacaataaagattgtaaaccacaacctgacggagaagttactcaaccgcagcagtgtggagtaccaggacttttctagacaactgcttcacgaggtcgagagctccttcccaccagtggtgtctgacttgtaccgaagtgggaagctgagaatgcagatcgtgtctctccaggcgggaagtgtggtcgtgaggctcaagctcaccgtgcaggaccccgggtttcccatgggcatctccacgctggcccccatactccagcccctgttggcaagcacagtgttccagattgaccggcaggggacacgcgtgcaagactgggacgagtgtgtggacagcgcggaacacgactgctcaccggctgcctggtgcatcaacctggagggctcctacacctgccagtgccgtaccaccagggacgccaccccctcccgcgcaggccgggcctgtgagggtgacctggtgagccccatgggcggtggactgtctgcggcaacaggggtaacggtcccaggtcttggcacgggaacagcagccctcggcctagagaacttcaccttgtcacccagtcctgggtaccctcagggcaccccggcagcaggccaggcctggaccccagagccctcacccagaagagggggcagcaatgtggtcgggtatgacaggaacaacacaggaaaaggcgtggagcaggaggtgcccagcactgccccgggtctggggatggaccaggggagccccagccaggtgaaccccagccaggggagccccagccaggggagcctcagacaggagagtaccagccaggcgagccccagccagaggagcaccagccaggggagccccagccaggtgaaccccagccagcggagcaccagccacgcgaactccagccaggggagccccagccaggggagccccagccaggagagccccagccaggggagcaccagccaggcgagccccagccataggaacactatcggggtgataggcaccacctcctccccgaaggctactgggtcaacccacagcttccctcctggggccacagatggcccactggccctccctggacagctacagggaaactccatcatggagccaccctcctggccttcccctactgaggaccccaccggccacttcctgtggcatgccacccgttccacccgggaaacacttctgaatcccacgtggctgcgaaatgaggacagtggaccctccggttctgtagacctgccattgacctccaccctcacagctctgaagacccccgcctgtgttcctgtctccattgggaggatcatggtctccaatgtgaccagcaccggcttccacctggcatgggaggcggatcttgctatggactccaccttccagctcactctgacttccatgtggagccctgctgtggtcctagagacctggaacacgagtgtgacactgtcggggctggagcctggggtcttgcacctggttgagatcatggccaaagcatgtgggaaagaaggtgccagagctcatctgaaagtgaggacagcagcccggaagctcattggaaaggtcagaatcaaaaatgtcaggtactcagaatcctttcgcaacgcaagcagccaggagtatcgagatttcctagaactattcttcaggatggtgcggggctccctgccagccaccatgtgtcagcacatggacgctggtggggtcaggatggaagtcgtcagcgtcaccaacggcagcatcgtggtggagtttcacttgctgataatcgcagatgtggatgtccaggaggtgtcagctgcatttctcaccgccttccagaccgtgcctctgctggaggtgatcagaggcgacaccttcatacaggattacgatgagtgtgaaaggaaggaggacgactgtgtgccggggacatcctgtcgaaacaccctcgggtctttcacttgtagctgcgagggaggagcccccgacttccctgtggaatattctgagagaccctgtgaaggtgactctcctggcaatgaaacctgggccaccagcccagagaggcctctcaccacagcagggaccaaggctgcctttgtgcaaggcaccagccccaccccccaaggcctgccccagcggctgaacctgaccggagcagtcagggtgctctgtgagatcgagaaggtggttgtcgccatccagaagcgcttcctgcagcaggaatccatccccgagtcctcgttgtacctcagccacccctcctgcaacgtgagccacagcaatggcacacacgtgctcctggaggccggctggagcgagtgtgggaccctcatgcagagcaacatgacgaacaccgtggtgaggaccacgctgaggaacgacctgtcccaggagggcatcatccaccacctgaagatcctgagccccatctactgcgccttccagaatgacctgctgacatcctccggcttcaccctggagtggggggtttacaccatcatcgaggacctccacggcgctgggaattttgttaccgaaatgcagttgtttatcggagactctcccatacctcagaattatagcgtgtctgccagtgacgatgtcaggatcgaagtggggctctacaggcagaaaagcaacctcaaggtggtcctgacggagtgctgggcaaccccgtctagcaacgcccgggaccccatcaccttcagcttcattaacaacagctgccctgtgcccaacacatacaccaacgtgattgagaacggcaactccaataaggcccagttcaagctgaggatcttttcctttatcaacgactccatcgtctacctgcactgcaaactccgcgtctgcatggaatcccccggagccacgtgcaaaatcaattgcaataactttcggttgctgcaaaatagtgaaacctctgccacacaccagatgtcctggggacccctcatccggtctgaaggtgagcctcctcatgcagaagcaggcctgggtgccggttatgtggtccttattgtggtggccatcttcgtgctggtggcgggaacagccacccttctgatcgtgcgctaccagagaatgaatgggagatacaactttaaaatccagtccaacaacttcagctaccaggtgttctacgaataggaggcgcaggctgacaggaaggtcgccgtgagtcaagctgcctccagaacctcagagcttccctggtgggctcccccgggatccccagtgtctctctgcacctccacccatccctcggttcttaactcttcaagccttaacggaggtctgctctgacgggtgggctctgccagagcccgggtgagcccagaaaggaagacagcagccaccgtctgtcccgaagaggcaggccgtcctgtaggtcctagaggagccacagcccaggggcagatgaaggggctgcggaagacgggggcagtcctgggggtgctgcggctacaccaccacccgcgcggcccccgcagcctagacctcccaggcctgtgaccctccacaccagccctcagaaccctcctgggcttgccctcccttggcgtccgtcaccctttggcaaatatagaatatttcacattctcagagagacccgaccgcgctcttgatgctctttcgaaaataggtcagtcttagaaatacactgctaatgttatttttagtggatgtttatgctgtttgacttttctcctgtgtaccaaggtattgcttttatttacacgacagcgactcaaaaggcactcgattaatgtgacaaccttttcaataagcagaaataacgtaggtacacatcactctttacatttttctaagcattttcacagccgtttcttcatataatccgaccacagtgggaggtgtgatttacccattacacaatgagaaaccagaggagccgatgagttacttaattgaggtcacagaatgaattagcaagaaaatggttctaaaatctaagtattttagtctagaattttctccattacatcatcctaagagataatgctctgtacttcatttgaaataaactggaattgtattagatagctc

SEQ ID NO: 33935 - DNA, 4878 bp, Homo sapiens
  source 1..4878: mol_type = unassigned DNA
atgctcaggacctcggggctggcactgctggctctggtcagtgctgtgggcccaagccaggccagcggcttcacagaaaaaggcctctccctgttgggctaccagctatgcagccaccgtgtgacccacactgtacagaaggtggaggccgtgcagacgtcctacacgtcctatgtgtcctgcggcggctggatcccctggaggcggtgccctaagatggtttaccggacacagtacctggtagtggaggtccccgagtccaggaacgtgactgactgctgtgagggctatgaacagctcggcctctactgtgtcttgcccctgaatcagtccgggcagttcacgtcaagacctggggcctgccccgcagaggggcctgaaccatccacctccccctgcagcttggacatcgactgtcctggacttgagaagtgctgcccctggtcaggggggcgctactgcatggcccctgcaccccaagctccagagagggaccctgtgggctcctggtacaacgtcaccatactggtgaaaatggacttcaaggaactccagcaagtggaccccaggctcctgaaccacatgcgccttctgcattccttggtcaccagcgccctgcaaccaatggcctccaccgtccaccacctgcactcagcccctgggaacgcctccaccacagtgtcgcggctgctactgggcctgccacggccactgcctgtggctgacgtctccaccctgctgggtgacattgcgaagcgtgtctatgaagtgatcagcgtccaggtgcaagatgtcaatgagtgtttctatgaggagctcaatgcctgctctggaagggaactgtgcgcaaacctggagggctcgtactggtgcgtctgtcaccaggaagctccagccacgtctccacggaagctgaacctggagtgggaagattgtcctccagtcagtgactacgtggtcctcaacgtcaccagtgacagttttcaagtatcctggcgtttaaattctacacagaaccacactttccatgtccgggtttaccggggtatggagttgctcaggagcgccaggacacagagccaggcactggcagtggctgggctggaggctggagtgctgtacagggtgaagaccagctaccaggggtgcggggccgacgtctccaccacgctgaccatcaaaaccaatgcccaggtatttgaagtcacaataaagattgtaaaccacaacctgacggagaagttactcaaccgcagcagtgtggagtaccaggacttttctagacaactgcttcacgaggtcgagagctccttcccaccagtggtgtctgacttgtaccgaagtgggaagctgagaatgcagatcgtgtctctccaggcgggaagtgtggtcgtgaggctcaagctcaccgtgcaggaccccgggtttcccatgggcatctccacgctggcccccatactccagcccctgttggcaagcacagtgttccagattgaccggcaggggacacgcgtgcaagactgggacgagtgtgtggacagcgcggaacacgactgctcaccggctgcctggtgcatcaacctggagggctcctacacctgccagtgccgtaccaccagggacgccaccccctcccgcgcaggccgggcctgtgagggtgacctggtgagccccatgggcggtggactgtctgcggcaacaggggtaacggtcccaggtcttggcacgggaacagcagccctcggcctagagaacttcaccttgtcacccagtcctgggtaccctcagggcaccccggcagcaggccaggcctggaccccagagccctcacccagaagagggggcagcaatgtggtcgggtatgacaggaacaacacaggaaaaggcgtggagcaggagctacagggaaactccatcatggagccaccctcctggccttcccctactgaggaccccaccggccacttcctgtggcatgccacccgttccacccgggaaacacttctgaatcccacgtggctgcgaaatgaggacagtggaccctccggttctgtagacctgccattgacctccaccctcacagctctgaagacccccgcctgtgttcctgtctccattgggaggatcatggtctccaatgtgaccagcaccggcttccacctggcatgggaggcggatcttgctatggactccaccttccagctcactctgacttccatgtggagccctgctgtggtcctagagacctggaacacgagtgtgacactgtcggggctggagcctggggtcttgcacctggttgagatcatggccaaagcatgtgggaaagaaggtgccagagctcatctgaaagtgaggacagcagcccggaagctcattggaaaggtcagaatcaaaaatgtcaggtactcagaatcctttcgcaacgcaagcagccaggagtatcgagatttcctagaactattcttcaggatggtgcggggctccctgccagccaccatgtgtcagcacatggacgctggtggggtcaggatggaagtcgtcagcgtcaccaacggcagcatcgtggtggagtttcacttgctgataatcgcagatgtggatgtccaggaggtgtcagctgcatttctcaccgccttccagaccgtgcctctgctggaggtgatcagaggcgacaccttcatacaggattacgatgagtgtgaaaggaaggaggacgactgtgtgccggggacatcctgtcgaaacaccctcgggtctttcacttgtagctgcgagggaggagcccccgacttccctgtggaatattctgagagaccctgtgaaggtgactctcctggcaatgaaacctgggccaccagcccagagaggcctctcaccacagcagggaccaaggctgcctttgtgcaaggcaccagccccaccccccaaggcctgccccagcggctgaacctgaccggagcagtcagggtgctctgtgagatcgagaaggtggttgtcgccatccagaagcgcttcctgcagcaggaatccatccccgagtcctcgttgtacctcagccacccctcctgcaacgtgagccacagcaatggcacacacgtgctcctggaggccggctggagcgagtgtgggaccctcatgcagagcaacatgacgaacaccgtggtgaggaccacgctgaggaacgacctgtcccaggagggcatcatccaccacctgaagatcctgagccccatctactgcgccttccagaatgacctgctgacatcctccggcttcaccctggagtggggggtttacaccatcatcgaggacctccacggcgctgggaattttgttaccgaaatgcagttgtttatcggagactctcccatacctcagaattatagcgtgtctgccagtgacgatgtcaggatcgaagtggggctctacaggcagaaaagcaacctcaaggtggtcctgacggagtgctgggcaaccccgtctagcaacgcccgggaccccatcaccttcagcttcattaacaacagctgccctgtgcccaacacatacaccaacgtgattgagaacggcaactccaataaggcccagttcaagctgaggatcttttcctttatcaacgactccatcgtctacctgcactgcaaactccgcgtctgcatggaatcccccggagccacgtgcaaaatcaattgcaataactttcggttgctgcaaaatagtgaaacctctgccacacaccagatgtcctggggacccctcatccggtctgaaggtgagcctcctcatgcagaagcaggcctgggtgccggttatgtggtccttattgtggtggccatcttcgtgctggtggcgggaacagccacccttctgatcgtgcgctaccagagaatgaatgggagatacaactttaaaatccagtccaacaacttcagctaccaggtgttctacgaataggaggcgcaggctgacaggaaggtcgccgtgagtcaagctgcctccagaacctcagagcttccctggtgggctcccccgggatccccagtgtctctctgcacctccacccatccctcggttcttaactcttcaagccttaacggaggtctgctctgacgggtgggctctgccagagcccgggtgagcccagaaaggaagacagcagccaccgtctgtcccgaagaggcaggccgtcctgtaggtcctagaggagccacagcccaggggcagatgaaggggctgcggaagacgggggcagtcctgggggtgctgcggctacaccaccacccgcgcggcccccgcagcctagacctcccaggcctgtgaccctccacaccagccctcagaaccctcctgggcttgccctcccttggcgtccgtcaccctttggcaaatatagaatatttcacattctcagagagacccgaccgcgctcttgatgctctttcgaaaataggtcagtcttagaaatacactgctaatgttatttttagtggatgtttatgctgtttgacttttctcctgtgtaccaaggtattgcttttatttacacgacagcgactcaaaaggcactcgattaatgtgacaaccttttcaataagcagaaataacgtaggtacacatcactctttacatttttctaagcattttcacagccgtttcttcatataatccgaccacagtgggaggtgtgatttacccattacacaatgagaaaccagaggagccgatgagttacttaattgaggtcacagaatgaattagcaagaaaatggttctaaaatctaagtattttagtctagaattttctccattacatcatcctaagagataatgctctgtacttcatttgaaataaactggaattgtattagatagctc

SEQ ID NO: 33936 - DNA, 5262 bp, Homo sapiens
  source 1..5262: mol_type = unassigned DNA
atgctcaggacctcggggctggcactgctggctctggtcagtgctgtgggcccaagccaggccagcggcttcacagaaaaaggcctctccctgttgggctaccagctatgcagccaccgtgtgacccacactgtacagaaggtggaggccgtgcagacgtcctacacgtcctatgtgtcctgcggcggctggatcccctggaggcggtgccctaagatggtttaccggacacagtacctggtagtggaggtccccgagtccaggaacgtgactgactgctgtgagggctatgaacagctcggcctctactgtgtcttgcccctgaatcagtccgggcagttcacgtcaagacctggggcctgccccgcagaggggcctgaaccatccacctccccctgcagcttggacatcgactgtcctggacttgagaagtgctgcccctggtcaggggggcgctactgcatggcccctgcaccccaagctccagagagggaccctgtgggctcctggtacaacgtcaccatactggtgaaaatggacttcaaggaactccagcaagtggaccccaggctcctgaaccacatgcgccttctgcattccttggtcaccagcgccctgcaaccaatggcctccaccgtccaccacctgcactcagcccctgggaacgcctccaccacagtgtcgcggctgctactgggcctgccacggccactgcctgtggctgacgtctccaccctgctgggtgacattgcgaagcgtgtctatgaagtgatcagcgtccaggtgcaagatgtcaatgagtgtttctatgaggagctcaatgcctgctctggaagggaactgtgcgcaaacctggagggctcgtactggtgcgtctgtcaccaggaagctccagccacgtctccacggaagctgaacctggagtgggaagattgtcctccagtcagtgactacgtggtcctcaacgtcaccagtgacagttttcaagtatcctggcgtttaaattctacacagaaccacactttccatgtccgggtttaccggggtatggagttgctcaggagcgccaggacacagagccaggcactggcagtggctgggctggaggctggagtgctgtacagggtgaagaccagctaccaggggtgcggggccgacgtctccaccacgctgaccatcaaaaccaatgcccaggtatttgaagtcacaataaagattgtaaaccacaacctgacggagaagttactcaaccgcagcagtgtggagtaccaggacttttctagacaactgcttcacgaggtcgagagctccttcccaccagtggtgtctgacttgtaccgaagtgggaagctgagaatgcagatcgtgtctctccaggcgggaagtgtggtcgtgaggctcaagctcaccgtgcaggaccccgggtttcccatgggcatctccacgctggcccccatactccagcccctgttggcaagcacagtgttccagattgaccggcaggggacacgcgtgcaagactgggacgagtgtgtggacagcgcggaacacgactgctcaccggctgcctggtgcatcaacctggagggctcctacacctgccagtgccgtaccaccagggacgccaccccctcccgcgcaggccgggcctgtgagggtgacctggtgagccccatgggcggtggactgtctgcggcaacaggggtaacggtcccaggtcttggcacgggaacagcagccctcggcctagagaacttcaccttgtcacccagtcctgggtaccctcagggcaccccggcagcaggccaggcctggaccccagagccctcacccagaagagggggcagcaatgtggtcgggtatgacaggaacaacacaggaaaaggcgtggagcaggaggtgcccagcactgccccgggtctggggatggaccaggggagccccagccaggtgaaccccagccaggggagccccagccaggggagcctcagacaggagagtaccagccaggcgagccccagccagaggagcaccagccaggggagccccagccaggtgaaccccagccagcggagcaccagccacgcgaactccagccaggggagccccagccaggggagccccagccaggagagccccagccaggggagcaccagccaggcgagccccagccataggaacactatcggggtgataggcaccacctcctccccgaaggctactgggtcaacccacagcttccctcctggggccacagatggcccactggccctccctggacagctacagggaaactccatcatggagccaccctcctggccttcccctactgaggaccccaccggccacttcctgtggcatgccacccgttccacccgggaaacacttctgaatcccacgtggctgcgaaatgaggacagtggaccctccggttctgtagacctgccattgacctccaccctcacagctctgaagacccccgcctgtgttcctgtctccattgggaggatcatggtctccaatgtgaccagcaccggcttccacctggcatgggaggcggatcttgctatggactccaccttccagctcactctgacttccatgtggagccctgctgtggtcctagagacctggaacacgagtgtgacactgtcggggctggagcctggggtcttgcacctggttgagatcatggccaaagcatgtgggaaagaaggtgccagagctcatctgaaagtgaggacagcagcccggaagctcattggaaaggtcagaatcaaaaatgtcaggtactcagaatcctttcgcaacgcaagcagccaggagtatcgagatttcctagaactattcttcaggatggtgcggggctccctgccagccaccatgtgtcagcacatggacgctggtggggtcaggatggaagtcgtcagcgtcaccaacggcagcatcgtggtggagtttcacttgctgataatcgcagatgtggatgtccaggaggtgtcagctgcatttctcaccgccttccagaccgtgcctctgctggaggtgatcagaggcgacaccttcatacaggattacgatgagtgtgaaaggaaggaggacgactgtgtgccggggacatcctgtcgaaacaccctcgggtctttcacttgtagctgcgagggaggagcccccgacttccctgtggaatattctgagagaccctgtgaaggtgactctcctggcaatgaaacctgggccaccagcccagagaggcctctcaccacagcagggaccaaggctgcctttgtgcaaggcaccagccccaccccccaaggcctgccccagcggctgaacctgaccggagcagtcagggtgctctgtgagatcgagaaggtggttgtcgccatccagaagcgcttcctgcagcaggaatccatccccgagtcctcgttgtacctcagccacccctcctgcaacgtgagccacagcaatggcacacacgtgctcctggaggccggctggagcgagtgtgggaccctcatgcagagcaacatgacgaacaccgtggtgaggaccacgctgaggaacgacctgtcccaggagggcatcatccaccacctgaagatcctgagccccatctactgcgccttccagaatgacctgctgacatcctccggcttcaccctggagtggggggtttacaccatcatcgaggacctccacggcgctgggaattttgttaccgaaatgcagttgtttatcggagactctcccatacctcagaattatagcgtgtctgccagtgacgatgtcaggatcgaagtggggctctacaggcagaaaagcaacctcaaggtggtcctgacggagtgctgggcaaccccgtctagcaacgcccgggaccccatcaccttcagcttcattaacaacagctgccctgtgcccaacacatacaccaacgtgattgagaacggcaactccaataaggcccagttcaagctgaggatcttttcctttatcaacgactccatcgtctacctgcactgcaaactccgcgtctgcatggaatcccccggagccacgtgcaaaatcaattgcaataactttcggttgctgcaaaatagtgaaacctctgccacacaccagatgtcctggggacccctcatccggtctgaaggtgagcctcctcatgcagaagcaggcctgggtgccggttatgtggtccttattgtggtggccatcttcgtgctggtggcgggaacagccacccttctgatcgtgcgctaccagagaatgaatgggagatacaactttaaaatccagtccaacaacttcagctaccaggtgttctacgaataggaggcgcaggctgacaggaaggtcgccgtgagtcaagctgcctccagaacctcagagcttccctggtgggctcccccgggatccccagtgtctctctgcacctccacccatccctcggttcttaactcttcaagccttaacggaggtctgctctgacgggtgggctctgccagagcccgggtgagcccagaaaggaagacagcagccaccgtctgtcccgaagaggcaggccgtcctgtaggtcctagaggagccacagcccaggggcagatgaaggggctgcggaagacgggggcagtcctgggggtgctgcggctacaccaccacccgcgcggcccccgcagcctagacctcccaggcctgtgaccctccacaccagccctcagaaccctcctgggcttgccctcccttggcgtccgtcaccctttggcaaatatagaatatttcacattctcagagagacccgaccgcgctcttgatgctctttcgaaaataggtcagtcttagaaatacactgctaatgttatttttagtggatgtttatgctgtttgacttttctcctgtgtaccaaggtattgcttttatttacacgacagcgactcaaaaggcactcgattaatgtgacaaccttttcaataagcagaaataacgtaggtacacatcactctttacatttttctaagcattttcacagccgtttcttcatataatccgaccacagtgggaggtgtgatttacccattacacaatgagaaaccagaggagccgatgagttacttaattgaggtcacagaatgaattagcaagaaaatggttctaaaatctaagtattttagtctagaattttctccattacatcatcctaagagataatgctctgtacttcatttgaaataaactggaattgtattagatagctc

SEQ ID NO: 33937 - DNA, 963 bp, Homo sapiens
  source 1..963: mol_type = unassigned DNA
accctgtgggctcctggtacaacgtcaccatactggtgaaaatggacttcaaggaactccagcaagtggaccccaggctcctgaaccacatgcgccttctgcattccttgatgtcaatgagtgtttctatgaggagctcaatgcctgctctggaagggaactgtgcgcaaacctggagggctcgtactggtgcgtctgtcaccaggaagctccagccacgtctccacggaagctgaacctggagtgggaagcacgtggccttgagatccacttagaacttcgcgccacgtccacatcccacggcaccccactaagctctgcagagaactgtctatagattcctgctctgtggcttccagggtgagaatcctgtccctttcgtgagcacagaaggttggaaaacagattgtcctccagtcagtgactacgtggtcctcaacgtcaccagtgacagttttcaagtatcctggcgtttaaattctacacagaaccacactttccatgtccgggtttaccggggtatggagttgctcaggagcgccaggacacagagccaggcactggcagtggctgggctggaggctggagtgctgtacagggtgaagaccagctaccaggggtgcggggccgacgtctccaccacgctgaccatcaaaaccaatgcccaggtatttgaagtcacaataaagattgtaaaccacaacctgacggagaagttactcaaccgcagcagtgtggagtaccaggacttttctagacaactgcttcacgaggtcgagagctccttcccaccagtggtgtctgacttgtaccgaagtgggaagctgagaatgcagatcgtgtctctccaggcgggaagtgtggtcgtgaggctcaagctcaccgtgcaggaccccgggtttcccatgggcatctccacgctggcccccatactccagcccctgttggcaagcacagtgttcc

SEQ ID NO: 33938 - DNA, 998 bp, Homo sapiens
  source 1..998: mol_type = unassigned DNA
ctttcacttgtagctgcgagggaggagcccccgacttccctgtggaatattctgagagaccctgtgaaggtgactctcctggcaatgaaacctgggccaccagcccagagaggcctctcaccacagcagggaccaaggctgcctttgtgcaaggcaccagccccaccccccaaggcctgccccagcggctgaacctgaccggagcagtcagggtgctctgtgagatcgagaaggtggttgtcgccatccagaagcgcttcctgcagcaggaatccatccccgagtcctcgttgtacctcagccacccctcctgcaacgtgagccacagcaatggcacacacgtgctcctggaggccggctggagcgagtgtgggaccctcatgcagagcaacatgacgaacaccgtggtgaggaccacgctgaggaacgacctgtcccaggagggcatcatccaccacctgaagatcctgagccccatctactgcgccttccagaatgacctgctgacatcctccggcttcaccctggagtggggggtttacaccatcatcgaggacctccacggcgctgggaattttgttaccgaaatgcagttgtttatcggagactctcccatacctcagaattatagcgtgtctgccagtgacgatgtcaggatcgaagtggggctctacaggcagaaaagcaacctcaaggtggtcctgacggagtgctgggcaaccccgtctagcaacgcccgggaccccatcaccttcagcttcattaacaacagctgccctgtgcccaacacatacaccaacgtgattgagaacggcaactccaataaggcccagttcaagctgaggatcttttcctttatcaacgactccatcgtctacctgcactgcaaactccgcgtctgcatggaatcccccggagccacgtgcaaaatcgcagcccttggacggaggactcatgtggactggtgggcatttcccatttctcaatggctgagctga

SEQ ID NO: 33939 - DNA, 4198 bp, Homo sapiens
  source 1..4198: mol_type = unassigned DNA
cggccctccccatgtgcagccggccagccgggctctcctcctcgcggcggatgggtgaccttttcctggcacgggcaggctgtgggaggcagcggagcaggcgatgaagaagaagcagcagcatcccggcggcggcgcggatccctggccccatggggcccctatggggggcgcccctccgggcctgggcagctggaagcgtcgggtgcccctgctgcctttcctgcgcttctccctccgggactacggcttctgcatggccaccctgctggtcttctgcctgggctccctcctctatcagctcagcgggggaccccctcgcttcctgctcgacctgcggcagtacttgggaaattccacttacttggatgaccatggaccacctcctagtaaggtactacctttcccaagccaggtggtgtacaacagggtaggcaagtgtgggagccgtactgtggtcttgcttctgagaatcttgtcggagaagcacggatttaatttggtcacatcagacattcacaacaaaaccaggcttactaaaaatgaacaaatggaactgattaaaaatataagtactgccgaacaaccctatttattcactcgacatgttcatttcctcaacttctcaaggtttggaggagaccagcctgtctacatcaacatcattagagaccccgtcaaccggttcttatccaactattttttccgtcgctttggagactggagaggggaacaaaatcacatgatccgcacccccagcatgaggcaggaggagcgctacctggatatcaatgagtgtattcttgaaaactatcccgagtgctccaaccccaggttattttacatcattccgtacttttgtggacagcatcccagatgcagggagcctggtgaatgggcccttgagagagcaaagctgaacgtgaatgaaaacttcctgctcgtggggattcttgaagagttggaagatgtgctgctgttactggaaagatttttacctcattacttcaagggcgtgctcagtatctacaaagacccagagcacaggaagcttggaaacatgactgtgacggtgaagaagactgtcccctctcctgaggctgtgcagatcctctaccagcggatgagatacgagtacgagttttaccactacgtcaaagagcagttccacctgctgaagcgcaagtttggacttaagtctcacgtcagcaagccccccctgaggccacacttctttatcccaactccactggaaaccgaggagccaatcgacgatgaagaacaggatgatgaaaagtggctggaagatatttataagaggtgatgtgactgtgttgcctctatggctttatctcccttttccagaaagttctttgtttggggaagtaaaatccttaagggactaaattaatgcttgggtgcattaaaaagaacaaaacattcccacatgttggggtcattgggagatgcccggttttgcgggttttatttgtttaattttattctgtgttttctcttggctctttgggtctttcccgggtacactagatggctccatcccaaggcatcttgtcataaaacagctttcccccaccccatatcatgggaaaagggggagaaatatagcccctagcctaataacttatcatttgtaaaatgacttataaaaatattacctcaatggtaggagacatccagacttgtatatttcagtggaaatacaaaaccacttcagagaccagggtatctcctctggaaggatctaagagaaggtaagacagattaggacatcgaaaaggaggatggagccaggtgccatggcttgagcctataatccgaggctgaggtgggaggatcacttgagcccaggagtttgaggttgcagtgagctgtgatcacaccactgcactccagcctgggtgacagagtgagactctgtctcaattaattttttttttttaaaggaggaggatctccatgggtaagtggtttctacccgcatgggtagagttctgcctctggtccttctcagggggcactttcaccaagagcagtgtaattatctctgaaagagcaagtcagcttgtgccgcatccccaaccaatccacagcctggagtacctttcaaggtcaaagtgcatggccagctccattgagacattccatttcaaagcaccgtgctgacagatatcaaagtactctagcagggaaaataatttgtttgctgtgtaaggaagaatgtagacaagacagataaatctgaaggtcatgtggcatcagggaaagggcatggctgtgtcttttgcacccaatatgaaacatcttctcccaacactgctttaatggaagttctaggaaccaatttagctcaggcatttgactcctacagcagaagttctgagcctgaccacagatggtgtgtaatctatcaaacacacccctggccaagttgggtcctataggacctggtactatgtactattgtaacttctagttccctaagaggtacctgttttcagtaaaaaggggtcctgagttctgtgcaggtggaagagctacccgagaactacctgagttctgtgcaggtagagtcccatttcttatgggacctgtgtgctcctgagaactcttacttgagacatcaaaaagaagcagcaagagcttctgggacagagactgcttggccagctttgtaagtaagtggctgcctccaatgtgatgtgagtacatgttgggcagtctcactgtcctaaggtatgtcttctttccacctcccactgcccctcccctgccacctatcaatgatgccttggttcagtcattagaaatctgttgctttgagttctgaaatattttcaccttaaaaaaaatgctgaaaatacacattctcctgggaagacgataaacagctagctaagaagccgaggttcagtggtggcagcaggaaggacactgccacaaattttgtctatttcatatttgtcccctagagccagccctagcaaatgtgtgagttgggagtagttaatagtaaataagactctgactttacacaagctacacattttatacttttcataaaccacaaagtctctctagaattttttctgccttcactaaaattggactgtagccaagatataaagcaagtcatttggaacctgccgagtgagcactgaagctactttatcatgagatgtgtgttaagaaggctgcagcccacaggagtccagggaaggcggggaccacagaggcacagagtccagcacttggccgctcatgggccttctttctgcctcagaggacgggggcagagaagtgatgaagggaaatgttcttagaggaggaaatatcctttgtcctgttcagagagaccagggccctaccattaggcatactttcagaagcaacctggagaacagctatcaatcatattcaaaaccagtacaagaactgctgcctggtaccctgtgagtcatttctatgaaattccatataaagaatgatgataagtttacacactgtgcaatctcacaatctgaaaataaagttgagttggctgtgttttctctgctcttgtcagaacattgggacaattggtcgttcaaaaacattcatcctcttactgcaagtttatctgggtacttttacctgtgtgttcaaaggcatttcttttcagcagtgatcattataacttcacaaaaaaagatgctgacggatttacttacagggccttaatgttattttgtcccagccaacaccctctaggtcctaaaagtcaaggtacttcagtttatttggcaaacatgacaacattttttttggccctgggcccaacagtttgtacttcatgaaacatattgtacattttacatagtttaatttaaaaaataccttttaagctagttgatctttgactgtcttatttattataacctttcagcacattccaaggttttagttactcaggaaggagttaattaaaatgattttattttggtctgatggatgttttttaaaaggaaaattattattatgaaccttcagcctactttcttgagtgccgtaaaagtgcttgtaaatctttttttttttttaagaagaaagaaaaaaatggtgtttgacgttgatggaaattcaaaaatatatatggaactgaaacattaacttagctaaaataaaagcaatctgtgtttga

SEQ ID NO: 33940 - DNA, 1223 bp, Homo sapiens
  source 1..1223: mol_type = unassigned DNA
atggcgtctgcggcagcagcggaggccgagaagggatctccagttgtggtgggcctgctagttgtgggcaatatcattattctgctgtcaggcctgtccctgtttgctgagaccatatgggtgacagccgaccagtaccgtgtatacccactgatgggagtctcaggcaaggatgacgtcttcgctggtgcctggattgccatcttctgcggcttctccttcttcatggtagccagttttggtgtgggtgccgcactctgccgccgccggtccatggtcctcacgtacctggtgctcatgctcatcgtctacatcttcgagtgcgcctcctgcatcacgtcctacacccaccgtgactacatggtgtccaacccatccctgatcaccaagcagatgctgaccttctacagcgcggacaccgaccagggccaggagctgacccgcctctgggaccgcgtcatgattgagcaagaatgctgtggcacatctggtcccatggactgggtgaacttcacgtcagccttccgggcggccactccggaggtggtgttcccctggcccccactgtgctgtcgccggacgggaaacttcatccccctcaacgaggagggctgccgcctggggcacatggactacctgttcaccaagggctgcttcgaacacatcggccacgccatcgacagctacacgtggggtatctcgtggtttgggtttgccatcctgatgtggacgctcccggtcatgctgatagccatgtatttctacaccatgctctgagggacaggaggggaaggcaacatacacaccccggactcctccgcatcctcctcctgcttcctccgctgggcctggatggctgcctcacctctcacctcccaacgtccctagcccttacgtccttccacttccaagatctttttccaggttcctgagccctactgtgtctcaggtgtgccctgaaaccccagggcttgtgtgcacatatccttagcccatctttcaagggacctctccatgatcccacctcccattcacagatacctctcttgtagctctctgacctcctccttcatggcaggcatcgccattcttgctgaaccgtttgtgattgccatttgagctctggaagcctctattgccatgagagttctgtcacggtcactttactgtccccatcatcacccagcacggggctaagcatatactagatagtcaataaataa

SEQ ID NO: 33941 - DNA, 1321 bp, Homo sapiens
  source 1..1321: mol_type = unassigned DNA
atggcgtctgcggcagcagcggaggccgagaagggatctccagttgtggtgggcctgctagttgtgggcaatatcattattctgctgtcaggcctgtccctgtttgctgagaccatatgggtgacagccgaccagtaccgtgtatacccactgatgggagtctcaggcaaggatgacgtcttcgctggtgcctggattgccatcttctgcggcttctccttcttcatggtagccagttttggtgtgggtgccgcactctgccgccgccggtccatggtcctcacgtacctggtgctcatgctcatcgtctacatcttcgagtgcgcctcctgcatcacgtcctacacccaccgtgactacatggtgtccaacccatccctgatcaccaagcagatgctgaccttctacagcgcggacaccgaccagggccaggagctgacccgcctctgggaccgcgtcatgattgagcaagaatgctgtggcacatctggtcccatggactgggtgaacttcacgtcagccttccgggcggccactccggaggtggtgttcccctggcccccactgtgctgtcgccggacgggaaacttcatccccctcaacgaggagggctgccgcctggggcacatggactacctgttcaccaaggctggagtacagtggcacaatctcagctcactgcagcgtctgcctcccgggttcaagggattctcccacctcagcttccagagcagctgggattacagggctgcttcgaacacatcggccacgccatcgacagctacacgtggggtatctcgtggtttgggtttgccatcctgatgtggacgctcccggtcatgctgatagccatgtatttctacaccatgctctgagggacaggaggggaaggcaacatacacaccccggactcctccgcatcctcctcctgcttcctccgctgggcctggatggctgcctcacctctcacctcccaacgtccctagcccttacgtccttccacttccaagatctttttccaggttcctgagccctactgtgtctcaggtgtgccctgaaaccccagggcttgtgtgcacatatccttagcccatctttcaagggacctctccatgatcccacctcccattcacagatacctctcttgtagctctctgacctcctccttcatggcaggcatcgccattcttgctgaaccgtttgtgattgccatttgagctctggaagcctctattgccatgagagttctgtcacggtcactttactgtccccatcatcacccagcacggggctaagcatatactagatagtcaataaataa

SEQ ID NO: 33942 - DNA, 2118 bp, Homo sapiens
  source 1..2118: mol_type = unassigned DNA
atcacagactacccttccctggtcctggaggttcaaagaattgcaggagggtagaaaagcacctgggtcgggtgcagactgcggagcgggccctaccgtgtgcgcagaaagaggaggcgcttgccttcagcttgtgggaaatcccgaagatggccaaagacaactcaactgttcgttgcttccagggcctgctgatttttggaaatgtgattattggttgttgcggcattgccctgactgcggagtgcatcttctttgtatctgaccaacacagcctctacccactgcttgaagccaccgacaacgatgacatctatggggctgcctggatcggcatatttgtgggcatctgcctcttctgcctgtctgttctaggcattgtaggcatcatgaagtccagcaggaaaattcttctggcgtatttcattctgatgtttatagtatatgcctttgaagtggcatcttgtatcacagcagcaacacaacaagactttttcacacccaacctcttcctgaagcagatgctagagaggtaccaaaacaacagccctccaaacaatgatgaccagtggaaaaacaatggagtcaccaaaacctgggacaggctcatgctccaggacaattgctgtggcgtaaatggtccatcagactggcaaaaatacacatctgccttccggactgagaataatgatgctgactatccctggcctcgtcaatgctgtgttatgaacaatcttaaagaacctctcaacctggaggcttgtaaactaggcgtgcctggtttttatcacaatcagggctgctatgaactgatctctggtccaatgaaccgacacgcctggggggttgcctggtttggatttgccattctctgctggactttttgggttctcctgggtaccatgttctactggagcagaattgaatattaagcataaagtgttgccaccatacctccttccccgagtgactctggatttggtgctggaaccagctctctcctaatattccacgtttgtgccccacactaacgtgtgtgtcttacattgccaagtcagatggtacggacttcctttaggatctcaggcttctgcagttctcatgactcctacttttcatcctagtctagcattctgcaacatttatatagactgttgaaaggagaatttgaaaaatgcataataactacttccatccctgcttatttttaatttgggaaaataaatacattcgaaggaacctgtgttatcacagtaacccagagctgtatttggctagcaatctgcctgtatctctcactattatctaaaagaaaccttccaatgcttctgttgatctcagtattgtcaggggaacagagaagttgggaaaagattactgaaatataccttttgcatttctttctagagtagctcccatatatggagatgggtgattctcttgatgccaccttcagatccttttattctccagaataattcttaacagtggttcaaatttcctttcataccttgaagtatgtgtttagtagcctcaattctccattaattaaaagtgtgggctgggcgtgggggctcatgcctgtaatcccagcactttgggaggccgaggtgggcagatcacctgaggtcaggagttcaagaccagcctggccaacatggtgaaaccccgtctctacaaaaatacaaaaattagccaggcgtgatggcaggtgcctgtaatcctagctacttggcaggctaacgcaggagaatcacttgaccgggagacagaggttgcagtgagctgagatcgtacctattgcactccatcctggatgaaagagccagactctgtctcaaaacaaacaaaaaagcgtggggacttctggggacagacaaggtgcctgttatatatttactcagtctttgccctgaatggtctcagcttgagaccatttcaaactggagagaagcaagccagccaatagaatggggtgatttacagggatttctgtttactgtcaaaatatttctcatctgcactatgtttccatttgtggtcctgaaggaaattcttataactcaacatttgtctggtcttataagtaaagacagctttaaaatctgttcactttca

SEQ ID NO: 33943 - DNA, 687 bp, Homo sapiens
  source 1..687: mol_type = unassigned DNA
ggagcgggccctaccgtgtgcgcagaaagaggaggcgctggacttatcctaccttaagttgaagcagaccagcaattgttgtgacctacaatctccacacccatctttactctgagccaaggaagtgtctgttcttgtgctgagtttcaggtgccttcagcttgtgggaaatcccgaagatggccaaagacaactcaactgttcgttgcttccagggcctgctgatttttggaaatgtgattattggttgttgcggcattgccctgactgcggagtgcatcttctttgtatctgaccaacacagcctctacccactgcttgaagccaccgacaacgatgacatctatggggctgcctggatcggcatatttgtgggcatctgcctcttctgcctgtctgttctaggcattgtaggcatcatgaagtccagcaggaaaattcttctggcgtatttcattctgatgtttatagtatatgcctttgaagtggcatcttgtatcacagcagcaacacaacaagactttttcacacccaacctcttcctgaagcagatgctagagaggtaccaaaacaacagccctccaaacaatgatgaccagtggaaaaacaatggagtcaccaaaacctgggacaggctcatgctccaggacaattgctgtggcgtaaatggtccatcagactggcaaa

SEQ ID NO: 33944 - DNA, 670 bp, Homo sapiens
  source 1..670: mol_type = unassigned DNA
ggagcgggccctaccgtgtgcgcagaaagaggaggcgctaaactgtagcagttatttggtaatgctttcaacagtgccttcagcttgtgggaaatcccgaagatggccaaagacaactcaactgttcgttgcttccagggcctgctgatttttggaaatgtgattattggttgttgcggcattgccctgactgcggagtgcatcttctttgtatctgaccaacacagcctctacccactgcttgaagccaccgacaacgatgacatctatggggctgcctggatcggcatatttgtgggcatctgcctcttctgcctgtctgttctaggcattgtaggcatcatgaagtccagcaggaaaattcttctggcgtatttcattctgatgtttatagtatatgcctttgaagtggcatcttgtatcacagcagcaacacaacaagactttttcacacccaacctcttcctgaagcagatgctagagaggtaccaaaacaacagccctccaaacaatgatgaccagtggaaaaacaatggagtcaccaaaacctgggacaggctcatgctccaggacaattgctgtggcgtaaatggtccatcagactggcaaaaatacacatctgccttccggactgagaataatgatgctgactatccctggcctcgtcaat

SEQ ID NO: 33945 - DNA, 916 bp, Homo sapiens
  source 1..916: mol_type = unassigned DNA
agcctgccagcacctattccacctcccagcccagcatggcacccctgctgcccatccggaccttgcccttgatcctgattctgctggctctgctgtccccaggggctgcagacttcaacatctcaagcctctctggtctgctgtccccggcgctaacggagagcctgctggttgccttgcccccctgtcacctcacaggaggcaatgccacactgatggtccggagagccaatgacagcaaagtggtgacgtccagctttgtggtgcctccgtgccgtgggcgcagggaactggtgagtgtggtggacagtggtgctggcttcacagtcactcggctcagtgcataccaggtgacaaacctcgtgccaggaaccaaattctacatttcctacctagtgaagaaggggacagccactgagtccagcagagagatcccaatgtccacactccctcgaaggaacatggaatccattgggctgggtatggcccgcacagggggcatggtggtcatcacggtgctgctctctgtcgccatgttcctgctggtgctgggcttcatcattgccctggcactgggctcccgcaagtaaggaggtctgcccggagcagcagcttctccaggaagcccagggcaccatccagctccccagcccacctgctcccaggccccaggcctgtggctcccttggtgccctcgcctcctcctcctgccctcctctcccctagagccctctcctccctctgtccctctccttgcccccagtgcctcaccttccaacactccattattcctctcaccccactcctgtcagagttgactttcctcccattttaccactttaaacacccccataacaattcccccatccttcagtgaactaagtccctataataaaggctgaggctgcatctgcca

SEQ ID NO: 33946 - DNA, 1051 bp, Homo sapiens
  source 1..1051: mol_type = unassigned DNA
ccgccccgcgctctggcggctcctcccgggcgatgcctccgctctgggccctgctggccctcggctgcctgcggttcggctcggctgtgaacctgcagccccaactggccagtgtgactttcgccaccaacaaccccacacttaccactgtggccttggaaaagcctctctgcatgtttgacagcaaagaggccctcactggcacccacgaggtctacctgtatgtcctggtcgactcagccatttccaggaatgcctcagtgcaagacagcaccaacaccccactgggctcaacgttcctacaaacagagggtgggaggacaggtccctacaaagctgtggcctttgacctgatcccctgcagtgacctgcccagcctggatgccattggggatgtgtccaaggcctcacagatcctgaatgcctacctggtcagggtgggtgccaacgggacctgcctgtgggatcccaacttccagggcctctgtaacgcacccctgtcggcagccacggagtacaggttcaagtatgtcctggtcaatatgtccacgggcttggtagaggaccagaccctgtggtcagaccccatccgcaccaaccagctcaccccatactcgacgatcgacacgtggccaggccggcggagcggaggcatgatcgtcatcacttccatcctgggctccctgcccttctttctacttgtgggttttgctggcgccattgccctcagcctcgtggacatggggagttctgatggggaaacgactcacgactcccaaatcactcaggaggctgttcccaagtcgctgggggcctcggagtcttcctacacgtccgtgaaccgggggccgccactggacagggctgaggtgtattccagcaagctccaagactgagcccagcaccacccctgggcagcagcatcctcctctctggccttgccccaggccctgcagcggtggttgtcacaccctgacttcagggaaggtgaaacagggcttgtccctccaactgcaggaaaacccttaataaaatcttctgatgagttcta

SEQ ID NO: 33947 - DNA, 627 bp, Homo sapiens
  source 1..627: mol_type = unassigned DNA
gctctggcggctcctcccgggcgatgcctccgctctgggccctgctggccctcggctgcctgcggttcggctcggctgtgaacctgcagccccaactggccagtgtgactttcgccaccaacaaccccacacttaccactgtggccttggaaaagcctctctgcatgtttgacagcaaagaggccctcactggcacccacgaggtctacctgtatgtcctggtcgactcagtcaccccatactcgacgatcgacacgtggccaggccggcggagcggaggcatgatcgtcatcacttccatcctgggctccctgcccttctttctacttgtgggttttgctggcgccattgccctcagcctcgtggacatggggagttctgatggggaaacgactcacgactcccaaatcactcaggaggctgttcccaagtcgctgggggcctcggagtcttcctacacgtccgtgaaccgggggccgccactggacagggctgaggtgtattccagcaagctccaagactgagcccagcaccacccctgggcagcagcatcctcctctctggccttgccccaggccctgcagcggtggttgtcacaccctgacttcagggaaggtgaaacagggc

SEQ ID NO: 33948 - DNA, 1296 bp, Homo sapiens
  source 1..1296: mol_type = unassigned DNA
tttgcaggtctttccagcccctggggcagcctgattaaccagcttctccagggccaagctgttgggggtgaggtgcagcccgaagcagccagaccagcccctgagcctcccgggtgctggcagctgtcatggggctaccctgggggcagcctcacctagggctgcagatgctcctcctggcgttgaactgtctccggcccagcctgagcctgggtgagtgggggtcctggatggacgcgtccagccagacccaaggggctgggggccctgctggagtgattggaccctgggcgcccgcccccctccgattgggagaggcagccccagggacccccacgcccgtctccgtggctcaccttttgtcccccgtggccacagagctggtgccctacacaccacagataacagcttgggacctggaagggaaggtcacagccaccaccttctccctggagcagccgcgctgtgtcttcgatgggcttgccagcgccagcgataccgtctggctcgtggtggccttcagcaatgcctccaggggcttccagaacccggagacactggctgacattccggcctccccacagctgctgaccgatggccactacatgacgctgcccctgtctccggaccagctgccctgtggcgaccccatggcgggcagcggaggcgcccccgtgctgcgggtgggccatgaccacggctgccaccagcagcccttctgcaacgcgcccctccctggccctggaccctatcgggaagacccccggatccatcgacacctggccagggcggcgaagtggcagcatgatcgtcattacctccatcctctcttctctggccggcctcctactcttggccttcttggcagcctctaccatgcgcttctccagcctgtggtggccggaggaggccccggagcagctgcggatcggctccttcatgggcaagcgctacatgacccaccacatcccacccagagaggccgccacactgccggtgggctgcaagcctggcctggaccccctccccagcctcagcccctagcctggcctctttgcatggggctgggggagatggggcgctgggagtgagtgcatggtgctttgtcccagctcctgcacccacaggccccctcagggctccttgcctttcccccccaccagcacaccccgtaccctgcctggaatcccagcaccagcccccctgcctctcctctgcctttctggtttctctccctctccaagcatctgtaagttgcactcaggagggtttaggggagggccatgggcaggctgg

SEQ ID NO: 33949 - DNA, 1308 bp, Homo sapiens
  source 1..1308: mol_type = unassigned DNA
cagtggggctggatactggcctgcctcccaccagagtccccccagctcctccctgctgtgggctggcctgggaggaagggggtggggtgcacttacatttgcaggtctttccagcccctggggcagcctgattaaccagcttctccagggccaagctgttgggggtgaggtgcagcccgaagcagccagaccagcccctgagcctcccgggtgctggcagctgtcatggggctaccctgggggcagcctcacctagggctgcagatgctcctcctggcgttgaactgtctccggcccagcctgagcctggagctggtgccctacacaccacagataacagcttgggacctggaagggaaggtcacagccaccaccttctccctggagcagccgcgctgtgtcttcgatgggcttgccagcgccagcgataccgtctggctcgtggtggccttcagcaatgcctccaggggcttccagaacccggagacactggctgacattccggcctccccacagctgctgaccgatggccactacatgacgctgcccctgtctccggaccagctgccctgtggcgaccccatggcgggcagcggaggcgcccccgtgctgcgggtgggccatgaccacggctgccaccagcagcccttctgcaacgcgcccctccctggccctggaccctatcgggtgaagttcctcctgatggacaccaggggctcacccagggctgagaccaagtggtcagaccccatcactctccaccaagggaagacccccggatccatcgacacctggccagggcggcgaagtggcagcatgatcgtcattacctccatcctctcttctctggccggcctcctactcttggccttcttggcagcctctaccatgcgcttctccagcctgtggtggccggaggaggccccggagcagctgcggatcggctccttcatgggcaagcgctacatgacccaccacatcccacccagagaggccgccacactgccggtgggctgcaagcctggcctggaccccctccccagcctcagcccctagcctggcctctttgcatggggctgggggagatggggcgctgggagtgagtgcatggtgctttgtcccagctcctgcacccacaggccccctcagggctccttgcctttcccccccaccagcacaccccgtaccctgcctggaatcccagcaccagcccccctgcctctcctctgcctttctggtttctctccctctccaagcatctgtaagttgcactcaggagggtttaggggagggccatgggcaggctgg

SEQ ID NO: 33950 - DNA, 1608 bp, Homo sapiens
  source 1..1608: mol_type = unassigned DNA
cagtggggctggatactggcctgcctcccaccagagtccccccagctcctccctgctgtgggctggcctgggaggaagggggtggggtgcacttacatttgcaggtctttccagcccctggggcagcctgattaaccagcttctccagggccaagctgttgggggtgaggtgcagcccgaagcagccagaccagcccctgagcctcccgggtgctggcagctgtcatggggctaccctgggggcagcctcacctagggctgcagatgctcctcctggcgttgaactgtctccggcccagcctgagcctgggtgagtgggggtcctggatggacgcgtccagccagacccaaggggctgggggccctgctggagtgattggaccctgggcgcccgcccccctccgattgggagaggcagccccagggacccccacgcccgtctccgtggctcaccttttgtcccccgtggccacagagctggtgccctacacaccacagataacagcttgggacctggaagggaaggtcacagccaccaccttctccctggagcagccgcgctgtgtcttcgatgggcttgccagcgccagcgataccgtctggctcgtggtggccttcagcaatgcctccaggggcttccagaacccggagacactggctgacattccggcctccccacagctgctgaccgatggccactacatgacgctgcccctgtctccggaccagctgccctgtggcgaccccatggcgggcagcggaggcgcccccgtgctgcgggtgggccatgaccacggctgccaccagcagcccttctgcaacgcgcccctccctggccctggaccctatcgggaagacccccggatccatcgacacctggccagggcggcgaagtggcagcatgatcgtcattacctccatcctctcttctctggccggcctcctactcttggccttcttggcagcctctaccatgcgcttctccagcctgtggtggccggaggaggccccggagcagctgcggatcggctccttcatgggcaagcgctacatgacccaccacatcccacccagagaggccgccacactgccggtgggctgcaagcctggcctggaccccctccccagcctcagcccctagcctggcctctttgcatggggctgggggagatggggcgctgggagtgagtgcatggtgctttgtcccagctcctgcacccacaggccccctcagggctccttgcctttcccccccaccagcacaccccgtaccctgcctggaatcccagcaccagcccccctgcctctcctctgcctttctggtttctctccctctccaagcatctgtaagttgcactcaggagggtttaggggagggccatgggcaggctggtctcgtgatagtgagtgagcgctcatgggatctggttgtttagaagcatgcagcacctcctgcttcactctctctgtctctcctgctccaccatggccagaaacgtgcctgcttccccttcgccttctgccgtgattgtcagcttcttgagggctccccagccatgcttcctgtacagcctgcaaaactgtgagtcaattaaacctcttttcttc

SEQ ID NO: 33951 - DNA, 1523 bp, Homo sapiens
  source 1..1523: mol_type = unassigned DNA
cagtggggctggatactggcctgcctcccaccagagtccccccagctcctccctgctgtgggctggcctgggaggaagggggtggggtgcacttacatttgcaggtctttccagcccctggggcagcctgattaaccagcttctccagggccaagctgttgggggtgaggtgcagcccgaagcagccagaccagcccctgagcctcccgggtgctggcagctgtcatggggctaccctgggggcagcctcacctagggctgcagatgctcctcctggcgttgaactgtctccggcccagcctgagcctggagctggtgccctacacaccacagataacagcttgggacctggaagggaaggtcacagccaccaccttctccctggagcagccgcgctgtgtcttcgatgggcttgccagcgccagcgataccgtctggctcgtggtggccttcagcaatgcctccaggggcttccagaacccggagacactggctgacattccggcctccccacagctgctgaccgatggccactacatgacgctgcccctgtctccggaccagctgccctgtggcgaccccatggcgggcagcggaggcgcccccgtgctgcgggtgggccatgaccacggctgccaccagcagcccttctgcaacgcgcccctccctggccctggaccctatcgggtgaagttcctcctgatggacaccaggggctcacccagggctgagaccaagtggtcagaccccatcactctccaccaagggaagacccccggatccatcgacacctggccagggcggcgaagtggcagcatgatcgtcattacctccatcctctcttctctggccggcctcctactcttggccttcttggcagcctctaccatgcgcttctccagcctgtggtggccggaggaggccccggagcagctgcggatcggctccttcatgggcaagcgctacatgacccaccacatcccacccagagaggccgccacactgccggtgggctgcaagcctggcctggaccccctccccagcctcagcccctagcctggcctctttgcatggggctgggggagatggggcgctgggagtgagtgcatggtgctttgtcccagctcctgcacccacaggccccctcagggctccttgcctttcccccccaccagcacaccccgtaccctgcctggaatcccagcaccagcccccctgcctctcctctgcctttctggtttctctccctctccaagcatctgtaagttgcactcaggagggtttaggggagggccatgggcaggctggtctcgtgatagtgagtgagcgctcatgggatctggttgtttagaagcatgcagcacctcctgcttcactctctctgtctctcctgctccaccatggccagaaacgtgcctgcttccccttcgccttctgccgtgattgtcagcttcttgagggctccccagccatgcttcctgtacagcctgcaaaactgtgagtcaattaaacctcttttcttc

SEQ ID NO: 33952 - DNA, 1605 bp, Homo sapiens
  source 1..1605: mol_type = unassigned DNA
cagtggggctggatactggcctgcctcccaccagagtccccccagctcctccctgctgtgggctggcctgggaggaagggggtggggtgcacttacatttgcaggtctttccagcccctggggcagcctgattaaccagcttctccagggccaagctgttgggggtgaggtgcagcccgaagcagccagaccagcccctgagcctcccgggtgctggcagctgtcatggggctaccctgggggcagcctcacctagggctgcagatgctcctcctggcgttgaactgtctccggcccagcctgagcctgggtgagtgggggtcctggatggacgcgtccagccagacccaaggggctgggggccctgctggagtgattggaccctgggcgcccgcccccctccgattgggagaggcagccccagggacccccacgcccgtctccgtggctcaccttttgtcccccgtggccacagagctggtgccctacacaccacagataacagcttgggacctggaagggaaggtcacagccaccaccttctccctggagcagccgcgctgtgtcttcgatgggcttgccagcgccagcgataccgtctggctcgtggtggccttcagcaatgcctccaggggcttccagaacccggagacactggctgacattccggcctccccacagctgctgaccgatggccactacatgacgctgcccctgtctccggaccagctgccctgtggcgaccccatggcgggcagcggaggcgcccccgtgctgcgggtgggccatgaccacggctgccaccagcagcccttctgcaacgcgcccctccctggccctggaccctatcgggaagacccccggatccatcgacacctggccagggcggcgaagtggcagcatgatcgtcattacctccatcctctcttctctggccggcctcctactcttggccttcttggcagcctctaccatgcgcttctccagcctgtggtggccggaggaggccccggagcagctgcggatcggctccttcatgggcaagcgctacatgacccaccacatcccacccagagaggccgccacactgccggtgggctgcaagcctggcctggaccccctccccagcctcagcccctagcctggcctctttgcatggggctgggggagatggggcgctgggagtgagtgcatggtgctttgtcccagctcctgcacccacaggccccctcagggctccttgcctttcccccccaccagcacaccccgtaccctgcctggaatcccagcaccagcccccctgcctctcctctgcctttctggtttctctccctctccaagcatctgtaagttgcactcaggagggtttaggggagggccatgggcaggctggtctcgtgatattgagtgagcgcttgtgggatctggttgtttaaaagcatgcagccctcccacttcactctctctgtctctcctgctccaacatggccagacgtgcctgcttccccttcgccttctgccgtgattgtcagtttcctgaggcctccccagccatgcttcctgtacagcctgcagaactgtgagtcaattaaacctcttttcttc

SEQ ID NO: 33953 - DNA, 1300 bp, Homo sapiens
  source 1..1300: mol_type = unassigned DNA
tgatcttcaacatggcgacgctcttggttccctacagaaaggggcggagcctggactggggggcaggctcagattcaggttaaattgtggattgagctcgcagttacagacagctgaccatggaagcgaatgggttgggacctcagggttttccggagctgaagaatgacacattcctgcgagcagcctggggagaggaaacagactacactcccgtttggtgcatgcgccaggcaggccgttacttaccagagtttagggaaacccgggctgcccaggactttttcagcacgtgtcgctctcctgaggcctgctgtgaactgactctgcagccactgcgtcgcttccctctggatgctgccatcattttctccgacatccttgttgtaccccaggcactgggcatggaggtgaccatggtacctggcaaaggacccagcttcccagagccattaagagaagagcaggacctagaacgcctacgggatccagaagtggtagcctctgagctaggctatgtgttccaagccatcacccttacccgacaacgactggctggacgtgtgccgctgattggctttgctggtgccccatggaccctgatgacatacatggttgagggtggtggctcaagcaccatggctcaggccaagcgctggctctatcagagacctcaggctagtcaccagctgcttcgcatcctcactgatgctctggtcccatatctggtaggacaagtggtggctggtgcccaggcattgcagctgtttgagtcccatgcagggcatcttggcccacagctcttcaacaagtttgcactgccttacatccgtgatgtggccaagcaagtgaaggccaggttgcgggaggcaggcctggcaccagtgcccatgatcatctttgctaaggatgggcattttgccctggaggagctggcccaagctggctatgaggtggttgggcttgactggacagtggccccaaagaaagcccgggagtgtgtggggaagacggtgacattgcagggcaacctggacccctgtgccttgtatgcatctgaggaggagatcgggcagttggtgaagcagatgctggatgactttggaccacatcgctacattgccaacctgggccatgggctttatcctgacatggacccagaacatgtgggcgcctttgtggatgctgtgcataaacactcacgtctgcttcgacagaactgagtgtatacctttaccctcaagtaccactaacacagatgattgatcgtttccaggacaataaaagtttcggagttgaa

SEQ ID NO: 33954 - DNA, 1128 bp, Homo sapiens
  source 1..1128: mol_type = unassigned DNA
agacagctgaccatggaagcgaatgggttgggacctcagggttttccggagctgaagaatgacacattcctgcgagcagcctggggagaggaaacagactacactcccgtttggtgcatgcgccaggcaggccgttacttaccagagtttagggaaacccgggctgcccaggactttttcagcacgtgtcgctctcctgaggcctgctgtgaactgactctgcaggcactgggcatggaggtgaccatggtacctggcaaaggacccagcttcccagagccattaagagaagagcaggacctagaacgcctacgggatccagaagtggtagcctctgagctaggctatgtgttccaagccatcacccttacccgacaacgactggctggacgtgtgccgctgattggctttgctggtgccccatggaccctgatgacatacatggttgagggtggtggctcaagcaccatggctcaggccaagcgctggctctatcagagacctcaggctagtcaccagctgcttcgcatcctcactgatgctctggtcccatatctggtaggacaagtggtggctggtgcccaggcattgcagctgtttgagtcccatgcagggcatcttggcccacagctcttcaacaagtttgcactgccttacatccgtgatgtggccaagcaagtgaaggccaggttgcgggaggcaggcctggcaccagtgcccatgatcatctttgctaaggatgggcattttgccctggaggagctggcccaagctggctatgaggtggttgggcttgactggacagtggccccaaagaaagcccgggagtgtgtggggaagacggtgacattgcagggcaacctggacccctgtgccttgtatgcatctgaggaggagatcgggcagttggtgaagcagatgctggatgactttggaccacatcgctacattgccaacctgggccatgggctttatcctgacatggacccagaacatgtgggcgcctttgtggatgctgtgcataaacactcacgtctgcttcgacagaactgagtgtatacctttaccctcaagtaccactaacacagatgattgatcgtttccaggacaataaaagtttcggagttg

SEQ ID NO: 33955 - DNA, 1079 bp, Homo sapiens
  source 1..1079: mol_type = unassigned DNA
agacagctgaccatggaagcgaatgggttgggcctccagcgtagcatactgacacctacccccacccccacctgatcgccagacctcagggttttccggagctgaagaatgacacattcctgcgagcagcctggggagaggaaacagactacactcccgtttggtgcatgcgccaggcaggccgttacttaccagagtttagggaaacccgggctgcccaggactttttcagcacgtgtcgctctcctgaggcctgctgtgaactgactctgcagccactgcgtcgcttccctctggatgctgccatcattttctccgacatccttgttgtaccccaggcactgggcatggaggtgaccatggtacctggcaaaggacccagcttcccagagccattaagagaagagcaggacctagaacgcctacgggatccagaagtggtagcctctgagctaggctatgtgttccaagccatcacccttacccgacaacgactggctggacgtgtgccgctgattggctttgctggtgccccagcattgcagctgtttgagtcccatgcagggcatcttggcccacagctcttcaacaagtttgcactgccttacatccgtgatgtggccaagcaagtgaaggccaggttgcgggaggcaggcctggcaccagtgcccatgatcatctttgctaaggatgggcattttgccctggaggagctggcccaagctggctatgaggtggttgggcttgactggacagtggccccaaagaaagcccgggagtgtgtggggaagacggtgacattgcagggcaacctggacccctgtgccttgtatgcatctgaggaggagatcgggcagttggtgaagcagatgctggatgactttggaccacatcgctacattgccaacctgggccatgggctttatcctgacatggacccagaacatgtgggcgcctttgtggatgctgtgcataaacactcacgtctgcttcgacagaactgagtgtatacctttaccctcaagtaccactaacacagatgattgatcgtttccaggacaataaaagtttcggagttg

SEQ ID NO: 33956 - DNA, 682 bp, Homo sapiens
  source 1..682: mol_type = unassigned DNA
acctcagggttttccggagctgaagaatgacacattcctgcgagcagcctggggagaggaaacagactacactcccgtttggtgcatgcgccaggcaggccgttacttaccagagtttagggaaacccgggctgcccaggactttttcagcacgtgtcgctctcctgaggcctgctgtgaactgactctgcagccactgcgtcgcttccctctggatgctgccatcattttctccgacatccttgttgtaccccaggcactgggcatggaggtgaccatggtacctggcaaaggacccagcttcccagagccattaagagaagagcaggacctagaacgcctacgggatccagaagtggtagcctctgagctaggctatgtgttccaagccatcacccttacccgacaacgactggctggacgtgtgccgctgattggctttgctggtgccccagcattgcagctgtttgagtcccatgcagggcatcttggcccacagctcttcaacaagtttgcactgccttacatccgtgatgtggccaagcaagtgaaggccaggttgcgggaggcaggcctggcaccagtgcccatgatcatctttgctaaggatgggcattttgccctggaggagctggcccaagctggctatgaggtggttgggcttgactggacagtggcccca

SEQ ID NO: 33957 - DNA, 600 bp, Homo sapiens
  source 1..600: mol_type = unassigned DNA
gcagttacagacagctgaccatggaagcgaatgggttgggacctcagggttttccggagctgaagaatgacacattcctgcgagcagcctggggagaggaaacagactacactcccgtttggtgcatgcgccaggcaggccgttacttaccagagtttagggaaacccgggctgcccaggactttttcagcacgtgtcgctctcctgaggcctgctgtgaactgactctgcaggcactgggcatggaggtgaccatggtacctggcaaaggacccagcttcccagagccattaagagaagagcaggacctagaacgcctacgggatccagaagtggtagcctctgagctaggctatgtgttccaagccatcacccttacccgacaacgactggctggacgtgtgccgctgattggctttgctggtgccccatggaccctgatgacatacatggttgagggtggtggctcaagcaccatggctcaggccaagcgctggctctatcagagacctcaggctagtcaccagctgcttcgcatcctcactgatgctctggtcccatatctggtaggacaagtggtggctggtgcccaggcattgc

SEQ ID NO: 33958 - DNA, 744 bp, Homo sapiens
  source 1..744: mol_type = unassigned DNA
accgccccccgaccgggtgcccgctgtgtgccaggccgggtgctgggcacggtcccgcgagtgccctataaggactgccaggcaataatgaaggttcttttactgaaggatgcgaaggaagatgactgtggccaggatccgtatatcagggaattaggattatatggacttgaagccactttgatccctgttttatcgtttgagtttttgtctcttcccagtttctctgagaagctttctcatcctgaagattacgggggactcatttttaccagccccagagcagtggaagcagcagagttatgtttggagcaaaacaataaaactgaagtctgggaaaggtctctgaaagaaaaatggaatgccaagtcagtgtatgtggttggaaatgctactgcttctctagtgagtaaaattggcctggatacagaaggagaaacctgtggaaatgcagaaaagcttgcagaatatatttgttccagtaagtagaaaaacatcactccaaatgaagccatttattttttgttgacctcacaaccactacctagggaaaagaatatttcctcagtgcattcttggtggtgagattgattggtgagcatcgtataacccactctgggagcatagcctatttgtatttgtgtatgtctatactttgtgaggtttagcccacttccttctaccccctgtaccaaagaacttgacttgaacataacacaaaataaaacatttgggagataaaaa

SEQ ID NO: 33959 - DNA, 1556 bp, Homo sapiens
  source 1..1556: mol_type = unassigned DNA
ctggggcccggcgcgggtggccgccgcggcccctcgggctgcgtggggagggggcttccgcccctgttgtcattgctcctgcagccttttcgctgggactgcgcgacaccgccccccgaccgggtgcccgctgtgtgccaggccgggtgctgggcacggtcccgcgagtgccctataaggactgccaggcaataatgaaggttcttttactgaaggatgcgaaggaagatgactgtggccaggatccgtatatcagggaattaggattatatggacttgaagccactttgatccctgttttatcgtttgagtttttgtctcttcccagtttctctgagaagctttctcatcctgaagattacgggggactcatttttaccagccccagagcagtggaagcagcagagttatgtttggagcaaaacaataaaactgaagtctgggaaaggtctctgaaagaaaaatggaatgccaagtcagtgtatgtggttggaaatgctactgcttctctagtgagtaaaattggcctggatacagaaggagaaacctgtggaaatgcagaaaagcttgcagaatatatttgttccagtgaagaagtcaaaggaatcttttgaagtgaagaaagtgggtttggacgtgcccttatgctgatgaatcattggagtaatatctggggtttagccgcatccttggtggcaaggcggtggggaaagcccctgagggtgaggccagcctgagccccaagggaaaggggctgctgggacctcctgacctcaactcatctccaggagcgcacagggcctcgcacagatgcctcagtctgtaccgctgggagttcgtgccatctcagacctaccctccctacctgggctgtacctaaagagatactgctaggctttctctagaatgtttcatgagccagcactgtgagacattttcaagctaaaaacatacagttcaggagactgtaatctgtggtagaaagtgttcaccatttgctgctagtaaagacggttggccctgtgcttctctggccacttgtgccacatggtgttctcggaagaggcctctccatgcaccagtgtggagaagccctctggaggccaattcaaagagcatctgaggctaagcaactgaaaggaaaaggcctgatggccaacgtgttgctttctgtggaatgttccagactggattgctgggggtcattttctttaacagcagcctagacaggcagtgactctcttttattcagccaggtgttgaaatagctgcagggaagccacagacagttgttccagctttccggatcagagagcactggttgggccccgtgccatgtggccccagccccatgggatcgctcctcaggtcatggagccacacatcagtgtggagggttcgctccaggggttcctggtacaggatgcagatgggtcttgtctggctccaggctttttgtttctaatgttgtttctagagagtcatcatcaccgcataaatggtatcaaagcccttcttttaaaaatgtagaaataaatgtaaatggtagatcttga

SEQ ID NO: 33960 - DNA, 1216 bp, Homo sapiens
  source 1..1216: mol_type = unassigned DNA
ttccacaagcatttgattgccttcttcttgtgtaccgtccccatcggaaattgcttaggaagagtctttgagatctaattaagatctgtttccttgctctgtcgcagtgccctataaggactgccaggcaataatgaaggttcttttactgaaggatgcgaaggaagatgactgtggccaggatccgtatatcagggaattaggattatatggacttgaagccactttgatccctgttttatcgtttgagtttttgtctcttcccagtttctctgagaagctttctcatcctgaagattacgggggactcatttttaccagccccagagcagtggaagcagcagagttatgtttggagcaaaacaataaaactgaagtctgggaaaggtctctgaaagaaaaatggaatgccaagtcagtgtatgtggttggaaatgctactgcttctctagtgagtaaaattggcctggatacagaaggagaaacctgtggaaatgcagaaaagcttgcagaatatatttgttccagggagtcctcagcactgcctcttctatttccctgtggaaacctcaaaagagaaatcctgccaaaagcgctcaaggacaaagggattgccatggaaagcataactgtgtatcagacagttgcacacccaggaatccaagggaacctgaacagctactattcccagcagggggttccagccagcatcacattttttagtccctctggcctcacatacagtctcaagcacattcaggagttatctggtgacaatatcgatcaaattaagtttgcagccatcggccccactacggctcgcgcgctggccgcccagggccttcctgtaagctgcactgcagagagccccacgccacaagccctggccactggcatcaggaaggctctccagccccatggctgctgctgagtcagccacctagcgctggccccatgcagcctccctgggctgggctggctctggatggagccaggcatcggcaagggctctcgggagctgctgccgtcagactcctgcctcaagcctgagtggaagcacctgaggaccggggatcgggacctgacctggggctggcctcaggcccacgtgcacgtgactgccctctgtggaagccagcttaaaccctagccctgtgagagcttcctgtgcccagcaggaaggaagtcaaataaaccacactgactacctgtgctt

SEQ ID NO: 33961 - DNA, 1313 bp, Homo sapiens
  source 1..1313: mol_type = unassigned DNA
cccacgcgaccccagtctgaggtgcggggtcctggggcccggcgcgggtggccgccgcggcccctcgggctgcgtggggagggggcttccgcccctgttgtcattgctcctgcagccttttcgctgggactgcgcgacaccgccccccgaccgggtgcccgctgtgtgccaggccgggtgctgggcacggtcccgcgagtgccctataaggactgccaggcaataatgaaggttcttttactgaaggatgcgaaggaagatgactgtggccaggatccgtatatcagggaattaggattatatggacttgaagccactttgatccctgttttatcgtttgagtttttgtctcttcccagtttctctgagaagctttctcatcctgaagattacgggggactcatttttaccagccccagagcagtggaagcagcagagttatgtttggagcaaaacaataaaactgaagtctgggaaaggtctctgaaagaaaaatggaatgccaagtcagtgtatgtggttggaaatgctactgcttctctagtgagtaaaattggcctggatacagaaggagaaacctgtggaaatgcagaaaagcttgcagaatatatttgttccagggagtcctcagcactgcctcttctatttccctgtggaaacctcaaaagagaaatcctgccaaaagcgctcaaggacaaagggattgccatggaaagcataactgtgtatcagacagttgcacacccaggaatccaagggaacctgaacagctactattcccagcagggggttccagccagcatcacattttttagtccctctggcctcacatacagtctcaagcacattcaggagttatctggtgacaatatcgatcaaattaagtttgcagccatcggccccactacggctcgcgcgctggccgcccagggccttcctgtaagctgcactgcagagagccccacgccacaagccctggccactggcatcaggaaggctctccagccccatggctgctgctgagtcagccacctagcgctggccccatgcagcctccctgggctgggctggctctggatggagccaggcatcggcaagggctctcgggagctgctgccgtcagactcctgcctcaagcctgagtggaagcacctgaggaccggggatcgggacctgacctggggctggcctcaggcccacgtgcacgtgactgccctctgtggaagccagcttaaaccctagccctgtgagagcttcctgtgcccagcaggaaggaagtcaaataaaccacactgactacctgtgcttactga

SEQ ID NO: 33962 - DNA, 802 bp, Homo sapiens
  source 1..802: mol_type = unassigned DNA
gcgcctagctgcgcgcagccacccacgcgaccccagtctgaggtgcggggtcctggggcccggcgcgggtggccgccgcggcccctcgggctgcgtggggagggggcttccgcccctgttgtcattgctcctgcagccttttcgctgggactgcgcgacaccgccccccgaccgggtgcccgctgtgtgccaggccgggtgctgggcacggtcccgcgagtgccctataaggactgccaggcaataatgaaggttcttttactgaaggatgcgaaggaagatgactgtggccaggatccgtatatcaggctttctcatcctgaagattacgggggactcatttttaccagccccagagcagtggaagcagcagagttatgtttggagcaaaacaataaaactgaagtctgggaaaggtctctgaaagaaaaatggaatgccaagtcagtgtatgtggttggaaatgctactgcttctctagtgagtaaaattggcctggatacagaaggagaaacctgtggaaatgcagaaaagcttgcagaatatatttgttccagggagtcctcagcactgcctcttctatttccctgtggaaacctcaaaagagaaatcctgccaaaagcgctcaaggacaaagggattgccatggaaagcataactgtgtatcagacagttgcacacccaggaatccaagggaacctgaacagctactattcccagcagggggttccagccagcatcacattttttagtccctctggcctcacatacagtctcaagcacattcaggagttatctggtg

SEQ ID NO: 33963 - DNA, 2700 bp, Homo sapiens
  source 1..2700: mol_type = unassigned DNA
atggaccgaaaagtggcccgagaattccggcataaggtggattttctgattgaaaatgatgcagagaaggactatctctatgatgtgctgcgaatgtaccaccagaccatggacgtggccgtgctcgtgggagacctgaagctggtcatcaatgaacccagccgtctgcctctgtttgatgccattcggccgctgatcccactgaagcaccaggtggaatatgatcagctgaccccccggcgctccaggaagctgaaggaggtgcgtctggaccgtctgcaccccgaaggcctcggcctgagtgtgcgtggtggcctggagtttggctgtgggctcttcatctcccacctcatcaaaggcggtcaggcagacagcgtcgggctccaggtaggggacgagatcgtccggatcaatggatattccatctcctcctgtacccatgaggaggtcatcaacctcattcgaaccaagaaaactgtgtccatcaaagtgagacacatcggcctgatccccgtgaaaagctctcctgatgagcccctcacttggcagtatgtggatcagtttgtgtcggaatctgggggcgtgcgaggcagcctgggctcccctggaaatcgggaaaacaaggagaagaaggtcttcatcagcctggtaggctcccgaggccttggctgcagcatttccagcggccccatccagaagcctggcatctttatcagccatgtgaaacctggctccctgtctgctgaggtgggattggagataggggaccagattgtcgaagtcaatggcgtcgacttctctaacctggatcacaaggaggctgtaaatgtgctgaagagtagccgcagcctgaccatctccattgtagctgcagctggccgggagctgttcatgacagaccgggagcggctggcagaggcgcggcagcgtgagctgcagcggcaggagcttctcatgcagaagcggctggcgatggagtccaacaagatcctccaggagcagcaggagatggagcggcaaaggagaaaagaaattgcccagaaggcagcagaggaaaatgagagataccggaaggagatggaacagattgtagaggaggaagagaagtttaagaagcaatgggaagaagactggggctcaaaggaacagctactcttgcctaaaaccatcactgctgaggtacacccagtaccccttcgcaagccaaagtcttttggatggttttatcgttacgatggcaaattcccaaccatccggaagaaaggaaaagataagaagaaagccaagtatggcagcctgcaggacttgagaaagaataagaaagaactggagtttgagcaaaagctttacaaagagaaagaggaaatgctggagaaggaaaagcagctaaagatcaaccggctggcccaggaggtgtctgagacagagcgggaagaccttgaagaatcggaaaagattcaatattgggtggagaggctctgtcaaacgcgcctcgagcagatttcctctgctgataatgagatttcagagatgaccacagggcccccgcctcccccgccttctgtgtctcccctggccccacccttgagacgcttcgcaggcggactgcacctgcacaccactgacctggacgacatccctttggacatgttctactatccccccaagactccctctgccttgcctgtgatgccccaccctccaccctccaacccaccccacaaggtcccggcgccccctgtccttcccttatctggccatgtgagcgcctcatcctctccatgggtgcagcgcactccaccccccattcccatccctcccccgccatccgttcccacccaagacctcactcccacccgcccactgccctcggcgctggaagaagcactgagcaaccatcccttccgcactggggacacaggcaatccagtggaggactgggaggcaaagaaccacagtgggaagcccactaactcccctgtccctgaacagagcttcccacccaccccaaagacattttgcccaagcccacagcctccacgaggccctggcgtgtccaccatctccaaacctgtcatggtccaccaggagcccaatttcatctacaggccagctgtgaaatctgaagttctgccacaggagatgttgaagaggatggtggtttatcagacagcattcagacaagatttccggaaatatgaggaaggctttgacccctactctatgttcaccccagagcagatcatggggaaggatgtccggctcctacgcatcaagaaggagggatccttagacctggccctggaaggcggtgtggactcccccattgggaaggtggtcgtttctgctgtgtatgagcggggagctgctgagcggcatggtggcattgtgaaaggggacgagatcatggcaatcaacggcaagattgtgacagactacaccctggctgaggctgaggctgccctgcagaaggcctggaatcagggcggggactggatcgaccttgtggttgccgtctgccccccaaaggagtatgacgatgagctagcttctcttccctcctccgtagctgaaagcccccaaccggtccgaaagctccttgaagaccgtgctgccgtgcacagacacgggttcctcctgcagctggagcccacggaccttcttctgaagtccaaaaggggaaaccaaattcaccgttag

SEQ ID NO: 33964 - DNA, 2237 bp, Homo sapiens
  source 1..2237: mol_type = unassigned DNA
agctccgagggcggctggcccggtcgcggtcgcggctctttccagctcctggcagccgggcacccgaaggaacgggtcgtgcaacgacgcagctggacctggcccagccatggaccgaaaagtggcccgagaattccggcataaggtggattttctgattgaaaatgatgcagagaaggactatctctatgatgtgctgcgaatgtaccaccagaccatggacgtggccgtgctcgtgggagacctgaagctggtcatcaatgaacccagccgtctgcctctgtttgatgccattcggccgctgatcccactgaagcaccaggtggaatatgatcagctgaccccccggcgctccaggaagctgaaggaggtgcgtctggaccgtctgcaccccgaaggcctcggcctgagtgtgcgtggtggcctggagtttggctgtgggctcttcatctcccacctcatcaaaggcggtcaggcagacagcgtcgggctccaggtaggggacgagatcgtccggatcaatggatattccatctcctcctgtacccatgaggaggtcatcaacctcattcgaaccaagaaaactgtgtccatcaaagtgagacacatcggcctgatccccgtgaaaagctctcctgatgagcccctcacttggcagtatgtggatcagtttgtgtcggaatctgggggcgtgcgaggcagcctgggctcccctggaaatcgggaaaacaaggagaagaaggtcttcatcagcctggtaggctcccgaggccttggctgcagcatttccagcggccccatccagaagcctggcatctttatcagccatgtgaaacctggctccctgtctgctgaggtgggattggagataggggaccagattgtcgaagtcaatggcgtcgacttctctaacctggatcacaaggaggctgtaaatgtgctgaagagtagccgcagcctgaccatctccattgtagctgcagctggccgggagctgttcatgacagaccgggagcggctggcagaggcgcggcagcgtgagctgcagcggcaggagcttctcatgcagaagcggctggcgatggagtccaacaagatcctccaggagcagcaggagatggagcggcaaaggagaaaagaaattgcccagaaggcagcagaggaaaatgagagataccggaaggagatggaacagattgtagaggaggaagagaagtttaagaagcaatgggaagaagactggggctcaaaggaacagctactcttgcctaaaaccatcactgctgaggtacacccagtaccccttcgcaagccaaagtatgatcagggagtggaacctgagctcgagcccgcagatgacctggatggaggcacggaggagcagggagagcaggatttccggaaatatgaggaaggctttgacccctactctatgttcaccccagagcagatcatggggaaggatgtccggctcctacgcatcaagaaggagggatccttagacctggccctggaaggcggtgtggactcccccattgggaaggtggtcgtttctgctgtgtatgagcggggagctgctgagcggcatggtggcattgtgaaaggggacgagatcatggcaatcaacggcaagattgtgacagactacaccctggctgaggctgaggctgccctgcagaaggcctggaatcagggcggggactggatcgaccttgtggttgccgtctgccccccaaaggagtatgacgatgagctgaccttcttctgaagtccaaaaggggaaaccaaattcaccgttaggaaacagtgagctccggccccacctcgtgaacacaaagcctcggatcagccttgagagaggccacactacacacaccagatggcatccttgggacctgaatctatcacccaggaatctcaaactccctttggccctgaaccagggccagataaggaacagctcgggccactcttctgaaggccaacgtggaggaaagggagcagccagccatttgggagaagatctcaaggatccagactctcattcctttcctctggcccagtgaatttggtctctcccagctctgggggactccttccttgaaccctaataagaccccactggagtctctctctctccatccctctcctctgccctctgctctaattgctgccaggattgtcactccaaaccttactctgagctcattaataaaatagatttattttccagctta

SEQ ID NO: 33965 - DNA, 2159 bp, Homo sapiens
  source 1..2159: mol_type = unassigned DNA
ggcccggtcgcggtcgcggctctttccagctcctggcagccgggcacccgaaggaacgggtcgtgcaacgacgcagctggacctggcccagccatggaccgaaaagtggcccgagaattccggcataaggtggattttctgattgaaaatgatgcagagaaggactatctctatgatgtgctgcgaatgtaccaccagaccatggacgtggccgtgctcgtgggagacctgaagctggtcatcaatgaacccagccgtctgcctctgtttgatgccattcggccgctgatcccactgaagcaccaggtggaatatgatcagctgaccccccggcgctccaggaagctgaaggaggtgcgtctggaccgtctgcaccccgaaggcctcggcctgagtgtgcgtggtggcctggagtttggctgtgggctcttcatctcccacctcatcaaaggcggtcaggcagacagcgtcgggctccaggtaggggacgagatcgtccggatcaatggatattccatctcctcctgtacccatgaggaggtcatcaacctcattcgaaccaagaaaactgtgtccatcaaagtgagacacatcggcctgatccccgtgaaaagctctcctgatgagcccctcacttggcagtatgtggatcagtttgtgtcggaatctgggggcgtgcgaggcagcctgggctcccctggaaatcgggaaaacaaggagaagaaggtcttcatcagcctggtaggctcccgaggccttggctgcagcatttccagcggccccatccagaagcctggcatctttatcagccatgtgaaacctggctccctgtctgctgaggtgggattggagataggggaccagattgtcgaagtcaatggcgtcgacttctctaacctggatcacaaggagggccgggagctgttcatgacagaccgggagcggctggcagaggcgcggcagcgtgagctgcagcggcaggagcttctcatgcagaagcggctggcgatggagtccaacaagatcctccaggagcagcaggagatggagcggcaaaggagaaaagaaattgcccagaaggcagcagaggaaaatgagagataccggaaggagatggaacagattgtagaggaggaagagaagtttaagaagcaatgggaagaagactggggctcaaaggaacagctactcttgcctaaaaccatcactgctgaggtacacccagtaccccttcgcaagccaaagtatgatcagggagtggaacctgagctcgagcccgcagatgacctggatggaggcacggaggagcagggagagcaggatttccggaaatatgaggaaggctttgacccctactctatgttcaccccagagcagatcatggggaaggatgtccggctcctacgcatcaagaaggagggatccttagacctggccctggaaggcggtgtggactcccccattgggaaggtggtcgtttctgctgtgtatgagcggggagctgctgagcggcatggtggcattgtgaaaggggacgagatcatggcaatcaacggcaagattgtgacagactacaccctggctgaggctgaggctgccctgcagaaggcctggaatcagggcggggactggatcgaccttgtggttgccgtctgccccccaaaggagtatgacgatgagctgaccttcttctgaagtccaaaaggggaaaccaaattcaccgttaggaaacagtgagctccggccccacctcgtgaacacaaagcctcggatcagccttgagagaggccacactacacacaccagatggcatccttgggacctgaatctatcacccaggaatctcaaactccctttggccctgaaccagggccagataaggaacagctcgggccactcttctgaaggccaacgtggaggaaagggagcagccagccatttgggagaagatctcaaggatccagactctcattcctttcctctggcccagtgaatttggtctctcccagctctgggggactccttccttgaaccctaataagaccccactggagtctctctctctccatccctctcctctgccctctgctctaattgctgccaggattgtcactccaaaccttactctgagctcattaataaaatagatttattttcca

SEQ ID NO: 33966 - DNA, 2278 bp, Homo sapiens
  source 1..2278: mol_type = unassigned DNA
gtggtctgcataggtctgatgcattggggtcagaggggcagcctggcctgtggctcctcttctctcctcacaactccagccctgaaaagctgctggggaggcccttggggatgacctctcctccctgaggtctgctatgggggcgggtgctgagcctggagctgtgattctgctattggattttccaggtggattttctgattgaaaatgatgcagagaaggactatctctatgatgtgctgcgaatgtaccaccagaccatggacgtggccgtgctcgtgggagacctgaagctggtcatcaatgaacccagccgtctgcctctgtttgatgccattcggccgctgatcccactgaagcaccaggtggaatatgatcagctgaccccccggcgctccaggaagctgaaggaggtgcgtctggaccgtctgcaccccgaaggcctcggcctgagtgtgcgtggtggcctggagtttggctgtgggctcttcatctcccacctcatcaaaggcggtcaggcagacagcgtcgggctccaggtaggggacgagatcgtccggatcaatggatattccatctcctcctgtacccatgaggaggtcatcaacctcattcgaaccaagaaaactgtgtccatcaaagtgagacacatcggcctgatccccgtgaaaagctctcctgatgagcccctcacttggcagtatgtggatcagtttgtgtcggaatctgggggcgtgcgaggcagcctgggctcccctggaaatcgggaaaacaaggagaagaaggtcttcatcagcctggtaggctcccgaggccttggctgcagcatttccagcggccccatccagaagcctggcatctttatcagccatgtgaaacctggctccctgtctgctgaggtgggattggagataggggaccagattgtcgaagtcaatggcgtcgacttctctaacctggatcacaaggaggctgtaaatgtgctgaagagtagccgcagcctgaccatctccattgtagctgcagctggccgggagctgttcatgacagaccgggagcggctggcagaggcgcggcagcgtgagctgcagcggcaggagcttctcatgcagaagcggctggcgatggagtccaacaagatcctccaggagcagcaggagatggagcggcaaaggagaaaagaaattgcccagaaggcagcagaggaaaatgagagataccggaaggagatggaacagattgtagaggaggaagagaagtttaagaagcaatgggaagaagactggggctcaaaggaacagctactcttgcctaaaaccatcactgctgaggtacacccagtaccccttcgcaagccaaagtatgatcagggagtggaacctgagctcgagcccgcagatgacctggatggaggcacggaggagcagggagagcaggatttccggaaatatgaggaaggctttgacccctactctatgttcaccccagagcagatcatggggaaggatgtccggctcctacgcatcaagaaggagggatccttagacctggccctggaaggcggtgtggactcccccattgggaaggtggtcgtttctgctgtgtatgagcggggagctgctgagcggcatggtggcattgtgaaaggggacgagatcatggcaatcaacggcaagattgtgacagactacaccctggctgaggctgaggctgccctgcagaaggcctggaatcagggcggggactggatcgaccttgtggttgccgtctgccccccaaaggagtatgacgatgagctgaccttcttctgaagtccaaaaggggaaaccaaattcaccgttaggaaacagtgagctccggccccacctcgtgaacacaaagcctcggatcagccttgagagaggccacactacacacaccagatggcatccttgggacctgaatctatcacccaggaatctcaaactccctttggccctgaaccagggccagataaggaacagctcgggccactcttctgaaggccaacgtggaggaaagggagcagccagccatttgggagaagatctcaaggatccagactctcattcctttcctctggcccagtgaatttggtctctcccagctctgggggactccttccttgaaccctaataagaccccactggagtctctctctctccatccctctcctctgccctctgctctaattgctgccaggattgtcactccaaaccttactctgagctcattaataaaatagatttattttccagct

SEQ ID NO: 33967 - DNA, 2450 bp, Homo sapiens
  source 1..2450: mol_type = unassigned DNA
agcccaggcctgaacaggcagtggtcagagtgaccccaacagagtgtcccgggactcaggcctctgatcaagttacccccagaggatcagagaggggttgacgaaggagaagcattcagagggcactggcttctggacagcaatgagtgcccgggccacgcggccccgaagccggcgagggaggcatgctccacccggtgaactggatcccgtggctgagagttcagaggaggtcgaggcagccagtgggagctccaagcccagctttgccccacctccggtgagctccgggctggagcagctgggccccatggaggaggtcagtggccaaggcctaggaagcaggactgacaagaagatggatgggggctctggcagggaactggcctcagcccccgaagtgccccacaaacctgcagtggaagcccaccaagccccagaagcagccctacagtacaaggagactgtgccccctgggaatggggcccccgatgtgtttcagaccctccagcacactctgagctccctggaggcagcggctgcagcctggcgccaccagccccccagccattctgggccgatggagttcgaaggcacaagcgaagggggagcaggttcccttgggaagcaggaaggggcagggagctgccagcgagaggcagctcgcctggccgagaggaatgcctggctccggctggccctgagtagccgagaggatgagctggtccgcacgcaggcctccctggaggccatccgagctgagaaggagacgctgcagaaagaggttcaagagctgcaggattccctcttgaggctggagccctgcccacatctttcccacaaccaagcaggtggctcaggcagtggttctagcagctctgaggcagacagggaaccctgggagactcaggactccttctccctggctcaccccctgcttcggcgcctccgcagccattccagcacccagatccttgggtctcttcccaaccagcccctcagtcctgagatgcacatcatggaagcccagatggagcaactccgggggagcattgagaagctcaaatgctttaatcgtctgctatcagctgtgctacagggatacaagggccgctgtgaaggcctcagcatgcagctaggccagcgggaggctgaggccacagcattgcatctggccttgcagtacagtgaacactgtgaagaggcatacagggttctgcttgctctgcgggaggccgactcaggagcaggagacgaagcccccatgagtgacctgcaagcagctgaaaaggaagcatggaggctgctggcacaagaggaggctgccatggatgcaggagcacagcagaatccacagccaagccctgaaggcagcagtgtggataagcccaccccacaggaagtggctttccagctccgaagctatgtccagcgtctccaggagcgccgttctctaatgaagattctctcagagcctggccccaccttggcacccatgcccactgtgccccgtgcagaagccatggtgcaggccattctggggacccaggctggcccagctcttccccgactggagaagacacaaattcagcaggacctggtggccgcaagggaggccctggcggacctgatgcttcggctgcagctggtgcggcgtgagaagcggggcctagagctgcgggaggctgccctccgagccctgggtccagctcacgtgctcctgctggagcagctgcggtgggaacgggcagagctccaggctggtggggcaaacagcagtggcggacatagcagcggaggtggcagcagcggggacgaggaagagtggtatcagggccttcctgctgtccctggtggcaccagtggcattgatggtggccaggtgggcagagcctgggacccagagaagttagcccaggaactggcagcatcgctcaccaggacactggacctgcaggagcagctgcagtctctgcgcagggagctggaacaggtggctcagaaggggcgagccagacggtctcagagtgccgagctgaacagggatttatgcaaagcccacagcgccctggtcctggccttccgaggagcccaccggaagcaggaagagcaacgccggaagttggagcagcagatggcactcatggaggctcagcaggccgaggaggtggcggtgctcgaagccactgcaagggccctggggaagcccaggcctcccctcccgcctccccagcttggggacacctttctgtaggccccttacccagccatgtctggacatgccagacagctgtggcatgtcataaactgtcctggagtgacatcatgtcatgttgcatgatttggcatgttggggcacatttggcgtgagggaagctggtgcacatgggtgtccagggcctgatggggtgtggccaggcaatgaagaaagactcaggtgtctttggcct

SEQ ID NO: 33968 - DNA, 2402 bp, Homo sapiens
  source 1..2402: mol_type = unassigned DNA
caacagagtgtcccgggactcaggcctctgatcaagttacccccagaggatcagagaggggttgacgaaggagaagcattcagagggcactggcttctggacagcaatgagtgcccgggccacgcggccccgaagccggcgagggaggcatgctccacccggtgaactggatcccgtggctgagagttcagaggaggtcgaggcagccagtgggagctccaagcccagctttgccccacctccggtgagctccgggctggagcagctgggccccatggaggaggtcagtggccaaggcctaggaagcaggactgacaagaagatggatgggggctctggcagggaactggcctcagcccccgaagtgccccacaaacctgcagtggaagcccaccaagccccagaagcagccctacagtacaaggagactgtgccccctgggaatggggcccccgatgtgtttcagaccctccagcacactctgagctccctggaggcagcggctgcagcctggcgccaccagccccccagccattctgggccgatggagttcgaaggcacaagcgaagggggagcaggttcccttgggaagcaggaaggggcagggagctgccagcgagaggcagctcgcctggccgagaggaatgcctggctccggctggccctgagtagccgagaggatgagctggtccgcacgcaggcctccctggaggccatccgagctgagaaggagacgctgcagaaagaggttcaagagctgcaggattccctcttgaggctggagccctgcccacatctttcccacaaccaagcaggtggctcaggcagtggttctagcagctctgaggcagacagggaaccctgggagactcaggactccttctccctggctcaccccctgcttcggcgcctccgcagccattccagcacccagatccttgggtctcttcccaaccagcccctcagtcctgagatgcacatcatggaagcccagatggagcaactccgggggagcattgagaagctcaaatgctttaatcgtctgctatcagctgtgctacagggatacaagggccgctgtgaaggcctcagcatgcagctaggccagcgggaggctgaggccacagcattgcatctggccttgcagtacagagtcttgctctgtcacccaggctggagtgcagtggtgccatcttggctcactgcaacctccgcctccccagttcaagtgattctcctgcctcagcctcctgagtagctggaactacagtgaacactgtgaagaggcatacagggttctgcttgctctgcgggaggccgactcaggagcaggagacgaagcccccatgagtgacctgcaagcagctgaaaaggaagcatggaggctgctggcacaagaggaggctgccatggatgcaggagcacagcagaatccacagccaagccctgaaggcagcagtgtggataagcccaccccacaggaagtggctttccagctccgaagctatgtccagcgtctccaggagcgccgttctctaatgaagattctctcagagcctggccccaccttggcacccatgcccactgtgccccgtgcagaagccatggtgcaggccattctggggacccaggctggcccagctcttccccgactggagaagacacaaattcagcaggacctggtggccgcaagggaggccctggcggacctgatgcttcggctgcagctggtgcggcgtgagaagcggggcctagagctgcgggaggctgccctccgagccctgggtccagctcacgtgctcctgctggagcagctgcggtgggaacgggcagagctccaggctggtggggcaaacagcagtggcggacatagcagcggaggtggcagcagcggggacgaggaagagtggtatcagggccttcctgctgtccctggtggcaccagtggcattgatggtggccaggtgggcagagcctgggacccagagaagttagcccaggaactggcagcatcgctcaccaggacactggacctgcaggagcagctgcagtctctgcgcagggagctggaacaggtggctcagaaggggcgagccagacggtctcagagtgccgagctgaacagggatttatgcaaagcccacagcgccctggtcctggccttccgaggagcccaccggaagcaggaagagcaacgccggaagttggagcagcagatggcactcatggaggctcagcaggccgaggaggtggcggtgctcgaagccactgcaagggccctggggaagcccaggcctcccctcccgcctccccagcttggggacacctttctgtaggccccttacccagccatgtctggacatgccagacagctgtggcatgtcataaactgtcctggagtg

SEQ ID NO: 33969 - DNA, 2136 bp, Homo sapiens
  source 1..2136: mol_type = unassigned DNA
agagtgtcccgggactcaggcctctgatcaagttacccccagaggatcagagaggggttgacgaaggagaagcattcagagggcactggcttctggacagcaatgagtgcccgggccacgcggccccgaagccggcgagggaggcatgctccacccgactgacaagaagatggatgggggctctggcagggaactggcctcagcccccgaagtgccccacaaacctgcagtggaagcccaccaagccccagaagcagccctacagtacaaggagactgtgccccctgggaatggggcccccgatgtgtttcagaccctccagcacactctgagctccctggaggcagcggctgcagcctggcgccaccagccccccagccattctgggccgatggagttcgaaggcacaagcgaagggggagcaggttcccttgggaagcaggaaggggcagggagctgccagcgagaggcagctcgcctggccgagaggaatgcctggctccggctggccctgagtagccgagaggatgagctggtccgcacgcaggcctccctggaggccatccgagctgagaaggagacgctgcagaaagaggttcaagagctgcaggattccctcttgaggctggagccctgcccacatctttcccacaaccaagcaggtggctcaggcagtggttctagcagctctgaggcagacagggaaccctgggagactcaggactccttctccctggctcaccccctgcttcggcgcctccgcagccattccagcacccagatccttgggtctcttcccaaccagcccctcagtcctgagatgcacatcatggaagcccagatggagcaactccgggggagcattgagaagctcaaatgctttaatcgtctgctatcagctgtgctacagggatacaagggccgctgtgaaggcctcagcatgcagctaggccagcgggaggctgaggccacagcattgcatctggccttgcagtacagtgaacactgtgaagaggcatacagggttctgcttgctctgcgggaggccgactcaggagcaggagacgaagcccccatgagtgacctgcaagcagctgaaaaggaagcatggaggctgctggcacaagaggaggctgccatggatgcaggagcacagcagaatccacagccaagccctgaaggcagcagtgtggataagcccaccccacaggaagtggctttccagctccgaagctatgtccagcgtctccaggagcgccgttctctaatgaagattctctcagagcctggccccaccttggcacccatgcccactgtgccccgtgcagaagccatggtgcaggccattctggggacccaggctggcccagctcttccccgactggagaagacacaaattcagcaggacctggtggccgcaagggaggccctggcggacctgatgcttcggctgcagctggtgcggcgtgagaagcggggcctagagctgcgggaggctgccctccgagccctgggtccagctcacgtgctcctgctggagcagctgcggtgggaacgggcagagctccaggctggtggggcaaacagcagtggcggacatagcagcggaggtggcagcagcggggacgaggaagagtggtatcagggccttcctgctgtccctggtggcaccagtggcattgatggtggccaggtgggcagagcctgggacccagagaagttagcccaggaactggcagcatcgctcaccaggacactggacctgcaggagcagctgcagtctctgcgcagggagctggaacaggtggctcagaaggggcgagccagacggtctcagagtgccgagctgaacagggatttatgcaaagcccacagcgccctggtcctggccttccgaggagcccaccggaagcaggaagagcaacgccggaagttggagcagcagatggcactcatggaggctcagcaggccgaggaggtggcggtgctcgaagccactgcaagggccctggggaagcccaggcctcccctcccgcctccccagcttggggacacctttctgtaggccccttacccagccatgtctggacatgccagacagctgtggcatgtcataaactgtcctggagtgacatc

SEQ ID NO: 33970 - DNA, 3561 bp, Homo sapiens
  source 1..3561: mol_type = unassigned DNA
cagatgtcttggtagtcgcggctctggcgctccgcaccctccgtctgcggcagcgggggctggcggccccggcccctgcccggccccgtcctccaacctcatgcctcagccctaataccgccgccctcccctgcggggggcctttctccgtgtcccccgcccgccccgtccacttcgggcgccatgaacgaccagtaccaccgggcagcccgggatggctacctggagctcctcaaggaggccacccgaaaggagctgaatgcccccgacgaggatggcatgacccccactctctgggctgcctaccatggcaacctcgagtcgctgcgtctcattgtgagccgcgggggtgacccggacaagtgtgacatctggggcaacacacccctgcatctggcagcttccaatggccacttgcactgcctgtccttcctggtgtccttcggagccaacatctggtgcctagacaacgactaccacacgccgctggacatggctgccatgaagggccacatggaatgcgtgcgctacctggactccatcgcggccaagcagagcagcctcaaccccaagctggtgggtaagctgaaggacaaggccttccgcgaggcggagcggcgcatccgcgagtgcgccaagctgcagcggaggcaccacgaacgcatggagcggcgataccggcgcgagctggccgagcgttccgacaccctcagcttctccagcctcacgtccagcaccctgagccgccggctgcagcatctggcgctgggcagccacctgccgtactctcaggccacgctgcacggcacggccaggggcaagaccaagatgcagaagaagctggagcggcgcaagcagggcggcgaaggcaccttcaaggtctccgaggatgggcgcaagagcgcccgctcgctctcgggcctgcagctgggcagcgacgtgatgttcgtgcgccagggcacctacgccaatcccaaggagtggggccgagccccgctccgggacatgttcctctcggacgaggacagcgtctcccgtgccacgctggcggccgagcctgcccactcggaggtcagcaccgactcaggccacgactccctgtttacccgccccggcctgggcaccatggtgttccgcagaaattacttgagcagtgggctgcacggactgggccgcgaggatgggggtctggatggggtgggagcgccgcggggtcggctgcagagctcccccagcctggacgatgacagcctgggcagtgccaacagcctgcaggaccgcagctgtggggaggagctgccctgggatgagctcgatttaggcttggacgaggacctggagcccgagactagcccgctggagaccttcctggcctctctgcacatggaggactttgccgccctcctgcggcaggagaagatcgacctcgaggctttgatgctgtgctctgacctcgacctccgcagcatcagcgtcccactggggccccgaaagaagatcttgggggccgtgaggaggcggcggcaggcgatggagcgcccgccggccctggaggacacagagctataaccgggggctcctctccccagaccaaaatgaattgcaagttgccacaacctatggtggggtctcgaggtcctcacagttgccagccctgcagcccccttccccaggagcaaggaccagttggggcgactcctttgaaagtctgtctgcaccttgaagctgagggtgtggcctggaggcaccagaggggcaagagaatgttccggaactccagttctgaggggtcttgaaggccctgagccacccattctgagcagccgtaaaggacatgtagacttgggggaggcctgccccagagggagggcaggggcatcggaactggatgagagtgtgggaggtggatgcgggagggtgcacctgtcccgggcgccgtaggcctctcccacccctcccctgatggtcttgttctcttgtgctcaggccagagacttgctcacttcctgcattgttgtgaagggaagagtttgggctgcctcccctcctcccgtccaccccagaggggaagttcctcagccagactcttcagccaaatgccccaactttcagtctgtaccccatcccaagcatagccagctccccctccttcacctagtggtcaaggcccggagctggaaagccgggttggggtggggtgggggtactgacgcccttcccagctcatccaggggtggagcctggcctgtcttcctccaacctccccctttttcgttgtgcagcctggccccccagggaccccagagggccagggcgctagatgcaaggtgctagaccaatgggctgcagtattatagcccccaggcctggcaggcatgcgctgggctagagaaaggtgtccgccaacctcctcagtctcccaggcctgggacaggcagaacagggtgtggctgggtgtcaggcctggggtgggtaagtcctgcgatgtggacactggagaaagtggatcctctaaactgcagattgtccccaggtcaccagggctgtgtgcgtgtgcatgtttgtgtgcatgtatgcgtgtgtgcatgcatgtgtgtgtaagtatgtggtatgtgtgagcacgggtgtgtgcttgggtgtgtgtgtgttcttgcatacatgtgtacgtgtgtgtgcacgtgaacgcgtgcgtgtttgtgtgtgtgcatgcatgtgtgtgcatgtgtgtgtgtgcatgcatgtgtgtgtgtgtgcatgtgtgcgtgtgtgcacactcacgttgggtggtgtttggtaggtttccctccaggtctggtagggactgggctgttgcgtgattctgcgtggatcgggggtaagagagctcacctgtgtcccagccctctgatggtggtgagaccaggggaaaggccagctcagagggtggtcacagcatgtgtcctctgacgtatgcccccaaagctctccagccagactgaggtcacagatgtgggagagtccctgatgagcccgctgacacgtgtgcgcccctttgcaccccatgcagaggtgctctcctcctttctcagccatggccccccatccctgacctcagcttgggaagcagctcctgctgggagcatggcctcagcccccagcatctcctggggcccccatggctggggcaggggaaagagagccctcaaaggcctctttctggtctgtctgggggttcccattcccacacatgtgcccagagtagggggcatggaggagatggtccctgtcctactgcaggacactgagggcttggctgcctgccaccgccatctggagcccaccacagctcttctccctgttctctgggcctgagcctggggccacccccaagtgccgacttgtttctcccagagccccaggtgctgccccttctctcctgttcctcgtccgtttactgccgcagcccctcctggttcttctggtgctggggtggagcaggctctgtgctcccaccactgtaccccgaatccctcctgcaggctcattgccacttttgtagagaatgttctctatcagtatcgt

SEQ ID NO: 33971 - DNA, 18883 bp, Homo sapiens
  source 1..18883: mol_type = unassigned DNA
tgtttgctctgcagaatactttacctgggcacccaagtcttccttccagcattcctgctgctacagcctatttgctgagtaaccaggggttacagcagcgttgccaggcaacgagggacagcggtcctgttgaagagccatttgtcacactgaggggactggttgaaatgcaataaagaaatgataccagcagctactcatgtcttcgccattgctaagaacgtcgttggtattaccttactctgagaacgtgtctgcagtttccagaaaatggagtatcgcaacatcacttaaagtaccctgcttcaaagtattgctggcaagtggcgtgggcctgattatttatttagaaatgctttatcaggaggagaatgcttttttgtaaacatgaattgcccagttctttcattgggctctggcttcttgtttcaggtcattgaaatgttgatctttgcctattttgcttcaatatccttgactgagtcacgaggtcttttcccaaggctggagaacgtgggagctttcaagaaagtttccatcgtgccaacccaagcagtatgtggactcccagaccgaagcactttttgtcacagctctgctgctgctgaaagtattcagttctgtacccagcggttttgtattcaggattgcccatacagatcttcacaccctacctacactgcccttttctcagcaggcctcagtagctgcatcacaccagacaagaatgatctgcatcctaacgcccatagcaattctgcaagttttatttttggaaatcacaagagctgcttttcttctcctccttctccaaagctgatggcatcatttaccttagctgtatggctgaaacctgagcaacaaggtgtaatgtgtgttatagaaaagacagtagatgggcagattgtgttcaaacttacaatatctgagaaagagaccatgttttattatcgcacagtaaatggtttgcaacctccaataaaagtaatgacactggggagaattcttgtgaagaaatggattcatcttagtgtgcaggtgcatcagacaaaaatcagcttctttatcaatggcgtggagaaggatcatacacctttcaatgcaagaactctaagtggttcaattacagattttgcatctggtactgtgcaaataggacagagtttaaatggtttagagcagtttgtcggaagaatgcaagattttcgattataccaagtggcacttacaaacagagagattctggaagtcttctctggagatcttctcagattgcatgcccaatcacattgccgttgccctggcagccacccgcgggtccaccctttggcacagcggtactgcattcctaatgatgcaggagacacagctgataatagagtgtcacggttgaatcctgaagcccatcctctctcttttgtcaatgataatgatgttggtacttcatgggtttcaaatgtgtttacaaacattacacagcttaatcaaggagtgactatttcagttgatttggaaaatggacagtatcaggtgttttatattatcattcagttctttagtccacaaccaacggaaataaggattcaaaggaagaaggaaaatagtttagattgggaggactggcaatattttgccaggaattgtggtgcttttggaatgaaaaacaatggagatttggaaaaacctgattctgtcaactgtcttcagctttccaattttactccatattcccgtggcaatgtcacatttagcatcctgacacctggaccaaattatcgtcctggatacaataacttctataataccccatctcttcaagagttcgtaaaagccacgcaaataaggtttcattttcatgggcagtactatacaactgagactgctgttaacctcagacacagatattatgcagtggacgaaatcaccattagtgggagatgtcagtgccatggtcatgccgataactgcgacacaacaagccagccatatagatgcctctgctcccaggagagcttcactgaaggacttcattgtgatcgctgcttgcctctttataatgacaagcctttccgccaaggtgatcaagtttacgctttcaattgtaaaccttgtcaatgcaacagccattccaaaagctgccattacaacatctctgtagacccatttccttttgagcacttcagagggggaggaggagtttgtgatgattgtgagcataacactacaggaaggaactgtgagctgtgcaaggattactttttccgacaagttggtgcagatccttcggccatagatgtttgcaaaccctgtgactgtgatacagttggcactagaaatggtagcattctttgtgatcagattggaggacagtgtaattgtaagagacacgtgtctggcaggcagtgcaatcagtgccagaatggattctacaatctacaagagttggatcctgatggctgcagtccctgtaactgcaatacctctgggacagtggatggagatattacctgtcaccaaaattcaggccagtgcaagtgcaaagcaaacgttattgggcttaggtgtgatcattgcaattttggatttaaatttctccgaagctttaatgatgttggatgtgagccctgccagtgtaacctccatggctcagtgaacaaattctgcaatcctcactctgggcagtgtgagtgcaaaaaagaagccaaaggacttcagtgtgacacctgcagagaaaacttttatgggttagatgtcaccaattgtaaggcctgtgactgtgacacagctggatccctccctgggactgtctgtaatgctaagacagggcagtgcatctgcaagcccaatgttgaagggagacagtgcaataaatgtttggagggaaacttctacctacggcaaaataattctttcctctgtctgccttgcaactgtgataagactgggacaataaatggctctctgctgtgtaacaaatcaacaggacaatgtccttgcaaattaggggtaacaggtcttcgctgtaatcagtgtgagcctcacaggtacaatttgaccattgacaattttcaacactgccagatgtgtgagtgtgattccttggggacattacctgggaccatttgtgacccaatcagtggccagtgcctgtgtgtgcctaatcgtcaaggaagaaggtgtaatcagtgtcaaccaggtttttatatttctccaggcaatgccactggctgcctgccatgctcatgccatacaactggtgcagttaatcacatctgtaatagcctgactggtcagtgtgtttgccaagatgcttccattgctgggcaacgttgtgaccaatgcaaagaccattactttggatttgatcctcagactggaagatgtcagccttgtaattgtcatctctcaggagccttgaatgaaacctgtcacttggtcacaggccagtgtttctgtaaacaatttgtcactggctcaaagtgtgatgcttgtgttcccagtgcaagccacttggatgtcaacaatctattgggttgcagcaaaactccattccagcaacctccgcccagaggacaagttcaaagttcttctgctatcaatctctcctggagtccacctgattctccaaatgcccactggcttacttacagtttactcagggatggttttgaaatctacacaacagaggatcaatacccatacagtattcaatacttcttagacacagacctgttaccatataccaaatattcctattacattgagaccaccaatgtgcatggttcaacaaggagtgtagctgtcacttacaagacaaaaccaggggtcccagagggaaacttgactttaagttatatcattcctattggctcagactctgtgacacttacctggacaacactctcaaatcaatctggtcccatagagaaatatattttgtcctgtgcccctttggctggtggtcagccatgtgtttcctacgaaggtcatgaaacctcagctaccatctggaatctggttccatttgccaagtacgatttttctgtacaggcgtgtactagcgggggctgtttacacagcttgcccattacagtgaccacagcccaggcccctccccaaagactaagtccacctaagatgcagaaaatcagttctacagaacttcatgtagaatggtctccaccagcggaactaaatggaataattataagatatgaactatacatgagaagactgagatctactaaagaaaccacatctgaggaaagtcgagtttttcagagcagtggttggctcagtcctcattcatttgtagaatcggccaatgaaaatgcattaaaacctcctcaaacaatgacaaccatcactggcttggagccatacaccaagtatgagttcagagtcttagctgtgaatatggctggaagtgtgtcttctgcctgggtctcagaaagaacgggagaatcagcacctgtattcatgatccctccttcagtctttcccctctcttcgtactctctcaatatctcctgggagaagccagcagataatgttacaagaggaaaagttgtggggtatgacatcaatatgctttctgaacaatcacctcaacagtctattcccatggcgttttcacagctgttgcacactgctaaatcccaagaactatcttacactgtagaaggactgaaaccttataggatatatgagtttactattactctctgcaattcagttggttgtgtgaccagtgcttcgggagcaggacaaactttagcagcagcaccagcacaactgaggccacctctggttaaaggaatcaacagcacaacaatccatcttaggtggtttccacctgaagaactgaatggaccctctcctatatatcagctggaaaggagagagtcatctctaccagctctgatgaccacgatgatgaaaggaatccgtttcataggaaatgggtattgtaaatttcccagctccactcacccagtcaatacagacttcactggcattaaggccagctttcgaacaaaagtgcctgaaggtttgattgtctttgcagcatcacctggcaatcaggaagagtattttgcacttcagttgaagaagggacgtctttattttctttttgatcctcaggggtcaccagtggaagtaactacaactaatgatcatggcaaacaatatagtgatggaaaatggcatgaaataattgctattaggcatcaggcttttggccaaatcactctggatgggatatatacaggttcctctgccatcctgaatggtagtactgttattggagataacacaggagtctttctgggagggctcccgcgaagttataccatcctcaggaaggatcctgagataatccaaaaaggttttgtgggctgtctcaaggatgtacattttatgaagaattacaatccgtcagctatttgggaacctctggattggcagagttctgaagaacaaatcaacgtgtataacagctgggagggatgtcccgcttcattaaatgagggagctcagttcctaggagcagggttcctggaacttcatccatatatgtttcatggtggaatgaactttgagatttcctttaagttcagaactgaccaattaaatggattgcttcttttcgtttataacaaagatggacctgattttcttgctatggagctgaaaagtggaatattgaccttccggttaaataccagtcttgcctttacacaagtggatctattgctggggctatcctattgtaatggaaagtggaataaagtcattattaaaaaggaaggctctttcatatcagcaagtgtgaatggactgatgaagcatgcatcggagtccggagaccagccactggtggtgaattcaccagtttatgtgggaggaatcccacaggaactgctgaactcttatcaacatttgtgtttggaacaaggtttcggtggttgcatgaaggatgttaaatttacacggggtgctgtcgttaacttggcatctgtgtccagcggtgctgtcagagtcaatctggatggatgcctatcaactgacagtgctgttaactgcaggggaaatgactccatcctggtttaccagggaaaagagcagagtgtttacgagggtggtctccagccttttacagaatacctgtatcgagtgatagcctcgcatgaaggaggttcagtatatagtgattggagtcgaggacgtacaacaggagcagctccacaaagtgtgccaactccctcaagagtccgcagcttaaatggatacagcattgaggtgacctgggatgaacctgttgtcagaggtgtaattgagaagtacattctgaaagcctatagtgaggacagcacccgtccaccccgcatgccctctgccagtgctgaatttgtcaatacaagcaacctcacaggcatattgacaggcttgctacccttcaaaaactatgcagtaaccctaactgcttgcactttggctggctgtactgagagctcacatgcattgaacatctctactccacaagaagccccacaagaggttcagccaccagtagccaaatcccttcccagttctttgctgctctcctggaacccacccaaaaaggcaaatggtattataactcagtactgtttatacatggatgggaggctgatctattcaggcagtgaggagaactacatagtcacagatttagcagtatttacaccccaccagtttctactaagtgcatgcacacatgtgggctgtacaaacagttcctgggtcctactgtacacagcacagctgccaccagaacacgtggattccccagttctgactgtcctggattctagaactatacacatacagtggaaacaaccaagaaaaataagtgggattctggaacgctatgtattatatatgtcaaaccatacacatgattttacaatttggagtgtcatctataacagtacagaacttttccaggatcatatgctacaatacgttttacctggtaataaatatctcatcaagctgggagcttgcacaggtggtgggtgcacagtgagtgaggccagtgaggccctaactgacgaggacatacccgaaggcgtgccagcccccaaagcccactcatattcacctgactcctttaatgtctcctggactgagcctgaatatccgaatggtgttatcacgagttatggattatatctagatggtatattaatccacaattcctcagaactcagctatcgtgcttacggatttgctccttggagtttacattccttcagagtccaagcatgcacggccaaaggttgtgctctgggcccactggtggaaaatcgaactctagaagctcctcctgaaggaacagtaaatgtgtttgtcaaaacacagggatcccggaaagcccacgtgaggtgggaagcaccttttcgccctaatggactcttaacacactcagtccttttcactgggatattctatgtagacccagtaggtaataactacacccttctgaatgtcacaaaagtcatgtacagcggagaagagacaaacctttgggtgctcatcgatgggctggttccttttaccaactatactgtacaagtgaatatttcaaatagccaaggcagcttgataactgatcctataacaattgcaatgcctccaggagctccagatggcgtgctgcctcccaggctttcatctgccactccaaccagtcttcaggttgtctggtctacaccagctcgtaataacgctcctggctctcccagataccaactccagatgaggtctggcgactccacccatggatttctagagttattttccaatccttctgcatcgttaagctatgaagtgagtgatctccaaccgtacacagagtatatgtttcggttggttgcctccaatggatttggcagtgcacatagttcttggattccattcatgaccgcagaggacaaacctggacctgtagttcctccgattcttctggatgtgaagtcaagaatgatgttggtcacctggcagcatcctagaaaatccaatggggttattacccattataacatttatctacatggccgtctatacttgagaactcctggaaatgtcactaattgcacagtgatgcatttacacccatacactgcctataagtttcaggtagaagcctgcacttcaaaaggatgttccctttcaccagagtcccagactgtatggacactcccaggggcaccggaagggatcccaagtccagagctgttctctgatactccaacatctgtgattatatcttggcaaccccctacccaccccaatggcttggtggagaatttcacaattgagagaagagtcaaaggaaaggaagaagttactaccctggtgactctcccgaggagtcattccatgaggtttattgacaagacttctgctcttagcccatggacaaaatatgaatatcgggtactgatgagcactcttcatggaggcacaaacagcagtgcttgggtagaagttaccacaagaccctcacgacctgctggggtgcagccacctgtggtgacagtgctggaacccgatgcagtccaggtcacttggaaacccccactcatccagaacggagacatacttagctatgagattcacatgcctgaccctcacatcactttaaccaatgtgacttccgcagtgttaagtcaaaaagttactcatctgattcctttcactaattattctgtcaccattgttgcttgctcagggggtaatgggtaccttggagggtgcacagagagtttacctacctatgttaccactcaccccaccgtacctcagaatgttggcccattgtctgtgattccactaagtgaatcatatgttgtgatttcttggcaaccaccatccaagccaaatggacctaatttgagatatgagcttctgagacgtaaaatccagcagccacttgcatcaaatcccccagaagatttaaatcggtggcacaatatttattcaggaactcagtggctttatgaagataagggtcttagcaggtttacaacctatgaatatatgctcttcgtacacaacagtgtgggttttacaccgagccgagaagtgactgtgacaacgttagctggtcttccagagagaggagccaatctcactgcgagtgtccttaaccacacagccatcgacgtgaggtgggctaaaccaactgttcaagacctacaaggtgaagttgaatattacacacttttttggagttctgctacctcaaacgactctctaaaaatcttgccagatgtaaactctcatgtcattggccacctaaagccaaacacagagtattggatctttatctctgtcttcaatggagtccacagcatcaacagtgcaggacttcatgcaaccacttgcgatggggagcctcagggcatgcttcctccagaggttgtcatcatcaacagtacagctgtacgtgtcatctggacatctccttcaaacccaaatggtgttgtcactgagtattctatctatgtaaataataagctctacaagactggaatgaatgtgcctgggtcgtttattctgagagacctgtctcccttcactatctatgacattcaggttgaagtctgcacaatatatgcctgcgtgaaaagcaatggaacccaaattaccactgtggaagacactccaagtgatataccaacacccacaattcgtggcatcacttcaagatctcttcaaattgattgggtgtctccacggaagccaaatggcatcattcttggatatgatctcctatggaaaacatggtatccatgcgctaaaactcaaaagttagtgcaggatcagagtgatgagctctgcaaggcagtgaggtgtcaaaaacctgaatctatctgtggacacatttgctattcttctgaagctaaggtttgttgtaacggagtgctctataaccccaagcctggacatcgctgttgtgaagaaaagtatatcccgtttgttctgaattctactggagtttgttgtggtggccgaatacaggaggcacaaccaaatcatcagtgctgctctgggtattacgctagaattctaccaggtgaagtatgctgtccagatgaacagcacaatcgggtttctgttggcattggtgattcctgctgtggcagaatgccgtactccacctcaggaaaccagatttgctgtgctgggaggcttcatgatggccatggccagaagtgctgtggcagacagattgtgagcaacgatttagagtgttgtggtggagaagaaggagtggtgtacaatcgccttccaggtatgttctgttgtgggcaggattatgtgaatatgtcagataccatatgctgctcagcttccagtggagagtctaaagcacatattaaaaagaatgacccggtgccagtaaaatgctgtgagactgaacttattccaaagagccagaaatgctgtaatggagttggatataatcctttgaaatatgtttgctctgacaagatttcaactggaatgatgatgaaggaaaccaaagagtgcaggatcctctgcccagcatctatggaagccacagaacattgtggcaggtgtgacttcaactttaccagccacatttgcactgtgataagagggtctcacaattccacagggaaggcatcaattgaagaaatgtgttcatctgccgaagaaaccattcatacagggagtgtaaacacgtactcttacacagatgtgaacctcaagccctacatgacatatgagtacaggatttctgcctggaacagctatgggcgaggactcagcaaagctgtgagagccagaacaaaagaagatgtgcctcaaggagtgagtccccctacgtggaccaaaatagacaatcttgaagatacaattgtcttaaactggagaaaacctatacaatcaaatggtcctattatttactacatccttcttcgaaatggaattgaacgttttcggggaacatcactgagcttctctgataaagagggaattcaaccatttcaggaatattcatatcagctgaaagcttgcacggttgctggctgtgccaccagtagcaaggtagttgcagctactacccaaggagttccggagagcatcctgccaccaagcatcacagccctaagtgcagtggctctgcatctgagctggagtgtccctgagaaatcaaacggcgtcattaaagagtaccagatcaggcaggttgggaaaggtctcatccacactgacaccactgacaggagacagcatacggtcacaggtctccagccatacaccaactacagcttcactcttacagcttgtacatctgctgggtgcacttcaagcgagccttttctaggtcagacactgcaggcagctcctgaaggagtttgggtgacacctcgacacattatcatcaattctacaacagtggaattatattggagtctgccagaaaagcccaatggcctcgtttctcaatatcaattgagtcgtaatggaaacttgcttttcctgggtggcagtgaggagcagaatttcactgataaaaacctggagcccaatagcagatacacttacaagttagaagtcaaaactggaggtggcagcagtgctagtgatgattacattgttcaaacacctatgtcaacaccagaagaaatctatcctccatataatatcacagtaattgggccttattctatatttgtagcttggataccaccagggatcctcatccccgaaattcctgtggagtacaatgtcttactcaatgatggaagtgtaacacctctggccttctccgttggtcatcatcaatccacccttctggaaaatttgactccattcacacagtatgagataaggatacaagcatgtcaaaatggaagttgtggagttagcagtaggatgtttgtcaaaacacctgaagcagccccaatggatcttaattctcctgttcttaaggcactggggtcagcttgcatagagattaagtggatgccacctgaaaaaccaaatggaatcatcatcaactactttatttacagacgccctgctggcattgaagaggagtctgttttatttgtctggtcagaaggagcccttgaatttatggatgaaggagacaccctgaggcctttcacactctacgaatatcgggtcagagcctgtaactccaagggttcagtggagagtctgtggtcattaacacaaactctggaagctccacctcaagattttccagctccttgggctcaagccacgagtgctcattcagttctgttgaattggacaaagccagaatctcccaatggcattatctcccattaccgtgtggtctaccaggagagacccgacgatcctacatttaacagccctaccgtgcatgctttcacagtgaagggaacaagccatcaagcccacctgtacgggttagaaccattcacaacatatcgcattggtgttgtggctgcaaaccatgcaggagaaattttaagcccttggactctgattcaaaccttagaatcttccccaagtggactgagaaactttatagtagaacagaaagagaatggccgggcattgctactacagtggtcagaacctatgagaaccaatggtgtgattaagacatacaacatcttcagtgacgggttcctggagtactctggtttgaatcgtcagtttctcttccgccgcctggatcctttcactctctacacactgaccctggaggcctgcaccagagcaggttgtgcacactcggcgcctcagcctctgtggacagatgaagcccctccagactctcagctggctcctactgtccactctgtgaagtccaccagtgttgagctgagctggtctgagcctgttaacccaaatggaaaaataattcgctatgaagtgattcgcagatgcttcgagggaaaagcttggggaaatcagacaatccaggccgacgagaaaattgttttcacagaatataacactgaaaggaatacatttatgtataatgacacaggtttgcaaccatggacgcagtgtgaatataaaatctacacttggaattcagctgggcatacctgtagctcttggaatgtggtgaggacattgcaagcacctccagaaggtctctctccacctgtgatatcctatgtttctatgaatccccaaaaactgctgatttcctggatcccaccagaacagtctaatggtattatccagtcctataggcttcaaaggaatgaaatgctctatccttttagctttgatcctgtgactttcaattacactgatgaagagcttcttcctttttccacctatagctatgcactccaagcctgcacgagtggaggatgctccaccagcaaacccaccagcatcacaactctggaggctgctccatcagaagtcagccctccagatctttgggccgtcagtgccactcaaatgaatgtatgttggtcaccgcccacagtgcaaaatggaaagattactaaatatttagttagatatgataataaagagtcccttgctggccagggcctgtgcctgctggtttcccacctgcagccttactctcagtataacttctcccttgtagcctgcacgaatggaggttgcacagctagtgtgtcaaaatctgcctggacaatggaggccctgccagagaacatggactctccaacattgcaagtcacaggctcagaatcaatagaaatcacctggaaacctccaagaaacccaaatggccagatcagaagttatgaacttaggagggatggaaccattgtatatacaggcttggaaacacgctatcgtgattttactctcaccccaggtgtggagtatagctacacagtaactgccagcaacagccaagggggtattttgagtcctcttgtcaaagatcgaaccagcccctcagcaccctcagggatggaacctccaaaattgcaggccaggggtcctcaggagatcttagtgaactgggaccctccagtgagaacaaatggtgatatcatcaattataccctcttcatccgtgaactatttgaaagagaaactaaaatcatacacataaacacaactcataattcttttggtatgcagtcatatatagtaaaccagctgaagccatttcacaggtatgaaatacgaattcaagcgtgcaccaccctgggatgtgcatcaagtgactggacattcatacagacccctgagattgcacctttgatgcaaccccctccacatctggaggtacaaatggctccaggaggattccagccaactgtttctcttttgtggacaggaccgctgcagccaaatggaaaagttttgtattacgaattatacagaagacaaatagcaactcagcctagaaaatccaatccagtcctaatctataacggaagctcaacatcttttatagattccgaactattgcctttcacagagtatgagtatcaggtctgggcagtgaattctgcaggaaaagcccccagtagctggacatggtgcagaaccgggccagccccaccagaaggtctcagagcccccacgttccatgtgatctcttctacccaagcagtggtcaacatcagtgcccctgggaagcccaacgggatcgtcagtctctacaggctgttctccagcagcgcccatggggctgagacagtgctatccgaaggcatggccacccagcagactctccatggccttcaagccttcactaactactctattggagtagaggcctgcacctgcttcaactgttgcagcaaaggaccgacagctgaactgagaacccatcctgccccaccctcaggactgtcctctccacaaatcgggacgctggcctcaaggacggcctccttccggtggagtccccccatgttccccaatggtgtcattcacagctatgaactccaattccacgtggcttgccctcctgactcagccctcccctgtactcccagccaaatagaaacaaagtacacggggctggggcagaaagccagccttgggggtctccagccctacaccacatacaagctgagagtggtggcacacaacgaggtgggcagtacggcttccgagtggatcagtttcaccacccaaaaagaattgcctcagtaccgagccccattttcggtggacagcaatttgtctgtggtgtgtgtgaactggagtgacaccttcctcctgaacggccaactgaaggagtacgtgttaaccgacggagggcgacgcgtgtacagcggcttggacaccaccctctacataccgagaacggcggacaaaaccttctttttccaggtcatctgcacgactgacgaaggaagtgttaagacgccgttgatccaatatgatacctctactggacttggcttggtcctaacaactcctgggaaaaagaagggatcgcggagcaaaagcacagagttctacagcgagctgtggttcatagtgttaatggcgatgctgggcttgatcttgttggccatttttctgtccctgatactacaaagaaaaatccacaaagagccatatatcagagaaagacctcccttggtacctcttcagaagaggatgtctccattgaatgtttacccaccgggggaaaaccatatggggttagccgataccaaaattccccggtctgggacacctgtgagtatccgcagcaaccggagtgcatgtgtcctgcgcatcccgagtcaaaaccaaaccagcctaacctactcccagggttctcttcaccgcagcgtcagccagctcatggacattcaagacaagaaagtcttgatggacaactcactgtgggaagccatcatgggccacaacagtggactgtatgtggatgaagaggacctgatgaacgccatcaaggatttcagctcagtgactaaggaacgcaccacattcacagacacccacctgtaaaggatggaaacccagaagacgtaaccctggaatgcaaggtctgcacccatttcctcctgggttatcactcacacatcataaatgctgaaaagccattgtttattatcctataattctttaaagaaatgatgactgtttttgaaagtgttccttcctaatagaggtctaagaaatgatatttttctcatcttaaatgagagagaatattcatatgaaaatacttgatttgctcttattttgtagaagacaaagaagtatgtaattgtcacttggttctgtttggcagtgatgctcctggttaactgaataatcagtggcaatttcaagatggctcacagttgttagaagtagtaagttagttactggctcaaaaatgattctgttgaaaggatgtcactgctgttcatttctatctgccatttctgtcagggttgacacaatcctgcaagaatagttattctaatgatcacagctgctaaatgaatcccaaactttgcaccaggtcgacaaacttttctgaaggttctatttatttaccatacatagggttacttaccaaactttttgacaaggctgaaggttctatttatttacaatacatagggttactcaccaaactttttgacaaggcaacacataacttacacataaatgtctctgttcttgcatttatgaattttccaaaaatctaaggagtaaacagcttatttatacattttgaggagaaaacaaagtgtttcactaggaacacctctacttgaaccaatgtttttatttcatatattttatagttttgaaactagtttctcataaaattctgtcaattcactgaatatcagagaatactgacatcttcaacctagcacatttcaaatggaaactactgttctatttgcaatattaggctgcgtgaaattttaaaaggaaaaatgtatctgttccttctagcattaacatatatacatgtagagacaagactatacctatgtgtatatatatgtatatcatgtatatattactctgcactatatcccttctttttggagaactagccattattttagccacagaatcagtaagaacagatgatatgcaacagtaccaattacggttcaaaaatgtctgtcacctgctctagttggattacaaagtcattggtgaaagtcctatggcaagaaaaattttcttgcaaatcatccacataaaatcagatatttaaatttgttcttcatggaaaacagagtaagaaaacctcttgtcttccttcatccttaaaggtctttgtgaccccaggaaaatattgactctgtctaacacacaatagtcacaatactttttgtgaatctacaaccagagacaggcaaaaacttgtaaagtaagggatagtcttacttattctgcctgaaaacaatgtattaccccagggcccaacagtaaaagattgtggactttttgggtattgagatttcatctagctctgtgagagagcagctcctcagactgaccaactcctagacaaagtttgccaaccataagtgtcaaaagcacaggccagtattaagcagaagttctaccaccttattagaactgctataaacaaaagcatctgaaataattgtgcacatctggcagtgactgtagaaaatacgaaatatatatttctcgccaagtttttatactttctgaaatgaaaacataggattgactagtttactggtttttattcccatatgccgattctgggacaataaagttgtttaaagctggcacaaataagcattaaccaaggctgtgtccaccttctgtgagctacttaaggtatataggaaaggagtggtcacaaacttgcatcctaatccttggtggactcttctaagaatacagtttgctagtcacaaagaatagtctacaaatatgctttgctaggttcagaagattgagtttatcctgatttttgaaaaattaaccaggtatctttatcactgtgtatttttccaagcacagtataaaattttaacaacgcacaaaaaaatacagaactgcaggggattttatcttggatcattatccatttaatcatctaattagacatgaactcagttagctgaatcatttacattttgactccatagcttagggcagacagaagcctgtatggcttctgcccagaactctgtcccctgctacatgtctaagtttacttgtatttatttcagagaagaactctaagatgttgctttgctactttaagtggtattgcgtgccaagcctctattatacaaaccatgcagactcgcctctagagattctgattcggttgatctggggtgtgtggctgaggcatcagtactttttaaagcttccaggtgttctaatgttgagacccactgatgttccacaatctggaagaaatcatgtacaggaataatatgctatgcacagggactatgctccttggctcaccccttctcccttataaacaatgagcagttcttgatgaacctctttaaatttaaatctcctgactcacattttaccaattgtacatgccacattctcagcttacgaactaccatgttttgttattcttaatatcaactgtttggtaagagtacagttgtttttatacactctaagaaatgtgtttataatctactgtaatttccactaaatggaacccaaatattaatgttatggtaccatatactgatgtaaaaatcatgctggcatccatgaacacaccggtaaataaaacatagtccaagtggaagaattcattaataaggaacttttaattatgtcacaaatgaatagttggtttccaatgcacaaatatcatgtaaactaatctaaagatggtttgcttaataaatatttgaatgtgacc

SEQ ID NO: 33972 - DNA, 6320 bp, Homo sapiens
  source 1..6320: mol_type = unassigned DNA
tgtttgctctgcagaatactttacctgggcacccaagtcttccttccagcattcctgctgctacagcctatttgctgagtaaccaggggttacagcagcgttgccaggcaacgagggacagcggtcctgttgaagagccatttgtcacactgaggggactggttgaaatgcaataaagaaatgataccagcagctactcatgtcttcgccattgctaagaacgtcgttggtattaccttactctgagaacgtgtctgcagtttccagaaaatggagtatcgcaacatcacttaaagtaccctgcttcaaagtattgctggcaagtggcgtgggcctgattatttatttagaaatgctttatcaggaggagaatgcttttttgtaaacatgaattgcccagttctttcattgggctctggcttcttgtttcaggtcattgaaatgttgatctttgcctattttgcttcaatatccttgactgagtcacgaggtcttttcccaaggctggagaacgtgggagctttcaagaaagtttccatcgtgccaacccaagcagtatgtggactcccagaccgaagcactttttgtcacagctctgctgctgctgaaagtattcagttctgtacccagcggttttgtattcaggattgcccatacagatcttcacaccctacctacactgcccttttctcagcaggcctcagtagctgcatcacaccagacaagaatgatctgcatcctaacgcccatagcaattctgcaagttttatttttggaaatcacaagagctgcttttcttctcctccttctccaaagctgatggcatcatttaccttagctgtatggctgaaacctgagcaacaaggtgtaatgtgtgttatagaaaagacagtagatgggcagattgtgttcaaacttacaatatctgagaaagagaccatgttttattatcgcacagtaaatggtttgcaacctccaataaaagtaatgacactggggagaattcttgtgaagaaatggattcatcttagtgtgcaggtgcatcagacaaaaatcagcttctttatcaatggcgtggagaaggatcatacacctttcaatgcaagaactctaagtggttcaattacagattttgcatctggtactgtgcaaataggacagagtttaaatggtttagagcagtttgtcggaagaatgcaagattttcgattataccaagtggcacttacaaacagagagattctggaagtcttctctggagatcttctcagattgcatgcccaatcacattgccgttgccctggcagccacccgcgggtccaccctttggcacagcggtactgcattcctaatgatgcaggagacacagctgataatagagtgtcacggttgaatcctgaagcccatcctctctcttttgtcaatgataatgatgttggtacttcatgggtttcaaatgtgtttacaaacattacacagcttaatcaaggagtgactatttcagttgatttggaaaatggacagtatcaggtgttttatattatcattcagttctttagtccacaaccaacggaaataaggattcaaaggaagaaggaaaatagtttagattgggaggactggcaatattttgccaggaattgtggtgcttttggaatgaaaaacaatggagatttggaaaaacctgattctgtcaactgtcttcagctttccaattttactccatattcccgtggcaatgtcacatttagcatcctgacacctggaccaaattatcgtcctggatacaataacttctataataccccatctcttcaagagttcgtaaaagccacgcaaataaggtttcattttcatgggcagtactatacaactgagactgctgttaacctcagacacagatattatgcagtggacgaaatcaccattagtgggagatgtcagtgccatggtcatgccgataactgcgacacaacaagccagccatatagatgcctctgctcccaggagagcttcactgaaggacttcattgtgatcgctgcttgcctctttataatgacaagcctttccgccaaggtgatcaagtttacgctttcaattgtaaaccttgtcaatgcaacagccattccaaaagctgccattacaacatctctgtagacccatttccttttgagcacttcagagggggaggaggagtttgtgatgattgtgagcataacactacaggaaggaactgtgagctgtgcaaggattactttttccgacaagttggtgcagatccttcggccatagatgtttgcaaaccctgtgactgtgatacagttggcactagaaatggtagcattctttgtgatcagattggaggacagtgtaattgtaagagacacgtgtctggcaggcagtgcaatcagtgccagaatggattctacaatctacaagagttggatcctgatggctgcagtccctgtaactgcaatacctctgggacagtggatggagatattacctgtcaccaaaattcaggccagtgcaagtgcaaagcaaacgttattgggcttaggtgtgatcattgcaattttggatttaaatttctccgaagctttaatgatgttggatgtgagccctgccagtgtaacctccatggctcagtgaacaaattctgcaatcctcactctgggcagtgtgagtgcaaaaaagaagccaaaggacttcagtgtgacacctgcagagaaaacttttatgggttagatgtcaccaattgtaaggcctgtgactgtgacacagctggatccctccctgggactgtctgtaatgctaagacagggcagtgcatctgcaagcccaatgttgaagggagacagtgcaataaatgtttggagggaaacttctacctacggcaaaataattctttcctctgtctgccttgcaactgtgataagactgggacaataaatggctctctgctgtgtaacaaatcaacaggacaatgtccttgcaaattaggggtaacaggtcttcgctgtaatcagtgtgagcctcacaggtacaatttgaccattgacaattttcaacactgccagatgtgtgagtgtgattccttggggacattacctgggaccatttgtgacccaatcagtggccagtgcctgtgtgtgcctaatcgtcaaggaagaaggtgtaatcagtgtcaaccaggtttttatatttctccaggcaatgccactggctgcctgccatgctcatgccatacaactggtgcagttaatcacatctgtaatagcctgactggtcagtgtgtttgccaagatgcttccattgctgggcaacgttgtgaccaatgcaaagaccattactttggatttgatcctcagactggaagatgtcagccttgtaattgtcatctctcaggagccttgaatgaaacctgtcacttggtcacaggccagtgtttctgtaaacaatttgtcactggctcaaagtgtgatgcttgtgttcccagtgcaagccacttggatgtcaacaatctattgggttgcagcaaaactccattccagcaacctccgcccagaggacaagttcaaagttcttctgctatcaatctctcctggagtccacctgattctccaaatgcccactggcttacttacagtttactcagggatggttttgaaatctacacaacagaggatcaatacccatacagtattcaatacttcttagacacagacctgttaccatataccaaatattcctattacattgagaccaccaatgtgcatggttcaacaaggagtgtagctgtcacttacaagacaaaaccaggggtcccagagggaaacttgactttaagttatatcattcctattggctcagactctgtgacacttacctggacaacactctcaaatcaatctggtcccatagagaaatatattttgtcctgtgcccctttggctggtggtcagccatgtgtttcctacgaaggtcatgaaacctcagctaccatctggaatctggttccatttgccaagtacgatttttctgtacaggcgtgtactagcgggggctgtttacacagcttgcccattacagtgaccacagcccaggcccctccccaaagactaagtccacctaagatgcagaaaatcagttctacagaacttcatgtagaatggtctccaccagcggaactaaatggaataattataagatatgaactatacatgagaagactgagatctactaaagaaaccacatctgaggaaagtcgagtttttcagagcagtggttggctcagtcctcattcatttgtagaatcggccaatgaaaatgcattaaaacctcctcaaacaatgacaaccatcactggcttggagccatacaccaagtatgagttcagagtcttagctgtgaatatggctggaagtgtgtcttctgcctgggtctcagaaagaacgggagaatcagcacctgtattcatgatccctccttcagtctttcccctctcttcgtactctctcaatatctcctgggagaagccagcagataatgttacaagaggaaaagttgtggggtatgacatcaatatgctttctgaacaatcacctcaacagtctattcccatggcgttttcacagctgttgcacactgctaaatcccaagaactatcttacactgtagaaggactgaaaccttataggatatatgagtttactattactctctgcaattcagttggttgtgtgaccagtgcttcgggagcaggacaaactttagcagcagcaccagcacaactgaggccacctctggttaaaggaatcaacagcacaacaatccatcttaggtggtttccacctgaagaactgaatggaccctctcctatatatcagctggaaaggagagagtcatctctaccagctctgatgaccacgatgatgaaaggaatccgtttcataggaaatgggtattgtaaatttcccagctccactcacccagtcaatacagacttcactggtaagtgtgtttgacattgctttatttaggagacacgaagctccaaaatgttttctatattttcatatccctttacaatgaatttttattatacctacttagagaaatactaattcagccctttgatagcttttgcctgattgtttcagcatgtccatctttttagaattctggggaaaaaagtcaggtaagtgaaggaaaggaaaaataaaagatgaagatgaagaagcagccttattggatcaaagtatgtgctttgtatttgtctttttgtgaagtatgtgccaggacatgtttcttgaaatattattcactgtgttctctgagcaaatgagtttgcaaaatgccctcatgctattggagattctcagtatgcaccccgttactgaaactccaaaaagcattgtaagaaagctattcaactttgcttagctaatcatgcctaacagatatttgatgtaatgttttctttttctttctcttgctgtttccttcttctttttttcactgtgacaacttaatatctcatgttctatgaagaacattgtggggaaaactaatcccagggaaaagataacttctctaagccaggactatggtaaagcaagtgaggctcttgtttcggtcacaaaatttaaaggcactaaaaaactcagtgttaatgtaaattttaatgcaatatttttaaaaatgaaaatcaatgtgaaagcactataaaaatattatcaaaagcttaaataaagacagattgaactctgtaccagcacaatcctgcctcactggccttaccctcctcctggccttactagtaccgcaatattttggaagtcccatgacctctgtgacttacagcttctaatagcatgatttcaatatagctgtaaaaaaactctacttatggtacaccatttttccaatttttaaaaaaatttacaaagtataagatatatattattatgtaaactcataaagatgttcatttaatcatccatgagaaagtcattttggagcaaatagctagtctttaaaatattgcatatgtgaagacaatgaaatggaattcgagctataaaaatttgtattgttttatttttacttaaaatagtaaatagtttgcttttcattgagactggctgctgatgcaccttggtaatgaatcatgattatattctaactgagatatattgagattaatgcatgattaactactctctcagtacatcaaaatcattgcagagtattagaaattgaaccattgagctaaaaatgctcaacttctgctttatattcttaaaatggcaaaaaa

SEQ ID NO: 33973 - DNA, 18955 bp, Homo sapiens
  source 1..18955: mol_type = unassigned DNA
tgtttgctctgcagaatactttacctgggcacccaagtcttccttccagcattcctgctgctacagcctatttgctgagtaaccaggggttacagcagcgttgccaggcaacgagggacagcggtcctgttgaagagccatttgtcacactgaggggactggttgaaatgcaataaagaaatgataccagcagctactcatgtcttcgccattgctaagaacgtcgttggtattaccttactctgagaacgtgtctgcagtttccagaaaatggagtatcgcaacatcacttaaagtaccctgcttcaaagtattgctggcaagtggcgtgggcctgattatttatttagaaatgctttatcaggaggagaatgcttttttgtaaacatgaattgcccagttctttcattgggctctggcttcttgtttcaggtcattgaaatgttgatctttgcctattttgcttcaatatccttgactgagtcacgaggtcttttcccaaggctggagaacgtgggagctttcaagaaagtttccatcgtgccaacccaagcagtatgtggactcccagaccgaagcactttttgtcacagctctgctgctgctgaaagtattcagttctgtacccagcggttttgtattcaggattgcccatacagatcttcacaccctacctacactgcccttttctcagcaggcctcagtagctgcatcacaccagacaagaatgatctgcatcctaacgcccatagcaattctgcaagttttatttttggaaatcacaagagctgcttttcttctcctccttctccaaagctgatggcatcatttaccttagctgtatggctgaaacctgagcaacaaggtgtaatgtgtgttatagaaaagacagtagatgggcagattgtgttcaaacttacaatatctgagaaagagaccatgttttattatcgcacagtaaatggtttgcaacctccaataaaagtaatgacactggggagaattcttgtgaagaaatggattcatcttagtgtgcaggtgcatcagacaaaaatcagcttctttatcaatggcgtggagaaggatcatacacctttcaatgcaagaactctaagtggttcaattacagattttgcatctggtactgtgcaaataggacagagtttaaatggtttagagcagtttgtcggaagaatgcaagattttcgattataccaagtggcacttacaaacagagagattctggaagtcttctctggagatcttctcagattgcatgcccaatcacattgccgttgccctggcagccacccgcgggtccaccctttggcacagcggtactgcattcctaatgatgcaggagacacagctgataatagagtgtcacggttgaatcctgaagcccatcctctctcttttgtcaatgataatgatgttggtacttcatgggtttcaaatgtgtttacaaacattacacagcttaatcaaggagtgactatttcagttgatttggaaaatggacagtatcaggtgttttatattatcattcagttctttagtccacaaccaacggaaataaggattcaaaggaagaaggaaaatagtttagattgggaggactggcaatattttgccaggaattgtggtgcttttggaatgaaaaacaatggagatttggaaaaacctgattctgtcaactgtcttcagctttccaattttactccatattcccgtggcaatgtcacatttagcatcctgacacctggaccaaattatcgtcctggatacaataacttctataataccccatctcttcaagagttcgtaaaagccacgcaaataaggtttcattttcatgggcagtactatacaactgagactgctgttaacctcagacacagatattatgcagtggacgaaatcaccattagtgggagatgtcagtgccatggtcatgccgataactgcgacacaacaagccagccatatagatgcctctgctcccaggagagcttcactgaaggacttcattgtgatcgctgcttgcctctttataatgacaagcctttccgccaaggtgatcaagtttacgctttcaattgtaaaccttgtcaatgcaacagccattccaaaagctgccattacaacatctctgtagacccatttccttttgagcacttcagagggggaggaggagtttgtgatgattgtgagcataacactacaggaaggaactgtgagctgtgcaaggattactttttccgacaagttggtgcagatccttcggccatagatgtttgcaaaccctgtgactgtgatacagttggcactagaaatggtagcattctttgtgatcagattggaggacagtgtaattgtaagagacacgtgtctggcaggcagtgcaatcagtgccagaatggattctacaatctacaagagttggatcctgatggctgcagtccctgtaactgcaatacctctgggacagtggatggagatattacctgtcaccaaaattcaggccagtgcaagtgcaaagcaaacgttattgggcttaggtgtgatcattgcaattttggatttaaatttctccgaagctttaatgatgttggatgtgagccctgccagtgtaacctccatggctcagtgaacaaattctgcaatcctcactctgggcagtgtgagtgcaaaaaagaagccaaaggacttcagtgtgacacctgcagagaaaacttttatgggttagatgtcaccaattgtaaggcctgtgactgtgacacagctggatccctccctgggactgtctgtaatgctaagacagggcagtgcatctgcaagcccaatgttgaagggagacagtgcaataaatgtttggagggaaacttctacctacggcaaaataattctttcctctgtctgccttgcaactgtgataagactgggacaataaatggctctctgctgtgtaacaaatcaacaggacaatgtccttgcaaattaggggtaacaggtcttcgctgtaatcagtgtgagcctcacaggtacaatttgaccattgacaattttcaacactgccagatgtgtgagtgtgattccttggggacattacctgggaccatttgtgacccaatcagtggccagtgcctgtgtgtgcctaatcgtcaaggaagaaggtgtaatcagtgtcaaccaggtttttatatttctccaggcaatgccactggctgcctgccatgctcatgccatacaactggtgcagttaatcacatctgtaatagcctgactggtcagtgtgtttgccaagatgcttccattgctgggcaacgttgtgaccaatgcaaagaccattactttggatttgatcctcagactggaagatgtcagccttgtaattgtcatctctcaggagccttgaatgaaacctgtcacttggtcacaggccagtgtttctgtaaacaatttgtcactggctcaaagtgtgatgcttgtgttcccagtgcaagccacttggatgtcaacaatctattgggttgcagcaaaactccattccagcaacctccgcccagaggacaagttcaaagttcttctgctatcaatctctcctggagtccacctgattctccaaatgcccactggcttacttacagtttactcagggatggttttgaaatctacacaacagaggatcaatacccatacagtattcaatacttcttagacacagacctgttaccatataccaaatattcctattacattgagaccaccaatgtgcatggttcaacaaggagtgtagctgtcacttacaagacaaaaccaggggtcccagagggaaacttgactttaagttatatcattcctattggctcagactctgtgacacttacctggacaacactctcaaatcaatctggtcccatagagaaatatattttgtcctgtgcccctttggctggtggtcagccatgtgtttcctacgaaggtcatgaaacctcagctaccatctggaatctggttccatttgccaagtacgatttttctgtacaggcgtgtactagcgggggctgtttacacagcttgcccattacagtgaccacagcccaggcccctccccaaagactaagtccacctaagatgcagaaaatcagttctacagaacttcatgtagaatggtctccaccagcggaactaaatggaataattataagatatgaactatacatgagaagactgagatctactaaagaaaccacatctgaggaaagtcgagtttttcagagcagtggttggctcagtcctcattcatttgtagaatcggccaatgaaaatgcattaaaacctcctcaaacaatgacaaccatcactggcttggagccatacaccaagtatgagttcagagtcttagctgtgaatatggctggaagtgtgtcttctgcctgggtctcagaaagaacgggagaatcagcacctgtattcatgatccctccttcagtctttcccctctcttcgtactctctcaatatctcctgggagaagccagcagataatgttacaagaggaaaagttgtggggtatgacatcaatatgctttctgaacaatcacctcaacagtctattcccatggcgttttcacagctgttgcacactgctaaatcccaagaactatcttacactgtagaaggactgaaaccttataggatatatgagtttactattactctctgcaattcagttggttgtgtgaccagtgcttcgggagcaggacaaactttagcagcagcaccagcacaactgaggccacctctggttaaaggaatcaacagcacaacaatccatcttaggtggtttccacctgaagaactgaatggaccctctcctatatatcagctggaaaggagagagtcatctctaccagctctgatgaccacgatgatgaaaggaatccgtttcataggaaatgggtattgtaaatttcccagctccactcacccagtcaatacagacttcactggcattaaggccagctttcgaacaaaagtgcctgaaggtttgattgtctttgcagcatcacctggcaatcaggaagagtattttgcacttcagttgaagaagggacgtctttattttctttttgatcctcaggggtcaccagtggaagtaactacaactaatgatcatggcaaacaatatagtgatggaaaatggcatgaaataattgctattaggcatcaggcttttggccaaatcactctggatgggatatatacaggttcctctgccatcctgaatggtagtactgttattggagataacacaggagtctttctgggagggctcccgcgaagttataccatcctcaggaaggatcctgagataatccaaaaaggttttgtgggctgtctcaaggatgtacattttatgaagaattacaatccgtcagctatttgggaacctctggattggcagagttctgaagaacaaatcaacgtgtataacagctgggagggatgtcccgcttcattaaatgagggagctcagttcctaggagcagggttcctggaacttcatccatatatgtttcatggtggaatgaactttgagatttcctttaagttcagaactgaccaattaaatggattgcttcttttcgtttataacaaagatggacctgattttcttgctatggagctgaaaagtggaatattgaccttccggttaaataccagtcttgcctttacacaagtggatctattgctggggctatcctattgtaatggaaagtggaataaagtcattattaaaaaggaaggctctttcatatcagcaagtgtgaatggactgatgaagcatgcatcggagtccggagaccagccactggtggtgaattcaccagtttatgtgggaggaatcccacaggaactgctgaactcttatcaacatttgtgtttggaacaaggtttcggtggttgcatgaaggatgttaaatttacacggggtgctgtcgttaacttggcatctgtgtccagcggtgctgtcagagtcaatctggatggatgcctatcaactgacagtgctgttaactgcaggggaaatgactccatcctggtttaccagggaaaagagcagagtgtttacgagggtggtctccagccttttacagaatacctgtatcgagtgatagcctcgcatgaaggaggttcagtatatagtgattggagtcgaggacgtacaacaggagcagctccacaaagtgtgccaactccctcaagagtccgcagcttaaatggatacagcattgaggtgacctgggatgaacctgttgtcagaggtgtaattgagaagtacattctgaaagcctatagtgaggacagcacccgtccaccccgcatgccctctgccagtgctgaatttgtcaatacaagcaacctcacaggcatattgacaggcttgctacccttcaaaaactatgcagtaaccctaactgcttgcactttggctggctgtactgagagctcacatgcattgaacatctctactccacaagaagccccacaagaggttcagccaccagtagccaaatcccttcccagttctttgctgctctcctggaacccacccaaaaaggcaaatggtattataactcagtactgtttatacatggatgggaggctgatctattcaggcagtgaggagaactacatagtcacagatttagcagtatttacaccccaccagtttctactaagtgcatgcacacatgtgggctgtacaaacagttcctgggtcctactgtacacagcacagctgccaccagaacacgtggattccccagttctgactgtcctggattctagaactatacacatacagtggaaacaaccaagaaaaataagtgggattctggaacgctatgtattatatatgtcaaaccatacacatgattttacaatttggagtgtcatctataacagtacagaacttttccaggatcatatgctacaatacgttttacctggtaataaatatctcatcaagctgggagcttgcacaggtggtgggtgcacagtgagtgaggccagtgaggccctaactgacgaggacatacccgaaggcgtgccagcccccaaagcccactcatattcacctgactcctttaatgtctcctggactgagcctgaatatccgaatggtgttatcacgagttatggattatatctagatggtatattaatccacaattcctcagaactcagctatcgtgcttacggatttgctccttggagtttacattccttcagagtccaagcatgcacggccaaaggttgtgctctgggcccactggtggaaaatcgaactctagaagctcctcctgaaggaacagtaaatgtgtttgtcaaaacacagggatcccggaaagcccacgtgaggtgggaagcaccttttcgccctaatggactcttaacacactcagtccttttcactgggatattctatgtagacccagtaggtaataactacacccttctgaatgtcacaaaagtcatgtacagcggagaagagacaaacctttgggtgctcatcgatgggctggttccttttaccaactatactgtacaagtgaatatttcaaatagccaaggcagcttgataactgatcctataacaattgcaatgcctccaggagctccagatggcgtgctgcctcccaggctttcatctgccactccaaccagtcttcaggttgtctggtctacaccagctcgtaataacgctcctggctctcccagataccaactccagatgaggtctggcgactccacccatggatttctagagttattttccaatccttctgcatcgttaagctatgaagtgagtgatctccaaccgtacacagagtatatgtttcggttggttgcctccaatggatttggcagtgcacatagttcttggattccattcatgaccgcagaggacaaacctggacctgtagttcctccgattcttctggatgtgaagtcaagaatgatgttggtcacctggcagcatcctagaaaatccaatggggttattacccattataacatttatctacatggccgtctatacttgagaactcctggaaatgtcactaattgcacagtgatgcatttacacccatacactgcctataagtttcaggtagaagcctgcacttcaaaaggatgttccctttcaccagagtcccagactgtatggacactcccaggggcaccggaagggatcccaagtccagagctgttctctgatactccaacatctgtgattatatcttggcaaccccctacccaccccaatggcttggtggagaatttcacaattgagagaagagtcaaaggaaaggaagaagttactaccctggtgactctcccgaggagtcattccatgaggtttattgacaagacttctgctcttagcccatggacaaaatatgaatatcgggtactgatgagcactcttcatggaggcacaaacagcagtgcttgggtagaagttaccacaagaccctcacgacctgctggggtgcagccacctgtggtgacagtgctggaacccgatgcagtccaggtcacttggaaacccccactcatccagaacggagacatacttagctatgagattcacatgcctgaccctcacatcactttaaccaatgtgacttccgcagtgttaagtcaaaaagttactcatctgattcctttcactaattattctgtcaccattgttgcttgctcagggggtaatgggtaccttggagggtgcacagagagtttacctacctatgttaccactcaccccaccgtacctcagaatgttggcccattgtctgtgattccactaagtgaatcatatgttgtgatttcttggcaaccaccatccaagccaaatggacctaatttgagatatgagcttctgagacgtaaaatccagcagccacttgcatcaaatcccccagaagatttaaatcggtggcacaatatttattcaggaactcagtggctttatgaagataagggtcttagcaggtttacaacctatgaatatatgctcttcgtacacaacagtgtgggttttacaccgagccgagaagtgactgtgacaacgttagctggtcttccagagagaggagccaatctcactgcgagtgtccttaaccacacagccatcgacgtgaggtgggctaaaccaactgttcaagacctacaaggtgaagttgaatattacacacttttttggagttctgctacctcaaacgactctctaaaaatcttgccagatgtaaactctcatgtcattggccacctaaagccaaacacagagtattggatctttatctctgtcttcaatggagtccacagcatcaacagtgcaggacttcatgcaaccacttgcgatggggagcctcagggcatgcttcctccagaggttgtcatcatcaacagtacagctgtacgtgtcatctggacatctccttcaaacccaaatggtgttgtcactgagtattctatctatgtaaataataagctctacaagactggaatgaatgtgcctgggtcgtttattctgagagacctgtctcccttcactatctatgacattcaggttgaagtctgcacaatatatgcctgcgtgaaaagcaatggaacccaaattaccactgtggaagacactccaagtgatataccaacacccacaattcgtggcatcacttcaagatctcttcaaattgattgggtgtctccacggaagccaaatggcatcattcttggatatgatctcctatggaaaacatggtatccatgcgctaaaactcaaaagttagtgcaggatcagagtgatgagctctgcaaggcagtgaggtgtcaaaaacctgaatctatctgtggacacatttgctattcttctgaagctaaggtttgttgtaacggagtgctctataaccccaagcctggacatcgctgttgtgaagaaaagtatatcccgtttgttctgaattctactggagtttgttgtggtggccgaatacaggaggcacaaccaaatcatcagtgctgctctgggtattacgctagaattctaccaggtgaggtatgctgtccagatgaacagcacaatcgggtttctgttggcattggtgattcctgctgtggcagaatgccgtactccacctcaggaaaccagatttgctgtgctgggaggcttcatgatggccatggccagaagtgctgtggcagacagattgtgagcaacgatttagagtgttgtggtggagaagaaggagtggtgtacaatcgccttccaggtatgttctgttgtgggcaggattatgtgaatatgtcagataccatatgctgctcagcttccagtggagagtctaaagcacatattaaaaagaatgacccggtgccagtaaaatgctgtgagactgaacttattccaaagagccagaaatgctgtaatggagttggatataatcctttgaaatatgtttgctctgacaagatttcaactggaatgatgatgaaggaaaccaaagagtgcaggatcctctgcccagcatctatggaagccacagaacattgtggcaggtgtgacttcaactttaccagccacatttgcactgtgataagagggtctcacaattccacagggaaggcatcaattgaagaaatgtgttcatctgccgaagaaaccattcatacagggagtgtaaacacgtactcttacacagatgtgaacctcaagccctacatgacatatgagtacaggatttctgcctggaacagctatgggcgaggactcagcaaagctgtgagagccagaacaaaagaagatgtgcctcaaggagtgagtccccctacgtggaccaaaatagacaatcttgaagatacaattgtcttaaactggagaaaacctatacaatcaaatggtcctattatttactacatccttcttcgaaatggaattgaacgttttcggggaacatcactgagcttctctgataaagagggaattcaaccatttcaggaatattcatatcagctgaaagcttgcacggttgctggctgtgccaccagtagcaaggtagttgcagctactacccaaggagttccggagagcatcctgccaccaagcatcacagccctaagtgcagtggctctgcatctgagctggagtgtccctgagaaatcaaacggcgtcattaaagagtaccagatcaggcaggttgggaaaggtctcatccacactgacaccactgacaggagacagcatacggtcacaggtctccagccatacaccaactacagcttcactcttacagcttgtacatctgctgggtgcacttcaagcgagccttttctaggtcagacactgcaggcagctcctgaaggagtttgggtgacacctcgacacattatcatcaattctacaacagtggaattatattggagtctgccagaaaagcccaatggcctcgtttctcaatatcaattgagtcgtaatggaaacttgcttttcctgggtggcagtgaggagcagaatttcactgataaaaacctggagcccaatagcagatacacttacaagttagaagtcaaaactggaggtggcagcagtgctagtgatgattacattgttcaaacacctatgtcaacaccagaagaaatctatcctccatataatatcacagtaattgggccttattctatatttgtagcttggataccaccagggatcctcatccccgaaattcctgtggagtacaatgtcttactcaatgatggaagtgtaacacctctggccttctccgttggtcatcatcaatccacccttctggaaaatttgactccattcacacagtatgagataaggatacaagcatgtcaaaatggaagttgtggagttagcagtaggatgtttgtcaaaacacctgaagcagccccaatggatcttaattctcctgttcttaaggcactggggtcagcttgcatagagattaagtggatgccacctgaaaaaccaaatggaatcatcatcaactactttatttacagacgccctgctggcattgaagaggagtctgttttatttgtctggtcagaaggagcccttgaatttatggatgaaggagacaccctgaggcctttcacactctacgaatatcgggtcagagcctgtaactccaagggttcagtggagagtctgtggtcattaacacaaactctggaagctccacctcaagattttccagctccttgggctcaagccacgagtgctcattcagttctgttgaattggacaaagccagaatctcccaatggcattatctcccattaccgtgtggtctaccaggagagacccgacgatcctacatttaacagccctaccgtgcatgctttcacagtgaagggaacaagccatcaagcccacctgtacgggttagaaccattcacaacatatcgcattggtgttgtggctgcaaaccatgcaggagaaattttaagcccttggactctgattcaaaccttagaatcttccccaagtggactgagaaactttatagtagaacagaaagagaatggccgggcattgctactacagtggtcagaacctatgagaaccaatggtgtgattaagacatacaacatcttcagtgacgggttcctggagtactctggtttgaatcgtcagtttctcttccgccgcctggatcctttcactctctacacactgaccctggaggcctgcaccagagcaggttgtgcacactcggcgcctcagcctctgtggacagatgaagcccctccagactctcagctggctcctactgtccactctgtgaagtccaccagtgttgagctgagctggtctgagcctgttaacccaaatggaaaaataattcgctatgaagtgattcgcagatgcttcgagggaaaagcttggggaaatcagacaatccaggccgacgagaaaattgttttcacagaatataacactgaaaggaatacatttatgtataatgacacaggtttgcaaccatggacgcagtgtgaatataaaatctacacttggaattcagctgggcatacctgtagctcttggaatgtggtgaggacattgcaagcacctccagaaggtctctctccacctgtgatatcctatgtttctatgaatccccaaaaactgctgatttcctggatcccaccagaacagtctaatggtattatccagtcctataggcttcaaaggaatgaaatgctctatccttttagctttgatcctgtgactttcaattacactgatgaagagcttcttcctttttccacctatagctatgcactccaagcctgcacgagtggaggatgctccaccagcaaacccaccagcatcacaactctggaggctgctccatcagaagtcagccctccagatctttgggccgtcagtgccactcaaatgaatgtatgttggtcaccgcccacagtgcaaaatggaaagattactaaatatttagttagatatgataataaagagtcccttgctggccagggcctgtgcctgctggtttcccacctgcagccttactctcagtataacttctcccttgtagcctgcacgaatggaggttgcacagctagtgtgtcaaaatctgcctggacaatggaggccctgccagagaacatggactctccaacattgcaagtcacaggctcagaatcaatagaaatcacctggaaacctccaagaaacccaaatggccagatcagaagttatgaacttaggagggatggaaccattgtatatacaggcttggaaacacgctatcgtgattttactctcaccccaggtgtggagtatagctacacagtaactgccagcaacagccaagggggtattttgagtcctcttgtcaaagatcgaaccagcccctcagcaccctcagggatggaacctccaaaattgcaggccaggggtcctcaggagatcttagtgaactgggaccctccagtgagaacaaatggtgatatcatcaattataccctcttcatccgtgaactatttgaaagagaaactaaaatcatacacataaacacaactcataattcttttggtatgcagtcatatatagtaaaccagctgaagccatttcacaggtatgaaatacgaattcaagcgtgcaccaccctgggatgtgcatcaagtgactggacattcatacagacccctgagattgcacctttgatgcaaccccctccacatctggaggtacaaatggctccaggaggattccagccaactgtttctcttttgtggacaggaccgctgcagccaaatggaaaagttttgtattacgaattatacagaagacaaatagcaactcagcctagaaaatccaatccagtcctaatctataacggaagctcaacatcttttatagattccgaactattgcctttcacagagtatgagtatcaggtctgggcagtgaattctgcaggaaaagcccccagtagctggacatggtgcagaaccgggccagccccaccagaaggtctcagagcccccacgttccatgtgatctcttctacccaagcagtggtcaacatcagtgcccctgggaagcccaacgggatcgtcagtctctacaggctgttctccagcagcgcccatggggctgagacagtgctatccgaaggcatggccacccagcagactctccatggccttcaagccttcactaactactctattggagtagaggcctgcacctgcttcaactgttgcagcaaaggaccgacagctgaactgagaacccatcctgccccaccctcaggactgtcctctccacaaatcgggacgctggcctcaaggacggcctccttccggtggagtccccccatgttccccaatggtgtcattcacagctatgaactccaattccacgtggcttgccctcctgactcagccctcccctgtactcccagccaaatagaaacaaagtacacggggctggggcagaaagccagccttgggggtctccagccctacaccacatacaagctgagagtggtggcacacaacgaggtgggcagtacggcttccgagtggatcagtttcaccacccaaaaagaattgcctcagtaccgagccccattttcggtggacagcaatttgtctgtggtgtgtgtgaactggagtgacaccttcctcctgaacggccaactgaaggagtacgtgttaaccgacggagggcgacgcgtgtacagcggcttggacaccaccctctacataccgagaacggcggacaaaaccttctttttccaggtcatctgcacgactgacgaaggaagtgttaagacgccgttgatccaatatgatacctctactggacttggcttggtcctaacaactcctgggaaaaagaagggatcgcggagcaaaagcacagagttctacagcgagctgtggttcatagtgttaatggcgatgctgggcttgatcttgttggccatttttctgtccctgatactacaaagaaaaatccacaaagagccatatatcagagaaagacctcccttggtacctcttcagaagaggatgtctccattgaatgtttacccaccgggggaaaaccatatgtttgactctgtggctgatatatctgatgtgtcaagcaatgtcaccctaaaaagttacaccatgcactttgaggggttagccgataccaaaattccccggtctgggacacctgtgagtatccgcagcaaccggagtgcatgtgtcctgcgcatcccgagtcaaaaccaaaccagcctaacctactcccagggttctcttcaccgcagcgtcagccagctcatggacattcaagacaagaaagtcttgatggacaactcactgtgggaagccatcatgggccacaacagtggactgtatgtggatgaagaggacctgatgaacgccatcaaggatttcagctcagtgactaaggaacgcaccacattcacagacacccacctgtaaaggatggaaacccagaagacgtaaccctggaatgcaaggtctgcacccatttcctcctgggttatcactcacacatcataaatgctgaaaagccattgtttattatcctataattctttaaagaaatgatgactgtttttgaaagtgttccttcctaatagaggtctaagaaatgatatttttctcatcttaaatgagagagaatattcatatgaaaatacttgatttgctcttattttgtagaagacaaagaagtatgtaattgtcacttggttctgtttggcagtgatgctcctggttaactgaataatcagtggcaatttcaagatggctcacagttgttagaagtagtaagttagttactggctcaaaaatgattctgttgaaaggatgtcactgctgttcatttctatctgccatttctgtcagggttgacacaatcctgcaagaatagttattctaatgatcacagctgctaaatgaatcccaaactttgcaccaggtcgacaaacttttctgaaggttctatttatttaccatacatagggttacttaccaaactttttgacaaggctgaaggttctatttatttacaatacatagggttactcaccaaactttttgacaaggcaacacataacttacacataaatgtctctgttcttgcatttatgaattttccaaaaatctaaggagtaaacagcttatttatacattttgaggagaaaacaaagtgtttcactaggaacacctctacttgaaccaatgtttttatttcatatattttatagttttgaaactagtttctcataaaattctgtcaattcactgaatatcagagaatactgacatcttcaacctagcacatttcaaatggaaactactgttctatttgcaatattaggctgcgtgaaattttaaaaggaaaaatgtatctgttccttctagcattaacatatatacatgtagagacaagactatacctatgtgtatatatatgtatatcatgtatatattactctgcactatatcccttctttttggagaactagccattattttagccacagaatcagtaagaacagatgatatgcaacagtaccaattacggttcaaaaatgtctgtcacctgctctagttggattacaaagtcattggtgaaagtcctatggcaagaaaaattttcttgcaaatcatccacataaaatcagatatttaaatttgttcttcatggaaaacagagtaagaaaacctcttgtcttccttcatccttaaaggtctttgtgaccccaggaaaatattgactctgtctaacacacaatagtcacaatactttttgtgaatctacaaccagagacaggcaaaaacttgtaaagtaagggatagtcttacttattctgcctgaaaacaatgtattaccccagggcccaacagtaaaagattgtggactttttgggtattgagatttcatctagctctgtgagagagcagctcctcagactgaccaactcctagacaaagtttgccaaccataagtgtcaaaagcacaggccagtattaagcagaagttctaccaccttattagaactgctataaacaaaagcatctgaaataattgtgcacatctggcagtgactgtagaaaatacgaaatatatatttctcgccaagtttttatactttctgaaatgaaaacataggattgactagtttactggtttttattcccatatgccgattctgggacaataaagttgtttaaagctggcacaaataagcattaaccaaggctgtgtccaccttctgtgagctacttaaggtatataggaaaggagtggtcacaaacttgcatcctaatccttggtggactcttctaagaatacagtttgctagtcacaaagaatagtctacaaatatgctttgctaggttcagaagattgagtttatcctgatttttgaaaaattaaccaggtatctttatcactgtgtatttttccaagcacagtataaaattttaacaacgcacaaaaaaatacagaactgcaggggattttatcttggatcattatccatttaatcatctaattagacatgaactcagttagctgaatcatttacattttgactccatagcttagggcagacagaagcctgtatggcttctgcccagaactctgtcccctgctacatgtctaagtttacttgtatttatttcagagaagaactctaagatgttgctttgctactttaagtggtattgcgtgccaagcctctattatacaaaccatgcagactcgcctctagagattctgattcggttgatctggggtgtgtggctgaggcatcagtactttttaaagcttccaggtgttctaatgttgagacccactgatgttccacaatctggaagaaatcatgtacaggaataatatgctatgcacagggactatgctccttggctcaccccttctcccttataaacaatgagcagttcttgatgaacctctttaaatttaaatctcctgactcacattttaccaattgtacatgccacattctcagcttacgaactaccatgttttgttattcttaatatcaactgtttggtaagagtacagttgtttttatacactctaagaaatgtgtttataatctactgtaatttccactaaatggaacccaaatattaatgttatggtaccatatactgatgtaaaaatcatgctggcatccatgaacacaccggtaaataaaacatagtccaagtggaagaattcattaataaggaacttttaattatgtcacaaatgaatagttggtttccaatgcacaaatatcatgtaaactaatctaaagatggtttgcttaataaatatttgaatgtgacc

SEQ ID NO: 33974 - DNA, 4512 bp, Homo sapiens
  source 1..4512: mol_type = unassigned DNA
actataaaataataatgaaatcttggaatagataagttactctatgaggactgaagctgttgttaattcccaaggccagactgattatctcacaaaggattcagaccaggatgtagcactcaaacttgcccaggagcgagctgaaatagttgctaaatatgacagaggacgagaaggtgcagagattgaaccttgggaagatgctgattaccttgtttacaaagtcacagatagatttggctttttacatgaggaggagctcccagatcataatgtggctgtggaacggcaaaagcacctggaaattgaaagaactaccaaatggctgaaaatgctgaaaggatgggaaaaatacaagaacactgaaaagtttcataggcgaatttacaaaggaataccactccagctcagaggtgaagtctgggccctccttcttgagatccctaaaatgaaagaagaaacaagggacctgtatagtaaattaaaacacagagcacggggctgttcacctgacatcagacaaatagacctggatgtcaaccgcacatttcgggaccacattatgtttagagacagatatggtgttaagcaacaatccttattccatgtgcttgctgcctattctatttataacacggaagtcgggtattgtcaggggatgagccagatcacagctttactcctcatgtatatgaacgaggaagatgccttctgggccctggtcaaactcttctcaggccctaaacatgccatgcatggcttttttgtccaaggttttcctaaactcttgaggtttcaagaacatcatgaaaaaatactgaacaaatttctgtccaagcttaagcaacacttggattctcaagaaatctacacaagtttttacacaatgaaatggttttttcagtgtttccttgatcgtactccctttacactaaacctcagaatatgggatatctacatctttgaaggagaacgagttcttactgctatgtcttacaccatcttaaaattacacaaaaaacatctaatgaaattgtccatggaagaacttgtagaattttttcaggagaccctggcaaaggattttttctttgaagatgattttgtgatagagcaacttcagatttctatgacagaactaaagcgggcaaagttagaccttccagaacctggtaaagaggatgaatatccaaagaagcccttggggcagcttccacctgaacttcagtcttggggcgtccatcacttgagcaacggacagaggagcgtgggccggccgagcccgctggccagcggcaggagggagagcggggcgccccacaggaggcacgagcactccccgcacccccagagcaggaccgggacgcccgagagagcacagccgccaagacggaaatcggtggaggaggagagcaaaaagcttaaagatgaggcagattttcaaagaaaactcccatcgggtccacaggacagttccaggcaatataatcacgcagctgccaaccaaaatagcaacgccacttcaaatatcaggaaggagtttgtgcccaaatggaataaaccgtcagacgtctcagctacagagagaactgccaaatacaccatggaaggcaaaggtcgagcagcgcaccccgcgctcgcagttaccgtcccaggtcctgccgaggtgcgggtgtcaaacgtgcggccaaagatgaaggccctggatgctgaggacgggaagcggggctccactgcatcgcagtacgacaacgtgccaggcccggagctggacagcggcgcttccgtggaggaggcgctggaaagggcttactcccagagcccccggcatgccctttaccctcctagcccgagaaagcacgctgagccaagttctagtccatcaaaagtatccaacaagtttacttttaaagtacagcctccaagtcatgcacgatatccgtcccagctagatggggaagcccgagggctagctcatcccccctcctacagcaatccccccgtttaccacggaaactctcccaaacacttccctactgccaacagcagctttgcttctccacagtttagccctgggactcaactgaatccttccaggagacctcatggttctactctttccgtcagtgcttctccggagaaatcttacagccgcccaagcccccttgtactgccgtctagtcgaatagaagtcctccctgttgacactggtgctgggggatattcgggcaattcagggtcaccaaagaatggaaaattgatcattccaccagtggattacttgccagataacagaacatggtcagaagttagttatacatacagacctgagacgcagggacaatcatggacccgagatgctagccgtggcaatttaccaaaatactcagcctttcaactcgcaccctttcaggaccatggcctccctgcagtttctgtagatagtcccgtgagatataaagcttcaccggccgcagaagatgccagtccatctggatatccatattcagggcccccgcctccagcctaccactacaggaatcgggacgggctttccatccaagagtcagtgttgctgtgagatttgacgtgtacttgctaaagacgagagagaaaccacgtgaaacctacattgctatgttcataattgccaaagcagtatttatactattgtaaacaactcgcacatctctcctgtctgttagtagtaagaatacagggaaatgtcttcagccccacgtagatgctgcttaagatgagcgtttcaattgcatcatcactgacctgttagaatttaacccggaaacatcgcaatagcatttagggatgcacgcacagtggtaatttattactcagttccggttatgtttttctccaaaacctgaacatttttactctgttggctcattctattttgactaatgttacaaagtactgaaaaaactgtagaatagatatttttaaggctatatgtagtgtatgtgtcttttaatagatataggcatctgttcatccacatttgaacacagagctaaagaaacgttttttaaaaaactacttttaatccagatccatggaataatatgtaattcttgttttccttgtcttttagtccagtttttctttttccctctcatatatttgtaacctgggtcctaaactgactgaagagtttgtcctgactttattaattgcagtctcacagaatgctcatcattctccttcagctgttgccattttctttcaatctgaaaattaaagacattggagagaaaggctaaccacttaatggtgcttaaaaatcggggcacttaaaataagtttacggccaaaggtgcagcagtgcttatcacatccacatactaagagattggtcttagtgcgtttgtgccctttgttctggtctgactcttgcgaatctcagagcaggagaagttgcagcttactgatccctcagtgctcacagtactcatgtggggcagccacactaactgcattagcagtgtggttacttctttcttctgcctcgactcacatggcttctccccacgaaggtcccagggtggccatttatacaatccatttctgtcctctttatggaatgtagtcgacggatattgctgcacctcatcaggccattacattgtccatgttaaaattataaaaatgatcctagtttttcataggagtctaggattttgatcttttaaaaaatacagtgtgatttcatgcttttgaacatctttttttcattgaaacaaattcaagttcttggcttaaaaaaaaattagtgatgtctttaaaaaatattctgttacactacagataccaaaacactgacaaagatttaggcactccaagagagtatgacttcgtgtttaattggggagcttgttttcaacattgcttatatttgaatagtagaaaacccgacattgatgtttcttcctgttgcaaggtggggctttaaactttcaaggtacaaaagtatgtcttttaaaatggaagtaacgtttgtttagctagtgaatgtgacaatatattttatgtatataatgagtctaatgtaattttgatcaacttggtaatgatgttattaaatagcaaaacaagtgcagtgtattaaagctaaacactacattgaaacgcaaacaaaattctggtgaaataactgggctgttgatgcaggtcaggtggaagctgagaaataaatgtatataaatatgtagctgaggatattaattcccattatataaccataattctgtgacttgtaataaaccaagctgtacaatttagtttataatagcagtatctgagctgctccaaaatatatatatcaacagtggtaaatactgtagatttttatatatatatatatatatatatatatatatgcaaaaaatatatatatacacacaagcactattttcttatgtcatttatgacattttttatctgtatacttttttgatgtgattgttttttaacatgctaaaagtaataagtata

SEQ ID NO: 33975 - DNA, 4811 bp, Homo sapiens
  source 1..4811: mol_type = unassigned DNA
cggccgctgcggtgacggttggcggcggccggtgaggcgggcggggccggaggcgcggaggcggggtcccgggcgagccgccctgggaggcgggggccgtttccatagcggcggcaggaggtgtcgcgccggggaacttcctggttcccgggctcggcttcgccgggatcctcttggaagggaaacaatggggcggagggcactgcggtagccgccgccgccgccgcgccgcgccgcgccggatctgctcggccgcccgggaccgccagctctgtccgctgcccacagcctagcagtcgggaccgtactgaggacatgtattcctctgagaaaccttggacagcagattttggtttaatatctgattgggacaacattcagacccatttccagtcatgaattcagaccaggatgtagcactcaaacttgcccaggagcgagctgaaatagttgctaaatatgacagaggacgagaaggtgcagagattgaaccttgggaagatgctgattaccttgtttacaaagtcacagatagatttggctttttacatgaggaggagctcccagatcataatgtggctgtggaacggcaaaagcacctggaaattgaaagaactaccaaatggctgaaaatgctgaaaggatgggaaaaatacaagaacactgaaaagtttcataggcgaatttacaaaggaataccactccagctcagaggtgaagtctgggccctccttcttgagatccctaaaatgaaagaagaaacaagggacctgtatagtaaattaaaacacagagcacggggctgttcacctgacatcagacaaatagacctggatgtcaaccgcacatttcgggaccacattatgtttagagacagatatggtgttaagcaacaatccttattccatgtgcttgctgcctattctatttataacacggaagtcgggtattgtcaggggatgagccagatcacagctttactcctcatgtatatgaacgaggaagatgccttctgggccctggtcaaactcttctcaggccctaaacatgccatgcatggcttttttgtccaaggttttcctaaactcttgaggtttcaagaacatcatgaaaaaatactgaacaaatttctgtccaagcttaagcaacacttggattctcaagaaatctacacaagtttttacacaatgaaatggttttttcagtgtttccttgatcgtactccctttacactaaacctcagaatatgggatatctacatctttgaaggagaacgagttcttactgctatgtcttacaccatcttaaaattacacaaaaaacatctaatgaaattgtccatggaagaacttgtagaattttttcaggagaccctggcaaaggattttttctttgaagatgattttgtgatagagcaacttcagatttctatgacagaactaaagcgggcaaagttagaccttccagaacctggtaaagaggatgaatatccaaagaagcccttggggcagcttccacctgaacttcagtcttggggcgtccatcacttgagcaacggacagaggagcgtgggccggccgagcccgctggccagcggcaggagggagagcggggcgccccacaggaggcacgagcactccccgcacccccagagcaggaccgggacgcccgagagagcacagccgccaagacggaaatcggtggaggaggagagcaaaaagcttaaagatgaggcagattttcaaagaaaactcccatcgggtccacaggacagttccaggcaatataatcacgcagctgccaaccaaaatagcaacgccacttcaaatatcaggaaggagtttgtgcccaaatggaataaaccgtcagacgtctcagctacagagagaactgccaaatacaccatggaaggcaaaggtcgagcagcgcaccccgcgctcgcagttaccgtcccaggtcctgccgaggtgcgggtgtcaaacgtgcggccaaagatgaaggccctggatgctgaggacgggaagcggggctccactgcatcgcagtacgacaacgtgccaggcccggagctggacagcggcgcttccgtggaggaggcgctggaaagggcttactcccagagcccccggcatgccctttaccctcctagcccgagaaagcacgctgagccaagttctagtccatcaaaagtatccaacaagtttacttttaaagtacagcctccaagtcatgcacgatatccgtcccagctagatggggaagcccgagggctagctcatcccccctcctacagcaatccccccgtttaccacggaaactctcccaaacacttccctactgccaacagcagctttgcttctccacagtttagccctgggactcaactgaatccttccaggagacctcatggttctactctttccgtcagtgcttctccggagaaatcttacagccgcccaagcccccttgtactgccgtctagtcgaatagaagtcctccctgttgacactggtgctgggggatattcgggcaattcagggtcaccaaagaatggaaaattgatcattccaccagtggattacttgccagataacagaacatggtcagaagttagttatacatacagacctgagacgcagggacaatcatggacccgagatgctagccgtggcaatttaccaaaatactcagcctttcaactcgcaccctttcaggaccatggcctccctgcagtttctgtagatagtcccgtgagatataaagcttcaccggccgcagaagatgccagtccatctggatatccatattcagggcccccgcctccagcctaccactacaggaatcgggacgggctttccatccaagagtcagtgttgctgtgagatttgacgtgtacttgctaaagacgagagagaaaccacgtgaaacctacattgctatgttcataattgccaaagcagtatttatactattgtaaacaactcgcacatctctcctgtctgttagtagtaagaatacagggaaatgtcttcagccccacgtagatgctgcttaagatgagcgtttcaattgcatcatcactgacctgttagaatttaacccggaaacatcgcaatagcatttagggatgcacgcacagtggtaatttattactcagttccggttatgtttttctccaaaacctgaacatttttactctgttggctcattctattttgactaatgttacaaagtactgaaaaaactgtagaatagatatttttaaggctatatgtagtgtatgtgtcttttaatagatataggcatctgttcatccacatttgaacacagagctaaagaaacgttttttaaaaaactacttttaatccagatccatggaataatatgtaattcttgttttccttgtcttttagtccagtttttctttttccctctcatatatttgtaacctgggtcctaaactgactgaagagtttgtcctgactttattaattgcagtctcacagaatgctcatcattctccttcagctgttgccattttctttcaatctgaaaattaaagacattggagagaaaggctaaccacttaatggtgcttaaaaatcggggcacttaaaataagtttacggccaaaggtgcagcagtgcttatcacatccacatactaagagattggtcttagtgcgtttgtgccctttgttctggtctgactcttgcgaatctcagagcaggagaagttgcagcttactgatccctcagtgctcacagtactcatgtggggcagccacactaactgcattagcagtgtggttacttctttcttctgcctcgactcacatggcttctccccacgaaggtcccagggtggccatttatacaatccatttctgtcctctttatggaatgtagtcgacggatattgctgcacctcatcaggccattacattgtccatgttaaaattataaaaatgatcctagtttttcataggagtctaggattttgatcttttaaaaaatacagtgtgatttcatgcttttgaacatctttttttcattgaaacaaattcaagttcttggcttaaaaaaaaattagtgatgtctttaaaaaatattctgttacactacagataccaaaacactgacaaagatttaggcactccaagagagtatgacttcgtgtttaattggggagcttgttttcaacattgcttatatttgaatagtagaaaacccgacattgatgtttcttcctgttgcaaggtggggctttaaactttcaaggtacaaaagtatgtcttttaaaatggaagtaacgtttgtttagctagtgaatgtgacaatatattttatgtatataatgagtctaatgtaattttgatcaacttggtaatgatgttattaaatagcaaaacaagtgcagtgtattaaagctaaacactacattgaaacgcaaacaaaattctggtgaaataactgggctgttgatgcaggtcaggtggaagctgagaaataaatgtatataaatatgtagctgaggatattaattcccattatataaccataattctgtgacttgtaataaaccaagctgtacaatttagtttataatagcagtatctgagctgctccaaaatatatatatcaacagtggtaaatactgtagatttttatatatatatatatatatatatatatatatgcaaaaaatatatatatacacacaagcactattttcttatgtcatttatgacattttttatctgtatacttttttgatgtgattgttttttaacatgctaaaagtaataagta

SEQ ID NO: 33976 - DNA, 4739 bp, Homo sapiens
  source 1..4739: mol_type = unassigned DNA
gagccgccctgggaggcgggggccgtttccatagcggcggcaggaggtgtcgcgccggggaacttcctggttcccgggctcggcttcgccgggatcctcttggaagggaaacaatggggcggagggcactgcggtagccgccgccgccgccgcgccgcgccgcgccggatctgctcggccgcccgggaccgccagctctgtccgctgcccacagcctagcagtcgggaccgtactgaggacatgtattcctctgagaaaccttggacagcagattttggtttaatatctgattgggacaacattcagacccatttccagtcatgaattcagaccaggatgtagcactcaaacttgcccaggagcgagctgaaatagttgctaaatatgacagaggacgagaaggtgcagagattgaaccttgggaagatgctgattaccttgtttacaaagtcacagatagatttggctttttacatgaggaggagctcccagatcataatgtggctgtggaacggcaaaagcacctggaaattgaaagaactaccaaatggctgaaaatgctgaaaggatgggaaaaatacaagaacactgaaaagtttcataggcgaatttacaaaggaataccactccagctcagaggtgaagtctgggccctccttcttgagatccctaaaatgaaagaagaaacaagggacctgtatagtaaattaaaacacagagcacggggctgttcacctgacatcagacaaatagacctggatgtcaaccgcacatttcgggaccacattatgtttagagacagatatggtgttaagcaacaatccttattccatgtgcttgctgcctattctatttataacacggaagtcgggtattgtcaggggatgagccagatcacagctttactcctcatgtatatgaacgaggaagatgccttctgggccctggtcaaactcttctcaggccctaaacatgccatgcatggcttttttgtccaaggttttcctaaactcttgaggtttcaagaacatcatgaaaaaatactgaacaaatttctgtccaagcttaagcaacacttggattctcaagaaatctacacaagtttttacacaatgaaatggttttttcagtgtttccttgatcgtactccctttacactaaacctcagaatatgggatatctacatctttgaaggagaacgagttcttactgctatgtcttacaccatcttaaaattacacaaaaaacatctaatgaaattgtccatggaagaacttgtagaattttttcaggagaccctggcaaaggattttttctttgaagatgattttgtgatagagcaacttcagatttctatgacagaactaaagcgggcaaagttagaccttccagaacctggtaaagaggatgaatatccaaagaagcccttggggcagcttccacctgaacttcagtcttggggcgtccatcacttgagcaacggacagaggagcgtgggccggccgagcccgctggccagcggcaggagggagagcggggcgccccacaggaggcacgagcactccccgcacccccagagcaggaccgggacgcccgagagagcacagccgccaagacggaaatcggtggaggaggagagcaaaaagcttaaagatgaggcagattttcaaagaaaactcccatcgggtccacaggacagttccaggcaatataatcacgcagctgccaaccaaaatagcaacgccacttcaaatatcaggaaggagtttgtgcccaaatggaataaaccgtcagacgtctcagctacagagagaactgccaaatacaccatggaaggcaaaggtcgagcagcgcaccccgcgctcgcagttaccgtcccaggtcctgccgaggtgcgggtgtcaaacgtgcggccaaagatgaaggccctggatgctgaggacgggaagcggggctccactgcatcgcagtacgacaacgtgccaggcccggagctggacagcggcgcttccgtggaggaggcgctggaaagggcttactcccagagcccccggcatgccctttaccctcctagcccgagaaagcacgctgagccaagttctagtccatcaaaagtatccaacaagtttacttttaaagtacagcctccaagtcatgcacgatatccgtcccagctagatggggaagcccgagggctagctcatcccccctcctacagcaatccccccgtttaccacggaaactctcccaaacacttccctactgccaacagcagctttgcttctccacagtttagccctgggactcaactgaatccttccaggagacctcatggttctactctttccgtcagtgcttctccggagaaatcttacagccgcccaagcccccttgtactgccgtctagtcgaatagaagtcctccctgttgacactggtgctgggggatattcgggcaattcagggtcaccaaagaatggaaaattgatcattccaccagtggattacttgccagataacagaacatggtcagaagttagttatacatacagacctgagacgcagggacaatcatggacccgagatgctagccgtggcaatttaccaaaatactcagcctttcaactcgcaccctttcaggaccatggcctccctgcagtttctgtagatagtcccgtgagatataaagcttcaccggccgcagaagatgccagtccatctggatatccatattcagggcccccgcctccagcctaccactacaggaatcgggacgggctttccatccaagagtcagtgttgctgtgagatttgacgtgtacttgctaaagacgagagagaaaccacgtgaaacctacattgctatgttcataattgccaaagcagtatttatactattgtaaacaactcgcacatctctcctgtctgttagtagtaagaatacagggaaatgtcttcagccccacgtagatgctgcttaagatgagcgtttcaattgcatcatcactgacctgttagaatttaacccggaaacatcgcaatagcatttagggatgcacgcacagtggtaatttattactcagttccggttatgtttttctccaaaacctgaacatttttactctgttggctcattctattttgactaatgttacaaagtactgaaaaaactgtagaatagatatttttaaggctatatgtagtgtatgtgtcttttaatagatataggcatctgttcatccacatttgaacacagagctaaagaaacgttttttaaaaaactacttttaatccagatccatggaataatatgtaattcttgttttccttgtcttttagtccagtttttctttttccctctcatatatttgtaacctgggtcctaaactgactgaagagtttgtcctgactttattaattgcagtctcacagaatgctcatcattctccttcagctgttgccattttctttcaatctgaaaattaaagacattggagagaaaggctaaccacttaatggtgcttaaaaatcggggcacttaaaataagtttacggccaaaggtgcagcagtgcttatcacatccacatactaagagattggtcttagtgcgtttgtgccctttgttctggtctgactcttgcgaatctcagagcaggagaagttgcagcttactgatccctcagtgctcacagtactcatgtggggcagccacactaactgcattagcagtgtggttacttctttcttctgcctcgactcacatggcttctccccacgaaggtcccagggtggccatttatacaatccatttctgtcctctttatggaatgtagtcgacggatattgctgcacctcatcaggccattacattgtccatgttaaaattataaaaatgatcctagtttttcataggagtctaggattttgatcttttaaaaaatacagtgtgatttcatgcttttgaacatctttttttcattgaaacaaattcaagttcttggcttaaaaaaaaattagtgatgtctttaaaaaatattctgttacactacagataccaaaacactgacaaagatttaggcactccaagagagtatgacttcgtgtttaattggggagcttgttttcaacattgcttatatttgaatagtagaaaacccgacattgatgtttcttcctgttgcaaggtggggctttaaactttcaaggtacaaaagtatgtcttttaaaatggaagtaacgtttgtttagctagtgaatgtgacaatatattttatgtatataatgagtctaatgtaattttgatcaacttggtaatgatgttattaaatagcaaaacaagtgcagtgtattaaagctaaacactacattgaaacgcaaacaaaattctggtgaaataactgggctgttgatgcaggtcaggtggaagctgagaaataaatgtatataaatatgtagctgaggatattaattcccattatataaccataattctgtgacttgtaataaaccaagctgtacaatttagtttataatagcagtatctgagctgctccaaaatatatatatcaacagtggtaaatactgtagatttttatatatatatatatatatatatatatatatgcaaaaaatatatatatacacacaagcactattttcttatgtcatttatgacattttttatctgtatacttttttgatgtgattgttttttaacatgctaaaagtaataagtata

SEQ ID NO: 33977 - DNA, 2019 bp, Homo sapiens
  source 1..2019: mol_type = unassigned DNA
tggcggcagaggcagtgcggatccggcgttctccactgatcttttccaaggctgtacagacatggcggcggcttttcggaaggcggctaagtcccggcagcgggaacacagagagcgaagccagcctggctttcgaaaacatctgggcctgctggagaaaaagaaagattacaaacttcgtgcagatgactaccgtaaaaaacaagaatacctcaaagctcttcggaagaaggctcttgaaaaaaatccagatgaattctactacaaaatgactcgggttaaactccaggatggagtacatattattaaggagactaaggaagaagtaaccccagaacaactaaagctgatgagaactcaggacgtcaaatatatagaaatgaagagggttgcagaagctaagaaaatcgaaagactaaaatcagagctccatctgctggatttccaggggaagcaacagaacaagcatgtgttcttttttgacaccaaaaaggaagttgaacagtttgatgtcgcaactcacctgcaaacagccccggagctagtcgacagagtctttaataggcccaggatagagaccttgcagaaagaaaaagtgaaaggagttaccaatcagactggacttaagcgaatagctaaagaaaggcaaaagcagtataactgcctgacacagcggattgaacgagagaagaaattgttcgttattgctcagaaaattcaaacacgcaaagatcttatggataaaactcagaaagtgaaggtgaagaaagaaacggtgaactccccagctatttataaatttcagagtcgtcgaaaacgttgacgtgttatagataagccttgtcattctgtatcaaaaatctgttgtcgttttctagtaacttcaaattccattactccaaatggcatggttttccggtttgtaaccataactaaattgtcagtctgacatttaatgtctttctatggacaacattaaatctccctcccttctgtaattgtttttggattgtgaaattagtcttatttttatatacttaattttttttttctttgagatagggtctttgttgccaggctggaagtgcagtgtgtgattatggctcactgcaactttgaactcctgggctcaagtgatcttcctgcatcagcctcttgagtagctgggaccacagacatgtgccaccatgtctgagtaatgtttaaattttctgtagagaccaggttttgccatgttggccaggctggttttgaactcgtggcctcaagcgatcctcccaccttggcctcccaaagggctgggattacagggatgagccactatgcccagcccataattttttttgttatgaaacataggatctcattacagcagatttggaaagtagattaattcattcctaatcccagtgcttattcaataataacaaatatttattgcatgcttaactgtgctaggagctagagctgtggaggtggacaattactgtgagtagtctagttgatttcctccattttgtaaaacgaggcatcactttttgtccatgtttttgtgttttatagttacagtaaacaatttgatgtcctactttttttttttttttttttgagacggagtctcgctctgtcgcccaggccggactgcggactgcagtggcgcaatctcggctcactgcaagctccgcttcccgggttcacgccattctcctgcctcagcctcccgagtagctgggactacaggcgcccgccaccgcgcctggctaatttttttttgtatttttttagtagagacggggtttcaccttgttagccaggatggtctcgatctcctgacctcatgatccacccgcctcggcctcccaaagtgctgggattacaggcgtgagccaccgcgcccggccgatgtcctactttttaattaaatcattagctctttcccagtttgttacatcacaaaagttttttacagtaatatatgctagagtaaacgttaaaataaatattatttttaatgattgc

SEQ ID NO: 33978 - DNA, 875 bp, Homo sapiens
  source 1..875: mol_type = unassigned DNA
gatcttttccaaggctgtacagacatggcggcggcttttcggaaggcggctaagtcccggcagcgggaacacagagagcgaagccagcctggctttcgaaaacatctgggcctgctggagaaaaagaaagattacaaacttcgtgcagatgactaccgtaaaaaacaagaatacctcaaagctcttcggaagaaggctcttgaaaaaaatccagatgaattctactacaaaatgactcgggttaaactccaggatggagtacatattattaaggagactaaggaagaagtaaccccagaacaactaaagctgatgagaactcaggacgtcaaatatatagaaatgaagagggttgcagaagctaagaaaatcgaaagactaaaatcagagctccatctgctggatttccaggggaagcaacagaacaagcatgtgttcttttttgacaccaaaaaggaagcgaatagctaaagaaaggcaaaagcagtataactgcctgacacagcggattgaacgagagaagaaattgttcgttattgctcagaaaattcaaacacgcaaagatcttatggataaaactcagaaagtgaaggtgaagaaagaaacggtgaactccccagctatttataaatttcagagtcgtcgaaaacgttgacgtgttatagataagccttgtcattctgtatcaaaaatctgttgtcgttttctagtaacttcaaattccattactccaaatggcatggttttccggtttgtaaccataactaaattgtcagtctgacatttaatgtctttctatggacaacattaaatctccctcccttctgtaattgtttttggattgtgaaattagtcttatttttatatacttaatt

SEQ ID NO: 33979 - DNA, 1894 bp, Homo sapiens
  source 1..1894: mol_type = unassigned DNA
gggcgcatgcgcagcgaggttccacgtgagcgcctgcgtttctcctcaaacctaacgatgccgccggagcggaggagacgaatgaaactggaccggagaaccggagcgaagccgaagcggaagcccggaatgaggccggactggaaagccggagcggggccaggcgggcctccccaaaagcctgccccttcatcccagcggaaaccgccggcccggccgagcgcggcggccgctgcgattgcagtcgcggcggcggaggaagagagacggctccggcagcggaaccgcctgaggctggaggaggacaaaccggccgtggagcggtgcttggaggagctggtcttcggcgacgtcgagaacgacgaggacgcgttgctgcggcgtctgcgaggcccgagggttcaagaacatgaagactcgggtgactcagaagtggagaatgaagcaaaaggtaattttccacctcaaaagaagccagtttgggtggatgaagaagatgaagatgaggaaatggttgacatgatgaacaatcggtttcggaaggatatgatgaaaaatgctagtgaaagtaaactttcgaaagacaaccttaaaaagagacttaaagaagaattccaacatgccatgggaggagtacctgcctgggcagagactactaagcggaaaacatcttcagatgatgaaagtgaagaggatgaagatgatttgttgcaaaggactgggaatttcatatccacatcaacttctcttccaagaggaatcttgaagatgaagaactgccagcatgcgaatgctgaacgtcctactgttgctcggatctcatctgtgcagttccatcccggtgcacagattgtgatggttgctggattagataatgctgtatcactatttcaggttgatgggaaaacaaatcctaaaattcagagcatctatttggaaaggtttccaatctttaaggcttgttttagtgctaatggggaagaagttttagccacgagtacccacagcaaggttctttatgtctatgacatgctggctggaaagttaattcctgtgcatcaagtgagaggtttgaaagagaagatagtgaggagctttgaagtctccccagatgggtccttcttgctcataaatggcattgctggatatttgcatttgctagcaatgaagaccaaagaactgattggaagcatgaaaattaatggaagggttgcagcatccacattctcttcagatagtaagaaagtatacgcctcttcgggggatggagaagtttatgtttgggatgtgaactcaaggaagtgccttaacagatttgttgatgaaggcagtttatatggattaagcattgccacatctaggaatggacagtatgttgcttgtggttctaattgtggagtggtaaatatatacaatcaagattcttgtctccaagaaacaaacccaaagccaataaaagctataatgaacttggttacaggtgttacttctctgaccttcaatcctactacagaaatcttggcaattgcttcagaaaaaatgaaagaagcagtcagattggttcatcttccttcctgtacagtattttcaaacttcccagtcattaaaaataagaatatttctcatgttcataccatggatttttctccgagaagtggatactttgccttggggaatgaaaagggcaaggccctgatgtataggttgcaccattactcagacttctaaagagactatttgaagtccagttgagtcacaagagaagcctgtcttgatatatcatctcagaaactttcctgaatatgtgataatatatggaaaatgatttatagatccagctgtgcttaagagccagtaatgtcttaataaacatgtggcagcttttgtttgaaaa

SEQ ID NO: 33980 - DNA, 1666 bp, Homo sapiens
  source 1..1666: mol_type = unassigned DNA
gcgcctgcgtttctcctcaaacctaacgatgccgccggagcggaggagacgaatgaaactggaccggagaaccggagcgaagccgaagcggaagcccggaatgaggccggactggaaagccggagcggggccaggcgggcctccccaaaagcctgccccttcatcccagcggaaaccgccggcccggccgagcgcggcggccgctgcgattgcagtcgcggcggcggaggaagagagacggctccggcagcggaaccgcctgaggctggaggaggacaaaccggccgtggagcggtgcttggaggagctggtcttcggcgacgtcgagaacgacgaggacgcgttgctgcggcgtctgcgaggcccgagggttcaagaacatgaagactcgggtgactcagaagtggagaatgaagcaaaaggtaattttccacctcaaaagaagccagtttgggtggatgaagaagatgaagatgaggaaatggttgacatgatgaacaatcggtttcggaaggatatgatgaaaaatgctagtgaaagtaaactttcgaaagacaaccttaaaaagagacttaaagaagaattccaacatgccatgggaggagtacctgcctgggcagagactactaagcggaaaacatcttcagatgatgaaagtgaagaggatgaagatgatttgttgcaaaggactgggaatttcatatccacatcaacttctcttccaagaggaatcttgaagatgaagaactgccagcatgcgaatgctgaacgtcctactgttgctcggatctcatctgtgcagttccatcccggtgcacagattgtgatggttgctggattagataatgctgtatcactatttcaggttgatgggaaaacaaatcctaaaattcagagcatctatttggaaaggtttccaatctttaaggcttgttttagtgctaatggggaagaagttttagccacgagtacccacagcaaggttctttatgtctatgacatgctggctggaaagttaattcctgtgcatcaagtgagaggtttgaaagagaagatagtgaggagctttgaagtctccccagatgggtccttcttgctcataaatggcattgctggatatttgcatttgctagcaatgaagaccaaagaactgattggaagcatgaaaattaatggaagggttgcagcatccacattctcttcagatagtaagaaagtatacgcctcttcgggggatggagaagtttatgtttgggatgtgaactcaaggaagtgccttaacagatttgttgatgaaggcagtttatatggattaagcattgccacatctaggaatggacagtatgttgcttgtggttctaattgtggagtggtaaatatatacaatcaagattcttgtctccaagaaacaaacccaaagccaataaaagctataatgaacttggttacaggtgttacttctctgaccttcaatcctactacagaaatcttggcaattgcttcagaaaaaatgaaagaagcagtcagattggttcatcttccttcctgtacagtattttcaaacttcccagtcattaaaaataagaatatttctcatgttcataccatggatttttctccgagaagtggatactttgccttggggaatgaaaaggcaaggccctga

SEQ ID NO: 33981 - DNA, 9025 bp, Homo sapiens
  source 1..9025: mol_type = unassigned DNA
aggctcctccttgtctccaacatggcggcgcccaggggctcaagccgcacgtgagaaagtctgggcatctgggaatcggagagtatagcctgtgagccgctttcccctccttactgtcggttgcatcccttcgacactcccgaggccgtcgcgggccactggccctctgcagccatgaagacaaagcccgtttcccacaagaccgagaacacctaccggtttcttacatttgctgaacgactggggaatgttaatattgatattattcaccggattgatagaactgcaagctatgaggaggaggttgaaacctacttttttgagggtctgctgaaatggagagaattaaacctcacagaacacttcggaaaattttacaaagaagttattgacaaatgccaatcattcaatcagttggtgtatcaccaaaacgagatagttcagagtttgaagactcacctgcaagttaagaacagttttgcctatcaaccccttttggatttggttgtacagttggcacgagatctgcagatggatttctacccacactttccagagttttttttgactatcacctcgatcctggagactcaggacacagagttgttagaatgggctttcacctcgttatcatatctttataagtacctgtggagactgatggtgaaggacatgtccagtatatacagcatgtacagcacactcctggctcataaaaaactacatataagaaattttgctgctgaaagttttacttttttgatgagaaaggtctctgataaaaacgcacttttcaatttaatgtttcttgatcttgataaacatccagaaaaagttgaaggtgttggacagttgctctttgaaatgtgcaaaggagttagaaatatgtttcactcctgtacaggccaggcagtgaagctaattttgcgaaagctaggaccagtcactgaaacagaaactcaactaccatggatgttaattggagaaacactcaaaaacatggtcaaatccactgtatcctacatctccaaggaacattttggtacattttttgaatgtttgcaagaatcgctcttggatctacacacaaaagtaacaaaaactaactgttgtgaaagttctgaacagattaaaaggttgttggaaacataccttatacttgtaaaacatggaagtgggacaaagatacccacgcctgctgatgtctgtaaggtgttatctcaaacactgcaagtagccagtctctccacatcttgctgggagaccctcttggatgtaatttctgctttgatcctgggtgaaaatgtttccttgccggagaccctcatcaaagaaaccatagaaaaaatatttgagagcagatttgaaaaacgtttaattttcagtttttctgaagtcatgtttgccatgaagcagtttgagcagctttttctaccaagctttctgtcatatattgtgaattgcttcttaattgatgatgctgtagtcaaagatgaagctctggccattctggccaagctcattctgaacaaagcagcacctcccactgctggctcgatggcaattgaaaagtaccctctggttttctcaccgcagatggtgggattctatataaagcagaagaagactagatccaagggaagaaacgaacagtttccagtattggaccatcttttatctataattaagttacccccaaataaagatactacttacctttcacaatcttgggcagccctcgtggtgttacctcatattagacctcttgagaaagagaaggtgataccactcgtcaccggcttcatagaggcactcttcatgactgttgacaaaggaagctttgggaaaggaaacttatttgttctttgtcaagctgtaaatactctactaagtttggaagaatcttctgaacttcttcatttggttcctgtggaacgtgtgaagaatttagtattaacctttcccctggagccatctgtgttgctgttgactgatctctattatcagagattagccttgtgtggctgcaaagggccactttcccaggaggctttaatggaattatttcccaagttacaagcaaacatttcaactggtgtatccaagattcggcttttgacaataaggatcctaaaccattttgatgtccagcttccagaatcaatggaggatgatgggctctcagagcggcagtctgtctttgctatattacgccaggcagaacttgttccagcaactgtgaatgattatagagagaagcttcttcatttgagaaaactaagacatgatgtggtacagactgctgtccctgatgggccgttacaggaggtgccgcttcgttatttgttaggcatgctatatattaatttcagtgcactctgggatcctgttattgaactcataagttctcatgcacacgaaatggaaaataagcaattttggaaagtctactatgagcatctagaaaaagcagctacgcatgctgagaaggaactacagaatgatatgacagatgagaagtccgttggagatgaaagttgggagcagacccaggaaggagatgttggagctctttatcatgagcagttagcattgaaaactgactgtcaggaaagacttgaccacaccaacttcagattcctgctctggagagctctgaccaaattcccagaaagagtagagccacggtccagggagctttccccgcttttcttgagatttatcaacaatgagtattacccagcagatctgcaagttgctccaacccaggatctacggagaaaaggcaaagggatggtggcagaggaaatcgaagaggaacctgccgcaggagatgatgaagagttggaggaagaggcagtgccccaagatgaatcctcacagaagaaaaagacgaggagagctgcagcaaagcaattaattgctcatttgcaagttttctctaaattttcaaatccacgggccttatatctggaatccaaactatatgagttatatcttcagttgttgctacaccaagatcaaatggtgcaaaaaataaccttggattgcataatgacatataaacatcctcatgtcctcccttacagggaaaacttacaaaggttgcttgaagacagaagctttaaggaagagatagtgcattttagcatttcagaagataatgctgtagtgaaaacagcccaccgagcagatctatttcctattctgatgagaattttgtatgggcgaatgaagaataagactgggagtaaaactcaggggaaatctgcttcaggcacccgcatggccattgtcctgcggttcctggccgggacccaacctgaggagatccagatattcttagacctgctgtttgaacctgtgaggcatttcaagaatggagagtgccattctgcagtcattcaagcagtagaagacttggatttgtctaaagttcttcctttaggtcgtcagcacggtatcttaaacagccttgagatagtattgaaaaacattagtcatctgatcagcgcatacctgccgaagattttgcagatactgctctgtatgacagcaaccgtatcacacatccttgaccaacgagaaaagatacagctgagatttattaatccattgaaaaatttaagacgtcttggaatcaaaatggtaactgatatctttttggactgggaatcatatcagtttagaacagaagaaattgatgctgtgtttcatggtgcagtttggccccagatcagcaggcttggatctgagagtcaatattctcctactcctctgctgaaactgatcagtatctggagcagaaacgcaagatatttccctttgctggctaaacagaagcctgggcacccagaatgtgatatcctgaccaatgtttttgcaattctctcagcgaagaatctttctgatgccacagccagtattgtaatggacatagttgatgaccttcttaaccttccagatttcgagcctacagaaacagttttgaacttgctggtaactggatgtgtataccctggcatagcagaaaacatcggtgagtctatcacaataggaggaagattaattctacctcatgtacctgcaattcttcagtatctcagcaaaaccacaataagcgcagaaaaggtgaaaaagaaaaagaatagagcacaagtcagtaaagagcttggcattctttcaaagatcagcaagtttatgaaagacaaagaacaaagttctgtactcattacgcttctccttccattcctccaccgtggcaatattgctgaggatacagaggttgatattctggtgacagtacaaaacttgttaaagcattgtgtggaccctacaagcttcctcaagcctatagcaaaacttttctcagttattaagaacaaattgtcaagaaaattgctttgtacggtttttgagactctttctgattttgagagtgggttaaaatatattactgatgttgtcaagcttaacgccttcgatcaaagacatcttgatgatatcaacttcgacgttcgctttgagactttccagaccatcacctcttacattaaagaaatgcaaattgtggatgttaactacctaattccagttatgcataattgtttctataatctagagttaggagatatgagtttaagtgataatgccagcatgtgcctgatgagtatcatcaaaaagctagctgccttgaatgtcacagagaaagactatagagaaatcatccaccgttcactcctggagaaattgagaaaaggtctgaagagccagacagagagtattcagcaggattataccacaatactttcctgtttaattcaaacctttccaaaccaactggaattcaaagacttggtacaacttactcattaccatgacccagaaatggacttctttgagaacatgaagcacattcagatccacagaagagcaagagccttgaagaaacttgcaaaacaactaatggaaggcaaagttgttctgtcttctaaatctcttcagaattacatcatgccttatgccatgactccaatttttgatgagaaaatgctcaagcatgaaaatataaccactgctgccacagagattattggagccatttgcaaacatctctcttggtcagcgtatatgtattacttgaaacatttcattcatgtcttacaaacgggacagatcaatcaaaaactgggtgtcagtttgctagtaatagtgttagaagcattccactttgaccacaaaactcttgaagaacaaatgggaaaaattgagaatgaagaaaacgcaattgaagcaattgagttaccagagcctgaggccatggaattagagcgtgtggatgaggaagagaaggaatatacatgcaagagtttgtcagacaacggacaaccgggaacccctgatccagctgactctggaggaacatcagctaaagaatccgagtgtatcacaaagcctgtctctttccttcctcaaaacaaggaagaaatagagagaacaattaaaaatatccaaggaaccataaccggggatattctccccaggctacataaatgccttgcatctacgactaaaagggaagaagaacacaagcttgtcaagtcaaaggttgtgaatgatgaggaagtcgttcgagttccattagcttttgccatggttaaactaatgcagtcccttccacaagaagttatggaagctaatctgccaagtattttgctgaaagtgtgtgccctactcaagaacagagcccaagaaatcagagacattgcacgcagcactcttgcgaaaataatagaggatcttggtgtgcacttcctcctatatgttttaaaagaattacagactactcttgtccgtggataccaggtccatgtgctgactttcaccgttcacatgctgctgcaaggcctcaccaataagctgcaggtcggagatttggactcttgtttagatataatgattgagatttttaaccatgagttgtttggtgctgttgctgaagagaaggaagtaaagcagatcctctccaaagtcatggaagcacgaagaagcaaaagttacgactcttatgaaatcctcggcaagtttgtaggaaaagatcaggttacaaaactcatccttccattaaaagagatcttacaaaataccacgagtttgaaactggcccggaaagttcatgaaactttacgccgaatcacagtgggattaattgtaaatcaggaaatgacagctgaatccattctattactcagttatggtttgatcagtgaaaatcttcccctgttaacagagaaagaaaaaaatccagtagccccagcaccagatccacgtctaccaccccagagctgccttctgcttcccccaactccagttcgaggtggacagaaagctgttgtgagcaggaaaaccaacatgcacatatttattgagtccgggcttcggctgctgcatctgagtctgaagacttccaagatcaagtcttcaggtgaatgtgtcctggaaatgctggatccttttgtgtctctcctcatagactgcctgggctccatggatgtgaaggtgatcacaggtgctttacagtgcctcatctgggtcttgaggttcccgctaccttccatagaaacaaaagcagagcagctgacaaaacacctcttccttctgctgaaggactatgcaaagctcggggccgccaggggccagaacttccaccttgtggtcaattgtttcaagtgtgtgaccatacttgtcaagaaagtcaagtcttaccagataactgaaaaacagctccaagttctactggcctatgctgaggaggacatttatgatacttcaagacaagccactgcctttggtcttctgaaggcaattttatcaagaaagctgttggtcccagaaatcgatgaggtcatgcggaaagtatccaagttggcagtctctgcacaaagcgaacctgccagggtccagtgtagacaggtttttctgaaatatattcttgactatcccctgggtgacaaattgagaccaaacttggaattcatgctcgctcaactgaattacgaacatgagaccgggagagagtccaccttggaaatgatcgcctatctctttgacacgttccctcaggggctgctccatgagaactgcggaatgttctttatccctctttgtctaatgacgatcaatgatgactctgccacgtgcaaaaagatggcatccatgacaatcaagtccctacttggtaaaatcagcctcgagaaaaaagattggctgtttgatatggttaccacttggtttggagcaaaaaagcgcttaaatagacaacttgctgccctgatctgtggcttgtttgtggaaagtgaaggagttgattttgagaaaagacttggaactgtccttcctgtgattgaaaaggaaattgatcctgaaaactttaaagatatcatggaagaaactgaagaaaaagctgcagatcgccttctgtttagttttcttacactgataactaaacttatcaaggaatgtaatattattcagtttaccaaacccgctgagactttgagtaaaatctggagtcatgtgcattctcacctgagacatccacacaactgggtgtggctcacagcagcccagatttttggattactctttgcctcttgccagccagaggagcttattcaaaaatggaataccaaaaagaccaaaaaacacctcccagaacctgtagcaatcaagttcctagccagtgaccttgaccaaaagatgaaaagtatctctctcgcctcttgccatcaattgcattccaaattcttggatcagtctctaggagaacaggttgttaagaatttgttgttcgcagccaaagtcttgtatttactggaactttattgtgaggataagcaaagtaagataaaagaagacctggaagaacaagaagctttagaagatggtgtggcctgtgcagatgagaaggcggagtctgacggagaagagaaggaagaggtgaaggaagagctcggcaggccggccacgctgctgtggttgatccagaagctgtcccggattgcaaaactggaagctgcttattcgccgagaaaccccttaaagagaacatgcatctttaagttcctcggcgccgtagcaatggatcttgggatagacaaggtaaagccgtatctcccaatgatcatagctcctttgtttcgggaactcaacagcacctattcagagcaagatcctttgctgaagaatctatcccaggaaatcatagaattactcaaaaagctggttgggcttgagagcttctcattagcctttgcctctgtacagaaacaggctaatgagaaaagggcactccggaaaaagaggaaggccctggagtttgtaactaatcctgatattgctgccaagaaaaaaatgaagaaacacaaaaataaaagtgaagcaaagaagagaaagatagagttcctgcgtccaggatataaggccaagagacaaaaaagccatagcctgaaagatttagcaatggtggagtaatgtctccctgtgctgatacaagcatgaactttctggaatattctgctagtctgaaattacagtaggttgtctggggtaggggggaggcgtttttttttttttttgagacaaggtctcactctgtcacccaaggtggagtgcagtgacgacatcacagctcactgcagcctcaacctgggttcaagtgatcctctcacctcagcctcccaagtagttgtgcctcctaggcacacaacactatgcccggcaaattttttgtattttgtattttttgtagaaacaggatttcgccatgttggccaggctggtctcgaacacctgggctcaactgatccgcctgcctcggcctcccaaagtgctgggattacaggtgtgagccaccctgctcaaccaggttttattatttaagttagttaaactttggatagattgtataatatatagtttaatgtaatcatgctcatattttttaaataaataaaacactatacta

SEQ ID NO: 33982 - DNA, 2072 bp, Homo sapiens
  source 1..2072: mol_type = unassigned DNA
aatcgtacgccacgcggagagcatgctgggggccggaaggaagaggaaattccagtagccgatcaggagtctgcaaactccggtggtaggggagcgcgctgctgtttagagccacgagttaccggagcgcctgattcctgcgccgaagtcagtggtggccgaaagtccggagtcgctgtaaaacctgagattgtgagccatggtggggagatcccggcggcgcggagcagctaagtgggcagctgtgcgagccaaggcaggtcccacgctcaccgacgaaaatggagatgatttaggattgccaccctcaccaggggacaccagctactaccaagatcaggtagatgactttcatgaggcacgatcccgggccgccttagctaagggctggaatgaagtacagagtggagacgaggaggatggcgaggaggaggaggaggaggtgctagccctagatatggacgatgaggacgacgaagatggagggaatgcgggggaggaggaggaggaggagaatgccgatgatgatggtgggagctccgtgcaaagtgaagctgaggcctctgtggatcccagtttgtcgtggggtcagaggaaaaaactttactatgacacggactatggttccaagtcccgaggccggcagagtcaacaggaggcagaggaggaggaaagagaggaggaggaggaggcacagatcattcagcggcgcctagcccaagcgctgcaagaggatgattttggtgtcgcctgggttgaggcctttgcaaaaccagtgcctcaggtagatgaggctgagacacgggtcgtgaaggatttggctaaagtttcagtgaaagagaagctgaaaatgttgcgaaaggaatcaccagaactcttggagctgatagaagacctgaaagtcaagttgacagaggttaaggatgagctggagccattgttagagttggtggaacaagggatcattccacccggaaaaggaagccaatacttgaggaccaagtacaacctctacttgaattattgctcgaacatcagtttttatttgatcctgaaagctaggagagtcccagcacatggacatcctgtcatagaaaggcttgttacctaccgaaatttgatcaacaagctgtccgttgtggatcagaagctgtcctcagaaattcgtcatctgttgacacttaaggatgatgctgtaaagaaagaactgattccaaaagcaaaatccaccaagcccaaaccaaagtctgtttcaaagacttctgctgctgcctgtgctgttacagatctttctgatgattctgattttgatgaaaaagcaaaactgaagtactataaagaaatagaagacaggcaaaagctaaagagaaagaaagaagaaaatagcactgaagaacaggctcttgaagatcaaaatgcaaagagagctattacctatcaaattgctaaaaataggggacttactcctaggagaaagaagattgatcgcaatcccagagtgaaacacagagagaagttcagaagagccaaaattagaagaagaggccaggttcgtgaagttcgtaaagaagagcaacgttatagtggtgaattatctggcattcgtgcaggagttaaaaagagcattaagcttaaatgaagtttttgcttagcataaggtttttggcagttttggatcaataaatttttacttttaactaaagtcattgtattaatatataatactttaaattttaaaaattcttgtccacaaggaaatttgtctgggttattggacaatttataagaactatgggagcaatatgaaggtgcttgagaaaagagatgatgttgaagttttccaatattctgttgaagttttccaatattaagtattagcttagggaaatttcacagttcattgtggagtgttaaacttagaacatgtgtaacttttcacataaagagaatgcatctttgacagttatcttatttgtaaggcagcctataaaatagttctgaagtattttatttacctaactataattattgggccagatacttgttaataaatgggcttaatgttaacatgg

SEQ ID NO: 33983 - DNA, 753 bp, Homo sapiens
  source 1..753: mol_type = unassigned DNA
agattggattaatgtctctctccaaaggtctcttggaagaaaaatacagatatctctttaaggaagttgcagggccaacagaaatgtgtgaccagaggcagctgggcctgttacttcatgatgccatccagatcccccggcagctaggtgaagtagcagcttttggaggcagtaatattgagcctagtgttcgcagctgcttccaacagaataacaataaaccagaaataagtgtgaaagagtttatagattggatgcatttggaaccacagtccatggtttggctcccagttttacatcgagtggcagcagcggagactgcaaaacatcaggccaaatgcaacatctgtaaagaatgtccaattgtcgggttcaggtatagaagccttaagcattttaactatgatgtctgccagagttgtttcttttcgggtcgaacagcaaaaggtcacaaattacattacccaatggtggaatattgtatacctacaacatctggggaagatgtacgagacttcacaaaggtacttaagaacaagttcaggtcgaagaagtactttgccaaacaccctcgacttggttacctgcctgtccagacagttcttgaaggtgacaacttagagaccccctcacaatctcctcaactgtttcatgatgacacccattcaagaatagaacaatatgccacacgactggcccagatggaaaggactaatgggtcttttctcactgatagcagctccaccacaggaa

SEQ ID NO: 33984 - DNA, 579 bp, Homo sapiens
  source 1..579: mol_type = unassigned DNA
aactctaagcttggggccctggagagaacagttgtggcctgcaggtcattagtgaggtgagcagaagggaatcctggacttcccagagaaagaggagaccatgccagcctcgtggaacacagctaccaggaaatacagaagcaggtctattccttgcgaactccgaagtccatgaaaaaacggacccacagtggggtggctaaaatgtcccagcgcaagctgccgctgctgctgatggaccatagctcaagggcaaggcttgtaaaggattttacaaaggattttaaagtatagccagaaaagatacggtgtttagaagttaaacgctgttgtctgaaggaagtttgccggaaagatgtaggcttcaagggctactggacaatgattggtctgaacttcaacttacgggaactgctgacaaaatttgaaaaggacatccaggcagaaattgatgcccacaatgacatatttaaaagcattgacggaaacaggcagaagatggtaaaagctttgggaaattctgaagaggctactatgcttcaacatcgactggatgatatgaaccaaagatggaatgac

SEQ ID NO: 33985 - DNA, 3220 bp, Homo sapiens
  source 1..3220: mol_type = unassigned DNA
caacttccttcatttctggccatgccgggctgagcaagtgctgcctgtgagcatctgctggggggctttctctgtggcgtttgtctgtgttttttaaattgagaagttgaaggaataccagcctcctttttcctagaacctaaccccctgtatctttcaaatgctttcctggaaacgagcatgctcagagaactgacaaatcattgtccagtgaccgggaggaaatgatcgttgctcttcatttataatgcaaattctgaggtgtctccagaagtgtggtaaacttaaaatgatggctgtggtgagaacgtctctgcagaaagttgtggttttgttgcatcgcttacaaaggatggcagtttcttctcctcggtatcagaagctctgtaaggacatccaggcagaaattgatgcccacaatgacatatttaaaagcattgacggaaacaggcagaagatggtaaaagctttgggaaattctgaagaggctactatgcttcaacatcgactggatgatatgaaccaaagatggaatgacttaaaagcaaaatctgctagcatcagggcccatttggaggccagcgctgagaagtggaacaggttgctgatgtccttagaagaactgatcaaatggctgaatatgaaagatgaagagcttaagaaacaaatgcctattggaggagatgttccagccttacagctccagtatgaccattgtaaggccctgagacgggagttaaaggagaaagaatattctgtcctgaatgctgtcgaccaggcccgagttttcttggctgatcagccaattgaggcccctgaagagccaagaagaaacctacaatcaaaaacagaattaactcctgaggagagagcccaaaagattgccaaagccatgcgcaaacagtcttctgaagtcaaagaaaaatgggaaagtctaaatgctgtaactagcaattggcaaaagcaagtggacaaggcattggagaaactcagagacctgcagggagctatggatgacctggacgctgacatgaaggaggcagagtccgtgcggaatggctggaagcccgtgggagacttactcattgactcgctgcaggatcacattgaaaaaatcatggcatttagagaagaaattgcaccaatcaactttaaagttaaaacggtgaatgatttatccagtcagctgtctccacttgacctgcatccctctctaaagatgtctcgccagctagatgaccttaatatgcgatggaaacttttacaggtttctgtggatgatcgccttaaacagcttcaggaagcccacagagattttggaccatcctctcagcattttctctctacgtcagtccagctgccgtggcaaagatccatttcacataataaagtgccctattacatcaaccatcaaacacagaccacctgttgggaccatcctaaaatgaccgaactctttcaatcccttgctgacctgaataatgtacgtttttctgcctaccgtacagcaatcaaaatccgaagactacaaaaagcactatgtttggatctcttagagttgagtacaacaaatgaaattttcaaacagcacaagttgaaccaaaatgaccagctcctcagtgttccagatgtcatcaactgtctgacaacaacttatgatggacttgagcaaatgcataaggacctggtcaacgttccactctgtgttgatatgtgtctcaattggttgctcaatgtctatgacacgggtcgaactggaaaaattagagtgcagagtctgaagattggattaatgtctctctccaaaggtctcttggaagaaaaatacagatatctctttaaggaagttgcagggccaacagaaatgtgtgaccagaggcagctgggcctgttacttcatgatgccatccagatcccccggcagctaggtgaagtagcagcttttggaggcagtaatattgagcctagtgttcgcagctgcttccaacagaataacaataaaccagaaataagtgtgaaagagtttatagattggatgcatttggaaccacagtccatggtttggctcccagttttacatcgagtggcagcagcggagactgcaaaacatcaggccaaatgcaacatctgtaaagaatgtccaattgtcgggttcaggtatagaagccttaagcattttaactatgatgtctgccagagttgtttcttttcgggtcgaacagcaaaaggtcacaaattacattacccaatggtggaatattgtatacctacaacatctggggaagatgtacgagacttcacaaaggtacttaagaacaagttcaggtcgaagaagtactttgccaaacaccctcgacttggttacctgcctgtccagacagttcttgaaggtgacaacttagagactcctatcacactcatcagtatgtggccagagcactatgacccctcacaatctcctcaactgtttcatgatgacacccattcaagaatagaacaatatgccacacgactggcccagatggaaaggactaatgggtcttttctcactgatagcagctccaccacaggaagtgtggaagacgagcacgccctcatccagcagtattgccaaacactcggaggagagtccccagtgagccagccgcagagcccagctcagatcctgaagtcagtagagagggaagaacgtggagaactggagaggatcattgctgacctggaggaagaacaaagaaatctacaggtggagtatgagcagctgaaggaccagcacctccgaagggggctccctgtcggttcaccgccagagtcgattatatctccccatcacacgtctgaggattcagaacttatagcagaagcaaaactcctcaggcagcacaaaggtcggctggaggctaggatgcagattttagaagatcacaataaacagctggagtctcagctccaccgcctccgacagctgctggagcagcctgaatctgattcccgaatcaatggtgtttccccatgggcttctcctcagcattctgcactgagctactcgcttgatccagatgcctccggcccacagttccaccaggcagcgggagaggacctgctggccccaccgcacgacaccagcacggatctcacggaggtcatggagcagattcacagcacgtttccatcttgctgcccaaatgttcccagcaggccacaggcaatgtgaagtatt

SEQ ID NO: 33986 - DNA, 3674 bp, Homo sapiens
  source 1..3674: mol_type = unassigned DNA
agccagccgcccggcggggaacgtgcttgacctctgggtggttgctgctcccaagggtggggctccggagagtgtggcgcgatcgccaagctccctggcagcggccctggagagactgaggggacaggaggaggggggcgccccattggtgtgtagtcccgcgcagtcgccggctctccttttccggactctggggatctcttgctgcaactgacaaggtattgatgtcaagctgaaccatcgtaggaagttgaaagccttagaaagaggacttggtaaagtttttggattatcttgaaactctggcaagatggccaagtatggagaacatgaagccagtcctgacaatgggcagaacgaattcagtgatatcattaagtccagatctgatgaacacaatgacgtacagaagaaaacctttaccaaatggataaatgctcgattttcaaagagtgggaaaccacccatcaatgatatgttcacagacctcaaagatggaaggaagctattggatcttctagaaggcctcacaggaacatcactgccaaaggaacgtggttccacaagggtacatgccttaaataacgtcaacagagtgctgcaggttttacatcagaacaatgtggaattagtgaatatagggggaactgacattgtggatggaaatcacaaactgactttggggttactttggagcatcattttgcactggcaggtgaaagatgtcatgaaggatgtcatgtcggacctgcagcagacgaacagtgagaagatcctgctcagctgggtgcgtcagaccaccaggccctacagccaagtcaacgtcctcaacttcaccaccagctggacagatggactcgcctttaatgctgtcctccaccgacataaacctgatctcttcagctgggataaagttgtcaaaatgtcaccaattgagagacttgaacatgccttcagcaaggctcaaacttatttgggaattgaaaagctgttagatcctgaagatgttgccgttcagcttcctgacaagaaatccataattatgtatttaacatctttgtttgaggtgctacctcagcaagtcaccatagacgccatccgtgaggtagagacactcccaaggaaatataaaaaagaatgtgaagaagaggcaattaatatacagagtacagcgcctgaggaggagcatgagagtccccgagctgaaactcccagcactgtcactgaggttgacatggatctggacagctatcagattgcgttggaggaagtgctgacctggttgctttctgctgaggacactttccaggagcaggatgatatttctgatgatgttgaagaagtcaaagaccagtttgcaacccatgaagcttttatgatggaactgactgcacaccagagcagtgtgggcagcgtcctgcaggcaggcaaccaactgataacacaaggaactctgtcagacgaagaagaatttgagattcaggaacagatgaccctgctgaatgctagatgggaggctcttagggtggagagtatggacagacagtcccggctgcacgatgtgctgatggaactgcagaagaagcaactgcagcagctctccgcctggttaacactcacagaggagcgcattcagaagatggaaacttgccccctggatgatgatgtaaaatctctacaaaagctgctagaagaacataaaagtttgcaaagtgatcttgaggctgaacaggtgaaagtaaattcactaactcacatggtggtcattgttgatgaaaacagtggtgagagtgctacagctatcctagaagaccagttacagaaacttggtgagcgctggacagcagtatgccgttggactgaagaacgctggaataggttacaagaaatcaatatattgtggcaggaattattggaagaacagtgcttgttgaaagcttggttaaccgaaaaagaagaggctttaaataaagtccagacaagcaacttcaaagaccaaaaggaactaagtgtcagtgttcgacgtctggctattttgaaggaagacatggaaatgaagcgtcaaacattggatcagctgagtgagattggccaggatgtgggacaattacttgataattccaaggcatctaagaagatcaacagtgactcagaggaactgactcaaagatgggattctttggttcagagactagaagattcctccaaccaggtgactcaggctgtagcaaagctggggatgtctcagattcctcagaaggaccttttggagactgttcgtgtaagagaacaagcaattacaaaaaaatctaagcaggaactgcctcctcctcctcccccaaagaagagacagatccatgtggatattgaagctaagaaaaagtttgatgctataagtgcagagctgttgaactggattttgaaatggaaaactgccattcagaccacagagataaaagagtatatgaagatgcaagacacttccgaaatgaaaaagaagttgaaggcattagaaaaagaacagagagaaagaatccccagagcagatgaattaaaccaaactggacaaatccttgtggagcaaatgggaaaagaaggccttcctactgaagaaataaaaaatgttctggagaaggtttcatcagaatggaagaatgtatctcaacatttggaagatctagaaagaaagattcagctacaggaagatataaatgcttatttcaagcagcttgatgagcttgaaaaggtcatcaagacaaaggaggagtgggtaaaacacacttccatttctgaatcttcccggcagtccttgccaagcttgaaggattcctgtcagcgggaattgacaaatcttcttggccttcaccccaaaattgaaatggctcgtgcaagctgctcggccctgatgtctcagccttctgccccagattttgtccagcggggcttcgatagctttctgggccgctaccaagctgtacaagaggctgtagaggatcgtcaacaacatctagagaatgaactgaagggccaacctggacatgcatatctggaaacattgaaaacactgaaagatgtgctaaatgattcagaaaataaggcccaggtgtctctgaatgtccttaatgatcttgccaaggtggagaaggccctgcaagaaaaaaagacccttgatgaaatccttgagaatcagaaacctgcattacataaacttgcagaagaaacaaaggctctggagaaaaatgttcatcctgatgtagaaaaattatataagcaagaatttgatgatgtgcaaggaaagtggaacaagctaaaggtcttggtttccaaagatctacatttgcttgaggaaattgctctcacactcagagcttttgaggccgattcaacagtcattgagaagtggatggatggcgtgaaagacttcttaatgaaacagcaggctgcccaaggagacgacgcaggtctacagaggcagttagaccagtgctctgcatttgttaatgaaatagaaacaattgaatcatctctgaaaaacatgaaggaaatagagactaatcttcgaagtggtccagttgctggaataaaaacttgggtgcagacaagactaggtgactaccaaactcaactggagaaacttagcaaggagatcgctactcaaaaaagtaggttgtctg

SEQ ID NO: 33987 - DNA, 12339 bp, Homo sapiens
  source 1..12339: mol_type = unassigned DNA
atggccaagtatggagaacatgaagccagtcctgacaatgggcagaacgaattcagtgatatcattaagtccagatctgatgaacacaatgacgtacagaagaaaacctttaccaaatggataaatgctcgattttcaaagagtgggaaaccacccatcaatgatatgttcacagacctcaaagatggaaggaagctattggatcttctagaaggcctcacaggaacatcactgccaaaggaacgtggttccacaagggtacatgccttaaataacgtcaacagagtgctgcaggttttacatcagaacaatgtggaattagtgaatatagggggaactgacattgtggatggaaatcacaaactgactttggggttactttggagcatcattttgcactggcaggtgaaagatgtcatgaaggatgtcatgtcggacctgcagcagacgaacagtgagaagatcctgctcagctgggtgcgtcagaccaccaggccctacagccaagtcaacgtcctcaacttcaccaccagctggacagatggactcgcctttaatgctgtcctccaccgacataaacctgatctcttcagctgggataaagttgtcaaaatgtcaccaattgagagacttgaacatgccttcagcaaggctcaaacttatttgggaattgaaaagctgttagatcctgaagatgttgccgttcagcttcctgacaagaaatccataattatgtatttaacatctttgtttgaggtgctacctcagcaagtcaccatagacgccatccgtgaggtagagacactcccaaggaaatataaaaaagaatgtgaagaagaggcaattaatatacagagtacagcgcctgaggaggagcatgagagtccccgagctgaaactcccagcactgtcactgaggttgacatggatctggacagctatcagattgcgttggaggaagtgctgacctggttgctttctgctgaggacactttccaggagcaggatgatatttctgatgatgttgaagaagtcaaagaccagtttgcaacccatgaagcttttatgatggaactgactgcacaccagagcagtgtgggcagcgtcctgcaggcaggcaaccaactgataacacaaggaactctgtcagacgaagaagaatttgagattcaggaacagatgaccctgctgaatgctagatgggaggctcttagggtggagagtatggacagacagtcccggctgcacgatgtgctgatggaactgcagaagaagcaactgcagcagctctccgcctggttaacactcacagaggagcgcattcagaagatggaaacttgccccctggatgatgatgtaaaatctctacaaaagctgctagaagaacataaaagtttgcaaagtgatcttgaggctgaacaggtgaaagtaaattcactaactcacatggtggtcattgttgatgaaaacagtggtgagagtgctacagctatcctagaagaccagttacagaaacttggtgagcgctggacagcagtatgccgttggactgaagaacgctggaataggttacaagaaatcaatatattgtggcaggaattattggaagaacagtgcttgttgaaagcttggttaaccgaaaaagaagaggctttaaataaagtccagacaagcaacttcaaagaccaaaaggaactaagtgtcagtgttcgacgtctggctattttgaaggaagacatggaaatgaagcgtcaaacattggatcagctgagtgagattggccaggatgtgggacaattacttgataattccaaggcatctaagaagatcaacagtgactcagaggaactgactcaaagatgggattctttggttcagagactagaagattcctccaaccaggtgactcaggctgtagcaaagctggggatgtctcagattcctcagaaggaccttttggagactgttcgtgtaagagaacaagcaattacaaaaaaatctaagcaggaactgcctcctcctcctcccccaaagaagagacagatccatgtggatattgaagctaagaaaaagtttgatgctataagtgcagagctgttgaactggattttgaaatggaaaactgccattcagaccacagagataaaagagtatatgaagatgcaagacacttccgaaatgaaaaagaagttgaaggcattagaaaaagaacagagagaaagaatccccagagcagatgaattaaaccaaactggacaaatccttgtggagcaaatgggaaaagaaggccttcctactgaagaaataaaaaatgttctggagaaggtttcatcagaatggaagaatgtatctcaacatttggaagatctagaaagaaagattcagctacaggaagatataaatgcttatttcaagcagcttgatgagcttgaaaaggtcatcaagacaaaggaggagtgggtaaaacacacttccatttctgaatcttcccggcagtccttgccaagcttgaaggattcctgtcagcgggaattgacaaatcttcttggccttcaccccaaaattgaaatggctcgtgcaagctgctcggccctgatgtctcagccttctgccccagattttgtccagcggggcttcgatagctttctgggccgctaccaagctgtacaagaggctgtagaggatcgtcaacaacatctagagaatgaactgaagggccaacctggacatgcatatctggaaacattgaaaacactgaaagatgtgctaaatgattcagaaaataaggcccaggtgtctctgaatgtccttaatgatcttgccaaggtggagaaggccctgcaagaaaaaaagacccttgatgaaatccttgagaatcagaaacctgcattacataaacttgcagaagaaacaaaggctctggagaaaaatgttcatcctgatgtagaaaaattatataagcaagaatttgatgatgtgcaaggaaagtggaacaagctaaaggtcttggtttccaaagatctacatttgcttgaggaaattgctctcacactcagagcttttgaggccgattcaacagtcattgagaagtggatggatggcgtgaaagacttcttaatgaaacagcaggctgcccaaggagacgacgcaggtctacagaggcagttagaccagtgctctgcatttgttaatgaaatagaaacaattgaatcatctctgaaaaacatgaaggaaatagagactaatcttcgaagtggtccagttgctggaataaaaacttgggtgcagacaagactaggtgactaccaaactcaactggagaaacttagcaaggagatcgctactcaaaaaagtaggttgtctgaaagtcaagaaaaagctgcgaacctgaagaaagacttggcagagatgcaggaatggatgacccaggccgaggaagaatatttggagcgggattttgagtacaagtcaccagaagagcttgagagtgctgtggaagagatgaagagggcaaaagaggatgtgttgcagaaggaggtgagagtgaagattctcaaggacaacatcaagttattagctgccaaggtgccctctggtggccaggagttgacgtctgagctgaatgttgtgctggagaattaccaacttctttgtaatagaattcgaggaaagtgccacacgctagaggaggtctggtcttgttggattgaactgcttcactatttggatcttgaaactacctggttaaacactttggaagagcggatgaagagcacagaggtcctgcctgagaagacggatgctgtcaacgaagccctggagtctctggaatctgttctgcgccacccggcagataatcgcacccagattcgagagcttggccagactctgattgatggggggatcctggatgatataatcagtgagaaactggaggctttcaacagccgatatgaagatctaagtcacctggcagagagcaagcagatttctttggaaaagcaactccaggtgctgcgggaaactgaccagatgcttcaagtcttgcaagagagcttgggggagctggacaaacagctcaccacatacctgactgacaggatagatgctttccaagttccacaggaagctcagaaaatccaagcagagatctcagcccatgagctaaccctagaggagttgagaagaaatatgcgttctcagcccctgacctccccagagagtaggactgccagaggaggaagtcagatggatgtgctacagaggaaactccgagaggtgtccacaaagttccagcttttccagaagccagctaacttcgagcagcgcatgctggactgcaagcgtgtgctggatggcgtgaaagcagaacttcacgttctggatgtgaaggacgtagaccctgacgtcatacagacgcacctggacaagtgtatgaaactgtataaaactttgagtgaagtcaaacttgaagtggaaactgtgattaaaacaggaagacatattgtccagaaacagcaaacggacaacccaaaagggatggatgagcagctgacttccctgaaggttctttacaatgacctgggcgcacaggtgacagaaggaaaacaggatctggaaagagcatcacagttggcccggaaaatgaagaaagaggctgcttctctctctgaatggctttctgctactgaaactgaattggtacagaagtccacttcagaaggtctgcttggtgacttggatacagaaatttcctgggctaaaaatgttctgaaggatctggaaaagagaaaagctgatttaaataccatcacagagagtagtgctgccctgcaaaacttgattgagggcagtgagcctattttagaagagaggctctgcgtccttaacgctgggtggagccgagttcgtacctggactgaagattggtgcaataccttgatgaaccatcagaaccagctagaaatatttgatgggaacgtggctcacataagtacctggctttatcaagctgaagctctattggatgaaattgaaaagaaaccaacaagtaaacaggaagaaattgtgaagcgtttagtatctgagctggatgatgccaacctccaggttgaaaatgtccgcgatcaagcccttattttgatgaatgcccgtggaagctcaagcagggagcttgtagaaccaaagttagctgagctgaataggaactttgaaaaggtgtctcaacatatcaaaagtgccaaattgctaattgctcaggaaccattataccaatgtttggtcaccactgaaacatttgaaactggtgtgcctttctctgacttggaaaaattagaaaatgacatagaaaatatgttaaaatttgtggaaaaacacttggaatccagtgatgaagatgaaaagatggatgaggagagtgcccagattgaggaagttctacaaagaggagaagaaatgttacatcaacctatggaagataataaaaaagaaaagatccgtttgcaattattacttttgcatactagatacaacaaaattaaggcaatccctattcaacagaggaaaatgggtcaacttgcttctggaattagatcatcacttcttcctacagattatctggttgaaattaacaaaattttactttgcatggatgatgttgaattatcgcttaatgttccagagctcaacactgctatttacgaagacttctcttttcaggaagactctctgaagaatatcaaagaccaactggacaaacttggagagcagattgcagtcattcatgaaaaacagccagatgtcatccttgaagcctctggacctgaagccattcagatcagagatacacttactcagctgaatgcaaaatgggacagaattaatagaatgtacagtgatcggaaaggttgttttgacagggcaatggaagaatggagacagttccattgtgaccttaatgacctcacacagtggataacagaggctgaagaattactggttgatacctgtgctccaggtggcagcctggacttagagaaagccaggatacatcagcaggaacttgaggtgggcatcagcagccaccagcccagttttgcagcactaaaccgaactggggatgggattgtgcagaaactctcccaggcagatggaagcttcttgaaagaaaaactggcaggtttaaaccaacgctgggatgcaattgttgcagaagtgaaggataggcagccaaggctaaaaggagaaagtaagcaggtgatgaagtacaggcatcagctagatgagattatctgttggttaacaaaggctgagcatgctatgcaaaagagatcaaccaccgaattgggagaaaacctgcaagaattaagagacttaactcaagaaatggaagtacatgctgaaaaactcaaatggctgaatagaactgaattggagatgctttcagataaaagtctgagtttacctgaaagggataaaatttcagaaagcttaaggactgtaaatatgacatggaataagatttgcagagaggtgcctaccaccctgaaggaatgcatccaggagcccagttctgtttcacagacaaggattgctgctcatcctaatgtccaaaaggtggtgctagtatcatctgcgtcagatattcctgttcagtctcatcgtacttcggaaatttcaattcctgctgatcttgataaaactataacagaactagccgactggctggtattaatcgaccagatgctgaagtccaacattgtcactgttggggatgtagaagagatcaataagaccgtttcccgaatgaaaattacaaaggctgacttagaacagcgccatcctcagctggattatgtttttacattggcacagaatttgaaaaataaagcttccagttcagatatgagaacagcaattacagaaaaattggaaagggtcaagaaccagtgggatggcacccagcatggcgttgagctaagacagcagcagcttgaggacatgattattgacagtcttcagtgggatgaccatagggaggagactgaagaactgatgagaaaatatgaggctcgactctatattcttcagcaagcccgacgggatccactcaccaaacaaatttctgataaccaaatactgcttcaagaactgggtcctggagatggtatcgtcatggcgttcgataacgtcctgcagaaactcctggaggaatatgggagtgatgacacaaggaatgtgaaagaaaccacagagtacttaaaaacatcatggatcaatctcaaacaaagtattgctgacagacagaacgccttggaggctgagtggaggacggtgcaggcctctcgcagagatctggaaaacttcctgaagtggatccaagaagcagagaccacagtgaatgtgcttgtggatgcctctcatcgggagaatgctcttcaggatagtatcttggccagggaactcaaacagcagatgcaggacatccaggcagaaattgatgcccacaatgacatatttaaaagcattgacggaaacaggcagaagatggtaaaagctttgggaaattctgaagaggctactatgcttcaacatcgactggatgatatgaaccaaagatggaatgacttaaaagcaaaatctgctagcatcagggcccatttggaggccagcgctgagaagtggaacaggttgctgatgtccttagaagaactgatcaaatggctgaatatgaaagatgaagagcttaagaaacaaatgcctattggaggagatgttccagccttacagctccagtatgaccattgtaaggccctgagacgggagttaaaggagaaagaatattctgtcctgaatgctgtcgaccaggcccgagttttcttggctgatcagccaattgaggcccctgaagagccaagaagaaacctacaatcaaaaacagaattaactcctgaggagagagcccaaaagattgccaaagccatgcgcaaacagtcttctgaagtcaaagaaaaatgggaaagtctaaatgctgtaactagcaattggcaaaagcaagtggacaaggcattggagaaactcagagacctgcagggagctatggatgacctggacgctgacatgaaggaggcagagtccgtgcggaatggctggaagcccgtgggagacttactcattgactcgctgcaggatcacattgaaaaaatcatggcatttagagaagaaattgcaccaatcaactttaaagttaaaacggtgaatgatttatccagtcagctgtctccacttgacctgcatccctctctaaagatgtctcgccagctagatgaccttaatatgcgatggaaacttttacaggtttctgtggatgatcgccttaaacagcttcaggaagcccacagagattttggaccatcctctcagcattttctctctacgtcagtccagctgccgtggcaaagatccatttcacataataaagtgccctattacatcaaccatcaaacacagaccacctgttgggaccatcctaaaatgaccgaactctttcaatcccttgctgacctgaataatgtacgtttttctgcctaccgtacagcaatcaaaatccgaagactacaaaaagcactatgtttggatctcttagagttgagtacaacaaatgaaattttcaaacagcacaagttgaaccaaaatgaccagctcctcagtgttccagatgtcatcaactgtctgacaacaacttatgatggacttgagcaaatgcataaggacctggtcaacgttccactctgtgttgatatgtgtctcaattggttgctcaatgtctatgacacgggtcgaactggaaaaattagagtgcagagtctgaagattggattaatgtctctctccaaaggtctcttggaagaaaaatacagatatctctttaaggaagttgcagggccaacagaaatgtgtgaccagaggcagctgggcctgttacttcatgatgccatccagatcccccggcagctaggtgaagtagcagcttttggaggcagtaatattgagcctagtgttcgcagctgcttccaacagaataacaataaaccagaaataagtgtgaaagagtttatagattggatgcatttggaaccacagtccatggtttggctcccagttttacatcgagtggcagcagcggagactgcaaaacatcaggccaaatgcaacatctgtaaagaatgtccaattgtcgggttcaggtatagaagccttaagcattttaactatgatgtctgccagagttgtttcttttcgggtcgaacagcaaaaggtcacaaattacattacccaatggtggaatattgtatacctacaacatctggggaagatgtacgagacttcacaaaggtacttaagaacaagttcaggtcgaagaagtactttgccaaacaccctcgacttggttacctgcctgtccagacagttcttgaaggtgacaacttagagactcctatcacactcatcagtatgtggccagagcactatgacccctcacaatctcctcaactgtttcatgatgacacccattcaagaatagaacaatatgccacacgactggcccagatggaaaggactaatgggtcttttctcactgatagcagctccaccacaggaagtgtggaagacgagcacgccctcatccagcagtattgccaaacactcggaggagagtccccagtgagccagccgcagagcccagctcagatcctgaagtcagtagagagggaagaacgtggagaactggagaggatcattgctgacctggaggaagaacaaagaaatctacaggtggagtatgagcagctgaaggaccagcacctccgaagggggctccctgtcggttcaccgccagagtcgattatatctccccatcacacgtctgaggattcagaacttatagcagaagcaaaactcctcaggcagcacaaaggtcggctggaggctaggatgcagattttagaagatcacaataaacagctggagtctcagctccaccgcctccgacagctgctggagcagcctgaatctgattcccgaatcaatggtgtttccccatgggcttctcctcagcattctgcactgagctactcgcttgatccagatgcctccggcccacagttccaccaggcagcgggagaggacctgctggccccaccgcacgacaccagcacggatctcacggaggtcatggagcagattcacagcacgtttccatcttgctgcccaaatgttcccagcaggccacaggcaatgtgaagtattcatccggccaaccaatgtttcctgacgtacagtgttgcccttttcagcaaatgccaattccaagttccattaaatcagaagctccatggctccttggcccacgatgttgagtgctgactgtgtgttctactgaaagagtaaaacactgactatccaaagagaaatggatattttgtttttataataaccatatattattgttttcttcttccctttctatgcaagtgtaaattaatgaacagagaggtatttggaaatggtaatacatttgtcacggatttgtataatgtatacagcattgggaaagtgggtgggggctttctaatatgataccgtctttttaataactatgacaaagcttacataagaattagaagaccactttacatttttacattccttctgctgttcatattaaccttgcacaattacttcattttttctttgactcttttaccacaatgttttggttatttataatttatcagccatatgtttatcagccatataaccaactagatcccaaatagatccatgtatttgtttccgtgatttggccacattaataaattcataaatttcaatcaaatatcttatatatacacacatatggtttaagctacagccctgtgtatgccgtttaactttatttgacgttgcccacttacttctttgctgaccacttggataaccgtaataaaaatcctataagcctaaatggcatttcttttgggatatttttcctgcattttattccctttttatataagtaggaattaattatttattttatgtcttaatctatttgataaagaagactacattataataatctcaaagatcatattaccaaaggttgcccacttgagcatattttcattttgacacagaaacaaaatttagtacaacctttcctagttcccatgtcttgattttcatcattacatgcacagcagacctttacctattgtgataccagaacacatcattgtctttggttcccttcaaagagaattttattgttgttttgtattttcaagtccttaatagttcttgaaactcctagttgttttcttgttgaaagcagacacacatttagtgcacggcttattttacctttcgggtgaaagatcagatgtttttatacccttcacttgatcaatatatttggaaagaatgtttatcaaaagtctatgtcactgcttctacagaagaatgaaattaatgcttaggtgatggtacctccacctacatctttttgagtgcattcaattatgtattttggtttagcttctgatttaacatttaattgattcagtttaaacatgttacttaattagcaaatgtagaggaaccaaaaaaaggtgaaaataatatgttttgattcaaacctaaagacataaaaacataaagacattttaactttgggttctctttagctgggatctggccagaaggaggcttaaagttagaaattgctattattttagaataggttgggtgggttggggggcaagggtgtctatttgcagcagagatattttgaaaagaagaaaattgttttatataaaaaggaaagccatgaccacctttctacctcagatccatcttcatccattgcattggaaactgctttatgctgctgcagtctgcaaagtctagagcttttatcaggccatgtcatacccaagaaagcacctatttaaagaaaaaacaattccctgagctctcaactccaagttgtagatttggtgtcttccttgttcttactttaaaaagtcatgtgttaattttttttctgcctgtatttgtatgcaaaatgtcctctatctgctattaaagaaaagctacgtaaaacactacattgtaaccttctaagtaataataaataaaaagaaatatattgcagtaacaatgggaagtaagtatgtagttcttttgaaatatgtggtaaagaactaatcacagactatcatctaatctggttacatattgtatttttcatcctgaataaaagtaattttaacacaa

SEQ ID NO: 33988 - DNA, 678 bp, Homo sapiens
  source 1..678: mol_type = unassigned DNA
aagattatgaagcaacaacactagctacagtttaaatgaaggcatttcttcacttttaatatatttcttttttcaccagaataacaataaaccagaaataagtgtgaaagagtttatagattggatgcatttggaaccacagtccatggtttggctcccagttttacatcgagtggcagcagcggagactgcaaaacatcaggccaaatgcaacatctgtaaagaatgtccaattgtcgggttcaggtatagaagccttaagcattttaactatgatgtctgccagagttgtttcttttcgggtcgaacagcaaaaggtcacaaattacattacccaatggtggaatattgtatacctacaacatctggggaagatgtacgagacttcacaaaggtacttaagaacaagttcaggtcgaagaagtactttgccaaacaccctcgacttggttacctgcctgtccagacagttcttgaaggtgacaacttagagaccccctcacaatctcctcaactgtttcatgatgacacccattcaagaatagaacaatatgccacacgactggcccagatggaaaggactaatgggtcttttctcactgatagcagctccaccacaggaagtgtggaagacgagcacgccctcatccagcagtattgccaaacactcggaggaga

SEQ ID NO: 33989 - DNA, 569 bp, Homo sapiens
  source 1..569: mol_type = unassigned DNA
aaaaaaaaaacccaaaataacacaggacatcccagtgtgcagttcgaaggctgcttttgttgtccacttcctccacatctttttcctcatcatctaagcagatgtaggtgatgagcggcctggcagccaccacgtttcattggaaaaagtgcagattggatttgccagggcatgtagctctccaggcttgcaagcgattaccagatgaacacaatgacgtacagaagaaaacctttaccaaatggataaatgctcgattttcaaagagtgggaaaccacccatcaatgatatgttcacagacctcaaagatggaaggaagctattggatcttctagaaggcctcacaggaacatcactgccaaaggaacgtggttccacaagggtacatgccttaaataacgtcaacagagtgctgcaggttttacatcagaacaatgtggaattagtgaatatagggggaactgacattgtggatggaaatcacaaactgactttggggttactttggagcatcattttgcactggcaggtggatgtcatgaaggatgtcatgtcggacctgcagcag

SEQ ID NO: 33990 - DNA, 666 bp, Homo sapiens
  source 1..666: mol_type = unassigned DNA
aagattatgaagcaacaacactagctacagtttaaatgaaggcatttcttcacttttaatatatttcttttttcaccagaataacaataaaccagaaataagtgtgaaagagtttatagattggatgcatttggaaccacagtccatggtttggctcccagttttacatcgagtggcagcagcggagactgcaaaacatcaggccaaatgcaacatctgtaaagaatgtccaattgtcgggttcaggtatagaagccttaagcattttaactatgatgtctgccagagttgtttcttttcgggtcgaacagcaaaaggtcacaaattacattacccaatggtggaatattgtatacctacaacatctggggaagatgtacgagacttcacaaaggtacttaagaacaagttcaggtcgaagaagtactttgccaaacaccctcgacttggttacctgcctgtccagacagttcttgaaggtgacaacttagagactcctatcacactcatcagtatgtggccagagcactatgacccctcacaatctcctcaactgtttcatgatgacacccattcaagaatagaacaatatgccacacgactggcccagatggaaaggactaatgggtcttttctcactgatagcagctccaccacaggaagtgt

SEQ ID NO: 33991 - DNA, 354 bp, Homo sapiens
  source 1..354: mol_type = unassigned DNA
caccaaactaacactcgcacacacccccgcggttactccgtgtcaaactcctagaggagcccttggccagctcggggtgcggcggtggcgaccggcaggcgaggaggcccgcgggcagcaggtattgatgtcaagctgaaccatcgtaggaagttgaaagccttagaaagaggacttggtaaagtttttggattatcttgaaactctggcaagatggccaagtatggagaacatgaagccagtcctgacaatgggcagaacgaattcagtgatatcattaagtccagatctgatgaacacaatgacgtacagaagaaaacctttaccaaatggataaatgctcgattttcaaag

SEQ ID NO: 33992 - DNA, 633 bp, Homo sapiens
  source 1..633: mol_type = unassigned DNA
gtgaagtagagtgagcattagcctggcagacagctagggtaatagatgacttccagtggaagtcaaagcacaaatgttggaagaagaagaatggtatagaagccttaagcattttaactatgatgtctgccagagttgtttcttttcgggtcgaacagcaaaaggtcacaaattacattacccaatggtggaatattgtatacctacaacatctggggaagatgtacgagacttcacaaaggtacttaagaacaagttcaggtcgaagaagtactttgccaaacaccctcgacttggttacctgcctgtccagacagttcttgaaggtgacaacttagagaccccctcacaatctcctcaactgtttcatgatgacacccattcaagaatagaacaatatgccacacgactggcccagatggaaaggactaatgggtcttttctcactgatagcagctccaccacaggaagtgtggaagacgagcacgccctcatccagcagtattgccaaacactcggaggagagtccccagtgagccagccgcagagcccagctcagatcctgaagtcagtagagagggaagaacgtggagaactggagaggatcattgctgacctggaggaagaacaaag

SEQ ID NO: 33993 - DNA, 495 bp, Homo sapiens
  source 1..495: mol_type = unassigned DNA
atgattggtctgaacttcaacttacgggaactgctgacaaaatttgaaaaggacatccaggcagaaattgatgcccacaatgacatatttaaaagcattgacggaaacaggcagaagatggtaaaagctttgggaaattctgaagaggctactatgcttcaacatcgactggatgatatgaaccaaagatggaatgacttaaaagcaaaatctgctagcatcagggcccatttggaggccagcgctgagaagtggaacaggttgctgatgtccttagaagaactgatcaaatggctgaatatgaaagatgaagagcttaagaaacaaatgcctattggaggagatgttccagccttacagctccagtatgaccattgtaaggccctgagacgggagttaaaggagaaagaatattctgtcctgaatgctgtcgaccaggcccgagttttcttggctgatcagccaattgaggcccctgaagagccaagaagaaac

SEQ ID NO: 33994 - DNA, 806 bp, Homo sapiens
  source 1..806: mol_type = unassigned DNA
agattggattaatgtctctctccaaaggtctcttggaagaaaaatacagatatctctttaaggaagttgcagggccaacagaaatgtgtgaccagaggcagctgggcctgttacttcatgatgccatccagatcccccggcagctaggtgaagtagcagcttttggaggcagtaatattgagcctagtgttcgcagctgcttccaacagaataacaataaaccagaaataagtgtgaaagagtttatagattggatgcatttggaaccacagtccatggtttggctcccagttttacatcgagtggcagcagcggagactgcaaaacatcaggccaaatgcaacatctgtaaagaatgtccaattgtcgggttcaggtatagaagccttaagcattttaactatgatgtctgccagagttgtttcttttcgggtcgaacagcaaaaggtcacaaattacattacccaatggtggaatattgtatacctacaacatctggggaagatgtacgagacttcacaaaggtacttaagaacaagttcaggtcgaagaagtactttgccaaacaccctcgacttggttacctgcctgtccagacagttcttgaaggtgacaacttagagaccccctcacaatctcctcaactgtttcatgatgacacccattcaagaatagaacaatatgccacacgactggcccagatggaaaggactaatgggtcttttctcactgatagcagctccaccacaggaagtgtggaagacgagcacgccctcatccagcagtattgccaaacactcggagga

SEQ ID NO: 33995 - DNA, 4123 bp, Homo sapiens
  source 1..4123: mol_type = unassigned DNA
aatgagcgctccgggtctcagcggggtggaggggttgcactgcggtaatatggctcttccttagccagcggcggcaacggcggcagcggcggcagcggcggcggctactgtctgggctgagcagtagtgcctctcgggtggcgggtttctaggctgcaggggcttggtaggtggtggcaagggggcggcggcggatgccggaagagtgcccgccccgccgcttggcggcccctggatcgagatgagcgcctccgcgtcggtcgggggccccgtcccccagccacccccgggcccggccgctgctctgcctcccggttctgccgcgcgggccctgcatgtggagctgccgtctcagcagcggcgtcttcgacatcttcggaacattgctgcccggaacattgttaatagaaatggccatcagctccttgatacctactttacacttcacttgtgtagtactgaaaagatatataaagaattttatagaagtgaagtgattaagaattccttgaatcccacgtggcgaagtctcgattttggaattatgccagaccgtcttgatacatctgtgtcttgtttcgtggtgaagatatggggtggaaaggagaacatctaccagctgttgattgaatggaaagtctgtttggatgggctgaaatacttgggtcagcagattcatgcccgaaaccaaaatgaaataatttttgggctgaatgatggatactatggtgctccatttgaacataagggttattcaaatgctcagaagactattcttctgcaggtggatcagaactgtgttcgcaattcttacgatgtcttctctttgctacggcttcatagagcccagtgtgcaattaaacagactcaggtaactgttcagaaaattggaaaggaaattgaagaaaaactaagactcacatctacaagcaatgaactgaaaaaaaaaagtgaatgcctgcagttaaaaattttggtgcttcagaatgaactggaacggcagaagaaagctttgggacgggaggtggcattactgcataagcaacaaattgcattacaagacaaaggaagtgcattttcagctgagcacctcaaacttcaactccagaaggaatccctaaatgagctgaggaaggagtgcactgcaaaaagagaactcttcttgaagactaatgctcagttgacaattcgttgcaggcagttactctctgagctttcctacatttaccctattgatttgaatgaacataaggattactttgtatgcggtgtcaagttgcctaattctgaggacttccaagcaaaagatgatggaagcattgctgttgcccttggttatactgcacatctggtctccatgatttcctttttcctacaagtgcccctcagatatcctataattcataaggggtctagatcaacaatcaaagacaatatcaatgacaaactgacggaaaaggagagagagtttccactgtatccaaaaggaggggagaagttgcagtttgattatggtgtctatcttctgaacaaaaatatagcacagctaagatatcaacatggactagggactccagacttgcggcaaacccttcccaacctgaaaaacttcatggagcatggactaatggtcaggtgtgacagacatcacacctccagtgcaatccctgttcctaagagacaaagctccatatttgggggtgcagatgtaggcttctctggggggatcccttcaccagacaaaggacatcgaaaacgggccagctctgagaatgagagacttcagtacaaaacccctcctcccagttacaactcagcattagcccagcctgtgaccaccgtcccctccatgggagagaccgagagaaagataacatctctatcctcctccttggatacctccttggacttctccaaagaaaacaagaaaaaaggagaggatctagttggcagcttaaacggaggccacgcgaatgtgcaccctagccaagaacaaggagaagccctctccgggcaccgggccacagtcaatggcactctcctacccagcgagcaggccgggtccgccagtgtccagcttccaggcgagttccacccagtctcagaagctgagctctgctgtactgtggagcaagcagaagaaatcatcgggctggaagccacaggtttcgcctcaggtgatcagctagaagcatttaactgcatcccagtggacagtgctgtggcagtagagtgtgacgaacaagttctgggagaatttgaagagttctcccgaaggatctatgcactgaatgaaaacgtatccagcttccgccggccgcgcaggagttccgataagtgaagtgagcaggtcaacagtaggactggggcagaagctctgcctaaaatgaagtgaaagctgcacttaaccctttgtgataatgatgacacaaaatgaatattaatggaggatattcctcggaaaaacagactttgggaatgaaggagggactcaggatcattgttatcagtgggccaaagttagattttgctttcaagatttgcttttcgggcctgatgattttaaagcaaaaatcaccctctagttgaaagagcttacagctcgagtcaccttttagctatttgtctgctttttatttacccttgtatgttatcctcagagggaagatgataatatataaataatataatgaacacacccttagtttctcataagcatttgccctcaccatggtttataaaactttgggaaaacggaatattcagaaataggtttccgccatgtactgaaaggtctgtggccatctgtgaggtagatgaagaagcagcatagtggtctccttacatctaggcctaactgtccctcttcctgcccccgggtaccacagtccacctttagaccctactgtcgccccatcttctccgtggatgggccatgcgtcctgaaaacaggacatcagattcactggttctgtaacccagtagctgtgacgttccatctcttctaaccagccatggccttcccctcctctgccatacccttaatgcggccctcagattagatgaaaaacttgctcctggtggatcccaagggaccctcaaggacctcgaggttactgcagtcagatgccatctcatcccctgtgggggccaaagtttttatgtgggcagatgctgtggtcaggaactaggcatgctttctggcaatgcactcaccagacaaaaatcccttgatgtaaatcccatgttaatttattaaatttcagtcagaaggtcagcatttacatgacagaatgtatgtagagagttggggtgtctggtaggcaaactgcaaggcagttgagatagttggattaagaggctagacgagacatagaatactattggtatgtgtgcaatttcatgaatattaaattatgtttcgaagtccagttgtcattcccgcattcagatttcatttgctgttgctttatacgttacgtacccaaggacattgcctcagggttgcaaactctttaaaggaaaatttatccatatatccatgtattatatagaagaataaaaattgagtttacttcacccgacctgatttttttttaccagcttggaaattcctcttgaacctacgtctccatatgtcacatcatgacaggactagcctgaacaaaagccatgtctatctaagcggaggctgttgacttcattcagtttgcatattgtatatagcaacacaaacacttgacaggtatatactccagtcgccacatttgtcctgcataacagcttcactcacaggcctcaccgtcactttattttgtgtccaagcattcctgggctcaagtttaatgtatagctacattgttgttttccatgtagagaactcacaggatgactacatcacaaataaacccaactctcaggcagtcgaaagctttaactggatctgcagaagcccatcttcctccacatgaagaagtggggctccttcacctagagcaggagcttctctgcagtgtactgtctgtcgctcattttggagtcagtgtgggtggagacagcatcgtggatatgcacgtgctgcggggccctccagggaagtaacatttaccaaaaaaaaagaaaa

SEQ ID NO: 33996 - DNA, 1312 bp, Homo sapiens
  source 1..1312: mol_type = unassigned DNA
caccttcacagctaagatatcaacatggactagggactccagacttgcggcaaacccttcccaacctgaaaaacttcatggagcatggactaatggtcaggtggacatctgctttacaagaacacagcaaactaagaaagggtatagtggccactgcgggcaggggcactgattcaaccacccacagcgccagaggggactcgaagaacccacgccaggcttacctccagacctgcgtcctacagaacagacaccactgaacatcctgtagtccccttattgtgtcatcgctcagtaatgttcatatcagtggcccagaggcaacgagaaaatgccttttcttgttcaacttttttaagatgtgacagacatcacacctccagtgcaatccctgttcctaagagacaaagctccatatttgggggtgcagatgtaggcttctctggggggatcccttcaccagacaaaggacatcgaaaacgggccagctctgagaatgagagacttcagtacaaaacccctcctcccagttacaactcagcattagcccagcctgtgaccaccgtcccctccatgggagagaccgagagaaagataacatctctatcctcctccttggatacctccttggacttctccaaagaaaacaagaaaaaaggagaggatctagttggcagcttaaacggaggccacgcgaatgtgcaccctagccaagaacaaggagaagccctctccgggcaccgggccacagtcaatggcactctcctacccagcgagcaggccgggtccgccagtgtccagcttccaggcgagttccacccagtctcagaagctgagctctgctgtactgtggagcaagcagaagaaatcatcgggctggaagccacaggtttcgcctcaggtgatcagctagaagcatttaactgcatcccagtggacagtgctgtggcagtagagtgtgacgaacaagttctgggagaatttgaagagttctcccgaaggatctatgcactgaatgaaaacgtatccagcttccgccggccgcgcaggagttccgataagtgaagtgagcaggtcaacagtaggactggggcagaagctctgcctaaaatgaagtgaaagctgcacttaaccctttgtgataatgatgacacaaaatgaatattaatggaggatattcctcggaaaaacagactttgggaatgaaggagggactcaggatcattgttatcagtgggccaaagttagattttgctttcaagatttgcttttcgggcctgatgattttaaagcaaaaatcaccctctagttg

SEQ ID NO: 33997 - DNA, 1615 bp, Homo sapiens
  source 1..1615: mol_type = unassigned DNA
aactggaacggcagaagaaagctttgggacgggaggtggcattactgcataagcaacaaattgcattacaagacaaaggaagtgcattttcagctgagcacctcaaacttcaactccagaaggaatccctaaatgagctgaggaaggagtgcactgcaaaaagagaactcttcttgaagactaatgctcagttgacaattcgttgcaggcagttactctctgagctttcctacatttaccctattgatttgaatgaacataaggattactttgtatgcggtgtcaagttgcctaattctgaggacttccaaggcatgatttcttggaaaggagagtccatatgtcaaacaatgtctcattgagaacatggaatgattccatagatgctgtggcagtgattagagtcttaaatattttgtcctgtctggatcagtgggtgcttggttccttaacaaatcagctgcctcagtgattgggaaggcaggatgcaaaagatgatggaagcattgctgttgcccttggttatactgcacatctggtctccatgatttcctttttcctacaagtgcccctcagatatcctataattcataaggggtctagatcaacaatcaaagacaatatcaatgacaaactgacggaaaaggagagagagtttccactgtatccaaaaggaggggagaagttgcagtttgattatggtgtctatcttctgaacaaaaatatagcacagctaagatatcaacatggactagggactccagacttgcggcaaacccttcccaacctgaaaaacttcatggagcatggactaatggtcaggtgtgacagacatcacacctccagtgcaatccctgttcctaagagacaaagctccatatttgggggtgcagatgtaggcttctctggggggatcccttcaccagacaaaggacatcgaaaacgggccagctctgagaatgagagacttcagtacaaaacccctcctcccagttacaactcagcattagcccagcctgtgaccaccgtcccctccatgggagagaccgagagaaagataacatctctatcctcctccttggatacctccttggacttctccaaagaaaacaagaaaaaaggagaggatctagttggcagcttaaacggaggccacgcgaatgtgcaccctagccaagaacaaggagaagccctctccgggcaccgggccacagtcaatggcactctcctacccagcgagcaggccgggtccgccagtgtccagcttccaggcgagttccacccagtctcagaagctgagctctgctgtactgtggagcaagcagaagaaatcatcgggctggaagccacaggtttcgcctcaggtgatcagctagaagcatttaactgcatcccagtggacagtgctgtggcagtagagtgtgacgaacaagttctgggagaatttgaagagttctcccgaaggatctatgcactgaatgaaaacgtatccagcttccgccggccgcgcaggagttccgataagtgaagtgagcaggtcaacagtaggactggggcagaagctctgcctaaaatgaagtgaaagctgcacttaaccctttgtgataatgatgac

SEQ ID NO: 33998 - DNA, 6939 bp, Homo sapiens
  source 1..6939: mol_type = unassigned DNA
aattggctacgggaggggagccccgcctcaggcctgtcgacgtctgctgcccggggcccgcaggtggcaggcaggtggggctggtacagcccgcgccgcctctgctgcagccgctgccgtctactccttgcgcgctggcactccgcagcctttaaggttcgcgcgggggccaggcaagagttagccatgaagagcctcaagtcccgcctgaggaggcaggacgtgcccggccccgcgtcgtctggcgccgccgccgccagcgcgcatgcagcagattggaataaatatgatgaccgattgatgaaagcagcagaaaggggggatgtagaaaaagtgacctcaatccttgctaaaaagggggtcaatccaggcaaactagatgtggaaggcagatctgtcttccatgttgtgacctcaaaggggaatcttgagtgtttgaatgccatccttatacatggagttgatattacaaccagtgacactgcagggagaaatgctcttcacctggctgctaagtatggacatgcattgtgcctacaaaaacttctacagtacaattgtcccactgagcatgcagacctgcagggaagaactgcacttcacgatgccgcaatggcagattgtccttctagcatacagctgctttgtgaccatggggcctctgtgaatgccaaagatgtagacgggcggacaccacttgttctggctactcagatgagtaggccaacaatatgtcaactgctgatagatagaggagcggatgttaattccagagacaaacaaaacagaactgccctcatgctaggttgcgaatatggttgcagagatgcagtagaagtcttaattaaaaatggtgctgatataagcttgctggatgcgcttggccatgatagttcttactatgcaagaattggtgacaatctggacattctaaccttgttgaagactgcatcggaaaataccaacaaagggagagaactttggaagaaagggccatctttgcaacagcgaaatttgacacacatgcaagatgaagtaaatgtgaagtcacatcagagggagcatcaaaatattcaggatttggagattgaaaatgaagatttgaaagagaggttgagaaaaattcagcaagaacaaagaatacttttggataaagtcaatggtttacagttacagctgaatgaggaagttatggttgctgatgatctggaaagcgagagagaaaagctgaagtcccttttggcagctaaagaaaagcaacatgaagaaagcttaaggactattgaggctctgaaaaatagatttaaatattttgagagtgatcatttaggatcaggaagtcatttcagtaaccgaaaagaagatatgcttcttaaacaaggtcagatgtatatggcagactcacagtgtacttccccaggtataccagcccatatgcaaagcagatctatgttaagacctctggaactatctttacccagtcaaacgtcatactctgaaaatgaaattttaaagaaagagttagaagcaatgcgaactttctgtgagtcagcaaaacaagaccgactgaagctccaaaatgaactggcacacaaagtggcagaatgcaaagctttagcattagaatgtgaaagggtcaaggaggattcagatgaacagataaagcaattagaagatgcattaaaagatgtgcagaagaggatgtatgagtcagaaggtaaagttaaacaaatgcagacccattttcttgcccttaaagaacacttaacaagtgaagcagcctcagggaatcacagactaaccgaggaactgaaggatcagttgaaagacttgaaagtaaaatatgaaggtgcttcagcagaagtggggaaattaagaaaccaaatcaaacaaaatgagatgatagtagaagagtttaagagggatgaaggcaagctgatagaagaaaataagcgattacagaaggaacttagtatgtgtgaaatggagcgagagaagaaaggaagaaaggtcacagagatggaaggccaggcaaaagaattgtcagcgaagttggccctttccattccagctgaaaaatttgaaaacatgaagagctcattatcaaatgaagtgaatgagaaagcaaaaaaattagtagaaatggaaagagaacatgaaaaatcacttagtgaaattagacagttaaagagagaacttgagaatgttaaggccaagcttgctcagcacgtcaaaccagaggaacatgaacaggttaagagcagattagaacagaaatcaggagaacttgggaagaagatcactgagttaacattgaaaaatcagacactacaaaaggaaattgaaaaagtttatttggataataagctcctcaaggagcaagcacataacttaacaattgaaatgaaaaatcattatgttcctttaaaagtaagtgaagacatgaaaaagtcacatgatgcaattattgatgatcttaatagaaagcttttagatgtaacacaaaaatatacagaaaagaagttggaaatggagaaattgctactggaaaatgacagcttaagtaaggatgtaagccgcctagaaactgtgtttgtacctcctgagaaacatgaaaaagagataatagctctgaaatccaatattgttgaacttaagaaacagctgtctgaacttaagaaaaaatgtggtgaagaccaggagaaaatacacgctctcacatctgaaaacactaacttgaagaagatgatgagtaatcagtatgtgccagttaaaacccatgaagaggttaaaatgacactgaatgacacgttagccaaaactaacagagaattattagatgtgaagaaaaaatttgaagatataaatcaggaatttgtaaaaataaaagataagaatgaaatattaaaaagaaacctggaaaacactcagaaccaaataaaagctgagtacatcagcctggcagagcacgaggcaaagatgagctcgctaagtcagagcatgagaaaggtgcaggatagtaatgctgaaatcttggccaactacagaaaaggccaagaagagattgtgacactgcatgccgaaattaaagcccagaagaaggagctcgacacaatacaagaatgcattaaggtaaaatacgccccaattgtcagctttgaggagtgcgagagaaaatttaaagcaacagagaaagaactaaaagaccagttatcagagcagacacaaaagtatagtgtcagtgaagaagaagtcaagaaaaacaagcaagagaatgacaagttaaagaaggagatttttacccttcagaaagatttgagagataagacagttctcattgagaagtctcatgaaatggaaagagcattaagcagaaaaacagacgagctaaacaaacagttaaaagacttgtcacagaaatacacggaagtaaagaatgtgaaagagaagctagtagaagaaaatgccaaacagacttctgagatacttgcagtgcaaaatcttttgcaaaaacaacatgttccattggaacaggttgaggctctgaaaaaatctcttaatggcacaattgaaaatctaaaggaagaactgaagagtatgcaaaggtgttacgagaaagagcagcagacagtgaccaaactgcatcaattgttggagaatcaaaagaactcttctgtacccctggcagagcatttgcagattaaagaagcatttgagaaagaagttggaatcataaaagccagcttgagagaaaaggaagaagaaagccaaaacaaaatggaagaagtctccaaacttcagtcggaggttcagaatactaaacaagcattaaaaaaattagagactagagaggtagttgacttgtctaaatataaagcaacaaaaagtgatttggagacacagatttctagcttaaatgaaaaattggccaatctgaatagaaagtatgaggaagtatgtgaggaagttttgcatgccaaaaagaaggaaatatctgcaaaagatgagaaggaattactgcatttcagcattgagcaagaaattaaggatcagaaggaacgatgtgataagtccttaacaacaatcacagagttacaaagaagaatacaagaatctgctaaacaaatagaagcaaaagataataagataactgaactgcttaatgatgtggaaagattaaaacaggcactcaatggcctttcccaactcacctacacaagtgggaaccccaccaagaggcagagccagctgattgacactctgcagcaccaagtgaaatctctggagcaacagctggccgatgctgacagacagcaccaagaagtaattgcaatttatcggacacaccttcttagtgctgcacagggtcacatggatgaagatgttcaggaggctctgctccagatcatacaaatgcggcaggggcttgtgtgctagccgttagcactgactgccagtatctgttttatcttgctggtgctgaacattctttgtgcaactccatggtctttctgggccttactgtgctggtataattaaaataaaatatattttgttctattggtaggtttttttttaaaattagatgaatatgttagtctttttcaatatcagtttgaatcttattttctgtatgtgttaattttacaaataggcaaacaacataactttgccctggattgactacatatttttaaaccttcaagtccctaataaaacatgagccatctgagtgagtccatatgaagcgaggttaggctgaaataattgcttaaagatgtctttcagagaaattaatttggttggtggccacttttaggtggatcaaaagacctttcagatcctcagaaccttgagacataatacagttgtgaggaatgtgttgtaacttggctggccaagttacatgttacagtatctttactgaggtaacttcattagtgtctttggccttttttgtaggtatagatattttttctttttacactaataacttttatgccttttaaaataaatttattttcataaatggtttgcagtgctaaattacatttagattaagaacaggcaggggtggaatatatcaggaatttataataaaattgccttaatctctacaacagtatcttaatttttacttgcggtgactattcttgccacaatattggagaataatgatagatgatatactagatttttcaaagtgtgaaaacctttagactttttttagcaattagtttgacattcgctactatagtaaccaagcactcattatatatgcatcctccaaatgtttcatgcttatttataggaaagttatattaatgagattaataatgtgaaatacagttttcctgcaaaattagcattagagaattgattttagataacagatttttaaagttttagagaaaagtacagtaatacagtaaactgaaagagtatatagatagcaataaaataacataagtggacatgtttatagtaaatactctgaagtaaacaaccgtttttattaactgcatctcattagggaaagtttatatgtcttgttattttttattaacattttatttaccattcagagtgaaaattactaatttgagtattaacaaataactgaataaatggatcattacagttaggttttctcaaattgcaaaatttgccttagcaattatctttgaacatcccgaaccagatttttaaatcccatttttgtttaatagggtaaaaataccatcaaaatgacttctcataccaaagaataagccatcatattttttcggtgttgaaacaacattgaaagtcagaattggatttgtttttaattctttatacggtttacataagcaatatctgtctctttaattattatgattaatgtcgtccttcagcatgagttctgtttcacaagttttgggccacctatttcaataaaaaataaaatataaattaaaaaagttgccgggggtggtggctcatgcctgtaatcccagcactttgggaggctgagggaggtagatcacctgaggtcagaagttcgagaccagccttaccaatatggtgaagccccatctctactaaaaatacaaaaattagccctgcatggtggcaggtgcctgtagtcccaggtactcgggaggctgagacaggagaatcgcttgaacctgggaggcggaggttgcagtgagccaagatctcgccactgcactccagcttgggcaatagcaagactccatctcaaaataaaataaaataaaacttagagcaaagtttaaaactgagtattcatattaagtgttttattttccatattagagatgggaagggaaccttatgtgtattttattttgttttcaaccatcaataaagttttctctagaatattgttttgaacatccttgtaaaagatttgcgagttaaactattttatttactgtctgtgagagcattgggagtaggaaacgatggactccaaagtacaagggagaatacccattttcattcagctatctggagtaaaatatcaagtacttccttcaactaatcttgtctcattcactcaccttttgatatcgaaggcagaaattgcgtttacaacactgaagaccaaagctttttaattagtaaacaagcggaacatagataatggacaatgctggccactgccattctgtgttcagaaagactatgagacctgaacatatggccaagaggaaagaagagtgacgttgtctaagatgtaatgagtgctctctgagagaatcactcaattcctattggagtgcaatccttacttgagaactttattactcttgttctgtgtagttttttttttttgtcacttccccatcagaaaagcatattctttttgatagagggtcagtgttataaataattgtcttttgaaataaaatcaaatattcatgcattgaa

SEQ ID NO: 33999 - DNA, 7078 bp, Homo sapiens
  source 1..7078: mol_type = unassigned DNA
gtgttgaggcagcaggatgcagagtgctgttcaagttttccagtggggtccctcaaagggacaactttgaaagatagctagcttccaaagaataagaaatagatagagttactgtacctgacttggggctgctcttaatcaagttctgcattgcaaggaagataatattcgagcgttatgaaggcggagaaggatcctgaagacgaagaaaatatcgttagagatccaagctaagtgtagcacagcatgtgagggactgagtcacttgtcaggagtttgtctgagagtttgctttgtgagcttacagagatttgtaacttaatgcaaagtagtttgccattagcaacaagaaactaaatcctgtctatgatgaactgttggttttcttgtactcctaagaacagacatgcagcagattggaataaatatgatgaccgattgatgaaagcagcagaaaggggggatgtagaaaaagtgacctcaatccttgctaaaaagggggtcaatccaggcaaactagatgtggaaggcagatctgtcttccatgttgtgacctcaaaggggaatcttgagtgtttgaatgccatccttatacatggagttgatattacaaccagtgacactgcagggagaaatgctcttcacctggctgctaagtatggacatgcattgtgcctacaaaaacttctacagtacaattgtcccactgagcatgcagacctgcagggaagaactgcacttcacgatgccgcaatggcagattgtccttctagcatacagctgctttgtgaccatggggcctctgtgaatgccaaagatgtagacgggcggacaccacttgttctggctactcagatgagtaggccaacaatatgtcaactgctgatagatagaggagcggatgttaattccagagacaaacaaaacagaactgccctcatgctaggttgcgaatatggttgcagagatgcagtagaagtcttaattaaaaatggtgctgatataagcttgctggatgcgcttggccatgatagttcttactatgcaagaattggtgacaatctggacattctaaccttgttgaagactgcatcggaaaataccaacaaagggagagaactttggaagaaagggccatctttgcaacagcgaaatttgacacacatgcaagatgaagtaaatgtgaagtcacatcagagggagcatcaaaatattcaggatttggagattgaaaatgaagatttgaaagagaggttgagaaaaattcagcaagaacaaagaatacttttggataaagtcaatggtttacagttacagctgaatgaggaagttatggttgctgatgatctggaaagcgagagagaaaagctgaagtcccttttggcagctaaagaaaagcaacatgaagaaagcttaaggactattgaggctctgaaaaatagatttaaatattttgagagtgatcatttaggatcaggaagtcatttcagtaaccgaaaagaagatatgcttcttaaacaaggtcagatgtatatggcagactcacagtgtacttccccaggtataccagcccatatgcaaagcagatctatgttaagacctctggaactatctttacccagtcaaacgtcatactctgaaaatgaaattttaaagaaagagttagaagcaatgcgaactttctgtgagtcagcaaaacaagaccgactgaagctccaaaatgaactggcacacaaagtggcagaatgcaaagctttagcattagaatgtgaaagggtcaaggaggattcagatgaacagataaagcaattagaagatgcattaaaagatgtgcagaagaggatgtatgagtcagaaggtaaagttaaacaaatgcagacccattttcttgcccttaaagaacacttaacaagtgaagcagcctcagggaatcacagactaaccgaggaactgaaggatcagttgaaagacttgaaagtaaaatatgaaggtgcttcagcagaagtggggaaattaagaaaccaaatcaaacaaaatgagatgatagtagaagagtttaagagggatgaaggcaagctgatagaagaaaataagcgattacagaaggaacttagtatgtgtgaaatggagcgagagaagaaaggaagaaaggtcacagagatggaaggccaggcaaaagaattgtcagcgaagttggccctttccattccagctgaaaaatttgaaaacatgaagagctcattatcaaatgaagtgaatgagaaagcaaaaaaattagtagaaatggaaagagaacatgaaaaatcacttagtgaaattagacagttaaagagagaacttgagaatgttaaggccaagcttgctcagcacgtcaaaccagaggaacatgaacaggttaagagcagattagaacagaaatcaggagaacttgggaagaagatcactgagttaacattgaaaaatcagacactacaaaaggaaattgaaaaagtttatttggataataagctcctcaaggagcaagcacataacttaacaattgaaatgaaaaatcattatgttcctttaaaagtaagtgaagacatgaaaaagtcacatgatgcaattattgatgatcttaatagaaagcttttagatgtaacacaaaaatatacagaaaagaagttggaaatggagaaattgctactggaaaatgacagcttaagtaaggatgtaagccgcctagaaactgtgtttgtacctcctgagaaacatgaaaaagagataatagctctgaaatccaatattgttgaacttaagaaacagctgtctgaacttaagaaaaaatgtggtgaagaccaggagaaaatacacgctctcacatctgaaaacactaacttgaagaagatgatgagtaatcagtatgtgccagttaaaacccatgaagaggttaaaatgacactgaatgacacgttagccaaaactaacagagaattattagatgtgaagaaaaaatttgaagatataaatcaggaatttgtaaaaataaaagataagaatgaaatattaaaaagaaacctggaaaacactcagaaccaaataaaagctgagtacatcagcctggcagagcacgaggcaaagatgagctcgctaagtcagagcatgagaaaggtgcaggatagtaatgctgaaatcttggccaactacagaaaaggccaagaagagattgtgacactgcatgccgaaattaaagcccagaagaaggagctcgacacaatacaagaatgcattaaggtaaaatacgccccaattgtcagctttgaggagtgcgagagaaaatttaaagcaacagagaaagaactaaaagaccagttatcagagcagacacaaaagtatagtgtcagtgaagaagaagtcaagaaaaacaagcaagagaatgacaagttaaagaaggagatttttacccttcagaaagatttgagagataagacagttctcattgagaagtctcatgaaatggaaagagcattaagcagaaaaacagacgagctaaacaaacagttaaaagacttgtcacagaaatacacggaagtaaagaatgtgaaagagaagctagtagaagaaaatgccaaacagacttctgagatacttgcagtgcaaaatcttttgcaaaaacaacatgttccattggaacaggttgaggctctgaaaaaatctcttaatggcacaattgaaaatctaaaggaagaactgaagagtatgcaaaggtgttacgagaaagagcagcagacagtgaccaaactgcatcaattgttggagaatcaaaagaactcttctgtacccctggcagagcatttgcagattaaagaagcatttgagaaagaagttggaatcataaaagccagcttgagagaaaaggaagaagaaagccaaaacaaaatggaagaagtctccaaacttcagtcggaggttcagaatactaaacaagcattaaaaaaattagagactagagaggtagttgacttgtctaaatataaagcaacaaaaagtgatttggagacacagatttctagcttaaatgaaaaattggccaatctgaatagaaagtatgaggaagtatgtgaggaagttttgcatgccaaaaagaaggaaatatctgcaaaagatgagaaggaattactgcatttcagcattgagcaagaaattaaggatcagaaggaacgatgtgataagtccttaacaacaatcacagagttacaaagaagaatacaagaatctgctaaacaaatagaagcaaaagataataagataactgaactgcttaatgatgtggaaagattaaaacaggcactcaatggcctttcccaactcacctacacaagtgggaaccccaccaagaggcagagccagctgattgacactctgcagcaccaagtgaaatctctggagcaacagctggccgatgctgacagacagcaccaagaagtaattgcaatttatcggacacaccttcttagtgctgcacagggtcacatggatgaagatgttcaggaggctctgctccagatcatacaaatgcggcaggggcttgtgtgctagccgttagcactgactgccagtatctgttttatcttgctggtgctgaacattctttgtgcaactccatggtctttctgggccttactgtgctggtataattaaaataaaatatattttgttctattggtaggtttttttttaaaattagatgaatatgttagtctttttcaatatcagtttgaatcttattttctgtatgtgttaattttacaaataggcaaacaacataactttgccctggattgactacatatttttaaaccttcaagtccctaataaaacatgagccatctgagtgagtccatatgaagcgaggttaggctgaaataattgcttaaagatgtctttcagagaaattaatttggttggtggccacttttaggtggatcaaaagacctttcagatcctcagaaccttgagacataatacagttgtgaggaatgtgttgtaacttggctggccaagttacatgttacagtatctttactgaggtaacttcattagtgtctttggccttttttgtaggtatagatattttttctttttacactaataacttttatgccttttaaaataaatttattttcataaatggtttgcagtgctaaattacatttagattaagaacaggcaggggtggaatatatcaggaatttataataaaattgccttaatctctacaacagtatcttaatttttacttgcggtgactattcttgccacaatattggagaataatgatagatgatatactagatttttcaaagtgtgaaaacctttagactttttttagcaattagtttgacattcgctactatagtaaccaagcactcattatatatgcatcctccaaatgtttcatgcttatttataggaaagttatattaatgagattaataatgtgaaatacagttttcctgcaaaattagcattagagaattgattttagataacagatttttaaagttttagagaaaagtacagtaatacagtaaactgaaagagtatatagatagcaataaaataacataagtggacatgtttatagtaaatactctgaagtaaacaaccgtttttattaactgcatctcattagggaaagtttatatgtcttgttattttttattaacattttatttaccattcagagtgaaaattactaatttgagtattaacaaataactgaataaatggatcattacagttaggttttctcaaattgcaaaatttgccttagcaattatctttgaacatcccgaaccagatttttaaatcccatttttgtttaatagggtaaaaataccatcaaaatgacttctcataccaaagaataagccatcatattttttcggtgttgaaacaacattgaaagtcagaattggatttgtttttaattctttatacggtttacataagcaatatctgtctctttaattattatgattaatgtcgtccttcagcatgagttctgtttcacaagttttgggccacctatttcaataaaaaataaaatataaattaaaaaagttgccgggggtggtggctcatgcctgtaatcccagcactttgggaggctgagggaggtagatcacctgaggtcagaagttcgagaccagccttaccaatatggtgaagccccatctctactaaaaatacaaaaattagccctgcatggtggcaggtgcctgtagtcccaggtactcgggaggctgagacaggagaatcgcttgaacctgggaggcggaggttgcagtgagccaagatctcgccactgcactccagcttgggcaatagcaagactccatctcaaaataaaataaaataaaacttagagcaaagtttaaaactgagtattcatattaagtgttttattttccatattagagatgggaagggaaccttatgtgtattttattttgttttcaaccatcaataaagttttctctagaatattgttttgaacatccttgtaaaagatttgcgagttaaactattttatttactgtctgtgagagcattgggagtaggaaacgatggactccaaagtacaagggagaatacccattttcattcagctatctggagtaaaatatcaagtacttccttcaactaatcttgtctcattcactcaccttttgatatcgaaggcagaaattgcgtttacaacactgaagaccaaagctttttaattagtaaacaagcggaacatagataatggacaatgctggccactgccattctgtgttcagaaagactatgagacctgaacatatggccaagaggaaagaagagtgacgttgtctaagatgtaatgagtgctctctgagagaatcactcaattcctattggagtgcaatccttacttgagaactttattactcttgttctgtgtagttttttttttttgtcacttccccatcagaaaagcatattctttttgatagagggtcagtgttataaataattgtcttttgaaataaaatcaaatattcatgcattg

SEQ ID NO: 34000 - DNA, 6679 bp, Homo sapiens
  source 1..6679: mol_type = unassigned DNA
atgatgaactgttggttttcttgtactcctaagaacagacatgcagcagattggaataaatatgatgaccgattgatgaaagcagcagaaaggggggatgtagaaaaagtgacctcaatccttgctaaaaagggggtcaatccaggcaaactagatgtggaaggcagatctgtcttccatgttgtgacctcaaaggggaatcttgagtgtttgaatgccatccttatacatggagttgatattacaaccagtgacactgcagggagaaatgctcttcacctggctgctaagtatggacatgcattgtgcctacaaaaacttctacagtacaattgtcccactgagcatgcagacctgcagggaagaactgcacttcacgatgccgcaatggcagattgtccttctagcatacagctgctttgtgaccatggggcctctgtgaatgccaaagatgtagacgggcggacaccacttgttctggctactcagatgagtaggccaacaatatgtcaactgctgatagatagaggagcggatgttaattccagagacaaacaaaacagaactgccctcatgctaggttgcgaatatggttgcagagatgcagtagaagtcttaattaaaaatggtgctgatataagcttgctggatgcgcttggccatgatagttcttactatgcaagaattggtgacaatctggacattctaaccttgttgaagactgcatcggaaaataccaacaaagggagagaactttggaagaaagggccatctttgcaacagcgaaatttgacacacatgcaagatgaagtaaatgtgaagtcacatcagagggagcatcaaaatattcaggatttggagattgaaaatgaagatttgaaagagaggttgagaaaaattcagcaagaacaaagaatacttttggataaagtcaatggtttacagttacagctgaatgagagagaaaagctgaagtcccttttggcagctaaagaaaagcaacatgaagaaagcttaaggactattgaggctctgaaaaatagatttaaatattttgagagtgatcatttaggatcaggaagtcatttcagtaaccgaaaagaagatatgcttcttaaacaaggtcagatgtatatggcagactcacagtgtacttccccaggtataccagcccatatgcaaagcagatctatgttaagacctctggaactatctttacccagtcaaacgtcatactctgaaaatgaaattttaaagaaagagttagaagcaatgcgaactttctgtgagtcagcaaaacaagaccgactgaagctccaaaatgaactggcacacaaagtggcagaatgcaaagctttagcattagaatgtgaaagggtcaaggaggattcagatgaacagataaagcaattagaagatgcattaaaagatgtgcagaagaggatgtatgagtcagaaggtaaagttaaacaaatgcagacccattttcttgcccttaaagaacacttaacaagtgaagcagcctcagggaatcacagactaaccgaggaactgaaggatcagttgaaagacttgaaagtaaaatatgaaggtgcttcagcagaagtggggaaattaagaaaccaaatcaaacaaaatgagatgatagtagaagagtttaagagggatgaaggcaagctgatagaagaaaataagcgattacagaaggaacttagtatgtgtgaaatggagcgagagaagaaaggaagaaaggtcacagagatggaaggccaggcaaaagaattgtcagcgaagttggccctttccattccagctgaaaaatttgaaaacatgaagagctcattatcaaatgaagtgaatgagaaagcaaaaaaattagtagaaatggaaagagaacatgaaaaatcacttagtgaaattagacagttaaagagagaacttgagaatgttaaggccaagcttgctcagcacgtcaaaccagaggaacatgaacaggttaagagcagattagaacagaaatcaggagaacttgggaagaagatcactgagttaacattgaaaaatcagacactacaaaaggaaattgaaaaagtttatttggataataagctcctcaaggagcaagcacataacttaacaattgaaatgaaaaatcattatgttcctttaaaagtaagtgaagacatgaaaaagtcacatgatgcaattattgatgatcttaatagaaagcttttagatgtaacacaaaaatatacagaaaagaagttggaaatggagaaattgctactggaaaatgacagcttaagtaaggatgtaagccgcctagaaactgtgtttgtacctcctgagaaacatgaaaaagagataatagctctgaaatccaatattgttgaacttaagaaacagctgtctgaacttaagaaaaaatgtggtgaagaccaggagaaaatacacgctctcacatctgaaaacactaacttgaagaagatgatgagtaatcagtatgtgccagttaaaacccatgaagaggttaaaatgacactgaatgacacgttagccaaaactaacagagaattattagatgtgaagaaaaaatttgaagatataaatcaggaatttgtaaaaataaaagataagaatgaaatattaaaaagaaacctggaaaacactcagaaccaaataaaagctgagtacatcagcctggcagagcacgaggcaaagatgagctcgctaagtcagagcatgagaaaggtgcaggatagtaatgctgaaatcttggccaactacagaaaaggccaagaagagattgtgacactgcatgccgaaattaaagcccagaagaaggagctcgacacaatacaagaatgcattaaggtaaaatacgccccaattgtcagctttgaggagtgcgagagaaaatttaaagcaacagagaaagaactaaaagaccagttatcagagcagacacaaaagtatagtgtcagtgaagaagaagtcaagaaaaacaagcaagagaatgacaagttaaagaaggagatttttacccttcagaaagatttgagagataagacagttctcattgagaagtctcatgaaatggaaagagcattaagcagaaaaacagacgagctaaacaaacagttaaaagacttgtcacagaaatacacggaagtaaagaatgtgaaagagaagctagtagaagaaaatgccaaacagacttctgagatacttgcagtgcaaaatcttttgcaaaaacaacatgttccattggaacaggttgaggctctgaaaaaatctcttaatggcacaattgaaaatctaaaggaagaactgaagagtatgcaaaggtgttacgagaaagagcagcagacagtgaccaaactgcatcaattgttggagaatcaaaagaactcttctgtacccctggcagagcatttgcagattaaagaagcatttgagaaagaagttggaatcataaaagccagcttgagagaaaaggaagaagaaagccaaaacaaaatggaagaagtctccaaacttcagtcggaggttcagaatactaaacaagcattaaaaaaattagagactagagaggtagttgacttgtctaaatataaagcaacaaaaagtgatttggagacacagatttctagcttaaatgaaaaattggccaatctgaatagaaagtatgaggaagtatgtgaggaagttttgcatgccaaaaagaaggaaatatctgcaaaagatgagaaggaattactgcatttcagcattgagcaagaaattaaggatcagaaggaacgatgtgataagtccttaacaacaatcacagagttacaaagaagaatacaagaatctgctaaacaaatagaagcaaaagataataagataactgaactgcttaatgatgtggaaagattaaaacaggcactcaatggcctttcccaactcacctacacaagtgggaaccccaccaagaggcagagccagctgattgacactctgcagcaccaagtgaaatctctggagcaacagctggccgatgctgacagacagcaccaagaagtaattgcaatttatcggacacaccttcttagtgctgcacagggtcacatggatgaagatgttcaggaggctctgctccagatcatacaaatgcggcaggggcttgtgtgctagccgttagcactgactgccagtatctgttttatcttgctggtgctgaacattctttgtgcaactccatggtctttctgggccttactgtgctggtataattaaaataaaatatattttgttctattggtaggtttttttttaaaattagatgaatatgttagtctttttcaatatcagtttgaatcttattttctgtatgtgttaattttacaaataggcaaacaacataactttgccctggattgactacatatttttaaaccttcaagtccctaataaaacatgagccatctgagtgagtccatatgaagcgaggttaggctgaaataattgcttaaagatgtctttcagagaaattaatttggttggtggccacttttaggtggatcaaaagacctttcagatcctcagaaccttgagacataatacagttgtgaggaatgtgttgtaacttggctggccaagttacatgttacagtatctttactgaggtaacttcattagtgtctttggccttttttgtaggtatagatattttttctttttacactaataacttttatgccttttaaaataaatttattttcataaatggtttgcagtgctaaattacatttagattaagaacaggcaggggtggaatatatcaggaatttataataaaattgccttaatctctacaacagtatcttaatttttacttgcggtgactattcttgccacaatattggagaataatgatagatgatatactagatttttcaaagtgtgaaaacctttagactttttttagcaattagtttgacattcgctactatagtaaccaagcactcattatatatgcatcctccaaatgtttcatgcttatttataggaaagttatattaatgagattaataatgtgaaatacagttttcctgcaaaattagcattagagaattgattttagataacagatttttaaagttttagagaaaagtacagtaatacagtaaactgaaagagtatatagatagcaataaaataacataagtggacatgtttatagtaaatactctgaagtaaacaaccgtttttattaactgcatctcattagggaaagtttatatgtcttgttattttttattaacattttatttaccattcagagtgaaaattactaatttgagtattaacaaataactgaataaatggatcattacagttaggttttctcaaattgcaaaatttgccttagcaattatctttgaacatcccgaaccagatttttaaatcccatttttgtttaatagggtaaaaataccatcaaaatgacttctcataccaaagaataagccatcatattttttcggtgttgaaacaacattgaaagtcagaattggatttgtttttaattctttatacggtttacataagcaatatctgtctctttaattattatgattaatgtcgtccttcagcatgagttctgtttcacaagttttgggccacctatttcaataaaaaataaaatataaattaaaaaagttgccgggggtggtggctcatgcctgtaatcccagcactttgggaggctgagggaggtagatcacctgaggtcagaagttcgagaccagccttaccaatatggtgaagccccatctctactaaaaatacaaaaattagccctgcatggtggcaggtgcctgtagtcccaggtactcgggaggctgagacaggagaatcgcttgaacctgggaggcggaggttgcagtgagccaagatctcgccactgcactccagcttgggcaatagcaagactccatctcaaaataaaataaaataaaacttagagcaaagtttaaaactgagtattcatattaagtgttttattttccatattagagatgggaagggaaccttatgtgtattttattttgttttcaaccatcaataaagttttctctagaatattgttttgaacatccttgtaaaagatttgcgagttaaactattttatttactgtctgtgagagcattgggagtaggaaacgatggactccaaagtacaagggagaatacccattttcattcagctatctggagtaaaatatcaagtacttccttcaactaatcttgtctcattcactcaccttttgatatcgaaggcagaaattgcgtttacaacactgaagaccaaagctttttaattagtaaacaagcggaacatagataatggacaatgctggccactgccattctgtgttcagaaagactatgagacctgaacatatggccaagaggaaagaagagtgacgttgtctaagatgtaatgagtgctctctgagagaatcactcaattcctattggagtgcaatccttacttgagaactttattactcttgttctgtgtagttttttttttttgtcacttccccatcagaaaagcatattctttttgatagagggtcagtgttataaataattgtcttttgaaataaaatcaaatattcatgcattg

SEQ ID NO: 34001 - DNA, 4723 bp, Homo sapiens
  source 1..4723: mol_type = unassigned DNA
atcatgcactgcagcgtctgtgttgcagtgttgaggcagcaggatgcagagtgctgttcaagttttccagtggggtccctcaaagggacaactttgaaagatagctagcttccaaagaataagaaatagatagagttactgtacctgacttggggctgctcttaatcaagttctgcattgcaaggaagataatattcgagcgttatgaaggcggagaaggatcctgaagacgaagaaaatatcgttagagatccaagctaagtgtagcacagcatgtgagggactgagtcacttgtcaggagtttgtctgagagtttgctttgtgagcttacagagatttgtaacttaatgcaaagtagtttgccattagcaacaagaaactaaatcctgtctatgatgaactgttggttttcttgtactcctaagaacagacatgcagcagattggaataaatatgatgaccgattgatgaaagcagcagaaaggggggatgtagaaaaagtgacctcaatccttgctaaaaagggggtcaatccaggcaaactagatgtggaaggcagatctgtcttccatgttgtgacctcaaaggggaatcttgagtgtttgaatgccatccttatacatggagttgatattacaaccagtgacactgcagggagaaatgctcttcacctggctgctaagtatggacatgcattgtgcctacaaaaacttctacagtacaattgtcccactgagcatgcagacctgcagggaagaactgcacttcacgatgccgcaatggcagattgtccttctagcatacagctgctttgtgaccatggggcctctgtgaatgccaaagatgtagacgggcggacaccacttgttctggctactcagatgagtaggccaacaatatgtcaactgctgatagatagaggagcggatgttaattccagagacaaacaaaacagaactgccctcatgctaggttgcgaatatggttgcagagatgcagtagaagtcttaattaaaaatggtgctgatataagcttgctggatgcgcttggccatgatagttcttactatgcaagaattggtgacaatctggacattctaaccttgttgaagactgcatcggaaaataccaacaaagggagagaactttggaagaaagggccatctttgcaacagcgaaatttgacacacatgcaagatgaagtaaatgtgaagtcacatcagagggagcatcaaaatattcaggatttggagattgaaaatgaagatttgaaagagaggttgagaaaaattcagcaagaacaaagaatacttttggataaagtcaatggtttacagttacagctgaatgaggaagttatggttgctgatgatctggaaagcgagagagaaaagctgaagtcccttttggcagctaaagaaaagcaacatgaagaaagcttaaggactattgaggctctgaaaaatagatttaaatattttgagagtgatcatttaggatcaggaagtcatttcagaaaagaagatatgcttcttaaacaaggtcagatgtatatggcagactcacagtgtacttccccaggtataccagcccatatgcaaagcagatctatgttaagacctctggaactatctttacccagtcaaacgtcatactctgaaaatgaaattttaaagaaagagttagaagcaatgcgaactttctgtgagtcagcaaaacaagaccgactgaagctccaaaatgaactggcacacaaagtggcagaatgcaaagctttagcattagaatgtgaaagggtcaaggaggattcagatgaacagataaagcaattagaagatgcattaaaagatgtgcagaagaggatgtatgagtcagaaggtaaagttaaacaaatgcagacccattttcttgcccttaaagaacacttaacaagtgaagcagcctcagggaatcacagactaaccgaggaactgaaggatcagttgaaagacttgaaagtaaaatatgaaggtgcttcagcagaagtggggaaattaagaaaccaaatcaaacaaaatgagatgatagtagaagagtttaagagggatgaaggcaagctgatagaagaaaataagcgattacagaaggaacttagtatgtgtgaaatggagcgagagaagaaaggaagaaaggtcacagagatggaaggccaggcaaaagaattgtcagcgaagttggccctttccattccagctgaaaaatttgaaaacatgaagagctcattatcaaatgaagtgaatgagaaagcaaaaaaattagtagaaatggaaagagaacatgaaaaatcacttagtgaaattagacagttaaagagagaacttgagaatgttaaggccaagcttgctcagcacgtcaaaccagaggaacatgaacaggttaagagcagattagaacagaaatcaggagaacttgggaagaagatcactgagttaacattgaaaaatcagacactacaaaaggaaattgaaaaagtttatttggataataagctcctcaaggagcaagcacataacttaacaattgaaatgaaaaatcattatgttcctttaaaagtaagtgaagacatgaaaaagtcacatgatgcaattattgatgatcttaatagaaagcttttagatgtaacacaaaaatatacagaaaagaagttggaaatggagaaattgctactggaaaatgacagcttaagtaaggatgtaagccgcctagaaactgtgtttgtacctcctgagaaacatgaaaaagagataatagctctgaaatccaatattgttgaacttaagaaacagctgtctgaacttaagaaaaaatgtggtgaagaccaggagaaaatacacgctctcacatctgaaaacactaacttgaagaagatgatgagtaatcagtatgtgccagttaaaacccatgaagaggttaaaatgacactgaatgacacgttagccaaaactaacagagaattattagatgtgaagaaaaaatttgaagatataaatcaggaatttgtaaaaataaaagataagaatgaaatattaaaaagaaacctggaaaacactcagaaccaaataaaagctgagtacatcagcctggcagagcacgaggcaaagatgagctcgctaagtcagagcatgagaaaggtgcaggatagtaatgctgaaatcttggccaactacagaaaaggccaagaagagattgtgacactgcatgccgaaattaaagcccagaagaaggagctcgacacaatacaagaatgcattaaggtaaaatacgccccaattgtcagctttgaggagtgcgagagaaaatttaaagcaacagagaaagaactaaaagaccagttatcagagcagacacaaaagtatagtgtcagtgaagaagaagtcaagaaaaacaagcaagagaatgacaagttaaagaaggagatttttacccttcagaaagatttgagagataagacagttctcattgagaagtctcatgaaatggaaagagcattaagcagaaaaacagacgagctaaacaaacagttaaaagacttgtcacagaaatacacggaagtaaagaatgtgaaagagaagctagtagaagaaaatgccaaacagacttctgagatacttgcagtgcaaaatcttttgcaaaaacaacatgttccattggaacaggttgaggctctgaaaaaatctcttaatggcacaattgaaaatctaaaggaagaactgaagagtatgcaaaggtgttacgagaaagagcagcagacagtgaccaaactgcatcaattgttggagaatcaaaagaactcttctgtacccctggcagagcatttgcagattaaagaagcatttgagaaagaagttggaatcataaaagccagcttgagagaaaaggaagaagaaagccaaaacaaaatggaagaagtctccaaacttcagtcggaggttcagaatactaaacaagcattaaaaaaattagagactagagaggtagttgacttgtctaaatataaagcaacaaaaagtgatttggagacacagatttctagcttaaatgaaaaattggccaatctgaatagaaagtatgaggaagtatgtgaggaagttttgcatgccaaaaagaaggaaatatctgcaaaagatgagaaggaattactgcatttcagcattgagcaagaaattaaggatcagaaggaacgatgtgataagtccttaacaacaatcacagagttacaaagaagaatacaagaatctgctaaacaaatagaagcaaaagataataagataactgaactgcttaatgatgtggaaagattaaaacaggcactcaatggcctttcccaactcacctacacaagtgggaaccccaccaagaggcagagccagctgattgacactctgcagcaccaagtgaaatctctggagcaacagctggccgatgctgacagacagcaccaagaagtaattgcaatttatcggacacaccttcttagtgctgcacagggtcacatggatgaagatgttcaggaggctctgctccagatcatacaaatgcggcaggggcttgtgtgctagccgttagcactgactgccagtatctgttttatcttgctggtgctgaacattctttgtgcaactccatggtctttctgggccttactgtgctggtataattaaaataaaatatattttgttctat

SEQ ID NO: 34002 - DNA, 6910 bp, Homo sapiens
  source 1..6910: mol_type = unassigned DNA
ctctttacacagaacagtttaacttttgtgcttctgggcagaggtatggtccttgggacagttctccttccacctaatagttatggcagagatcaggacacttcactttgctgcctgtgcactgaggcctcagaatctgctctacccgacttaacagatcactttgccagctgtgtggaggatggatttgagggagacaagactggaggcagtagtccagaagctttgcatcgtccctatggttgtgatgttgaaccccaggcactaaatgaggctatcaggtggagctccaaggagaacttgctcggagccactgagagtgaccctaatctcttcgttgcactttatgattttgtagcaagtggtgataacacactcagcatcactaaaggtgaaaagctacgagtccttggttacaaccagaatggtgagtggagtgaagttcgctctaagaatgggcagggctgggtgccaagcaactacatcaccccagtgaacagcctggaaaaacactcctggtaccatggacctgtgtcacgcagtgcagctgagtatctgctcagcagtctaatcaatggcagcttcctggtgcgagaaagtgagagtagccctgggcagctgtccatctcgctcaggtacgagggacgtgtgtatcactacaggatcaataccactgcagatggcaaggtgtatgtgactgctgagagccgcttcagcaccttggcagagcttgtacaccatcactccacagtggctgatgggctggtgacaacattacactacccagcacccaagtgtaataagcctacagtctatggtgtgtcccccatccacgacaaatgggaaatggagcgaacagatattaccatgaagcacaaacttgggggcggtcagtatggagaggtttacgttggcgtctggaagaaatacagccttacagttgctgtgaaaacattgaaggaagataccatggaggtagaagaattcctgaaagaagctgcagtaatgaaggaaatcaagcatcctaatctggtacaacttttaggtgtgtgtactttggagccaccattttacattgtgactgaatacatgccatacgggaatttgctggattacctccgagaatgcaaccgagaagaggtgactgcagttgtgctgctctacatggccactcagatttcttctgcaatggagtacttagagaagaagaatttcatccatagagatcttgcagctcgtaactgcctagtgggagaaaaccatgtggtaaaagtggctgactttggcttaagtagattgatgactggagacacttatactgctcatgctggagccaaatttcctattaagtggacagcaccagagagtcttgcctacaataccttctcaattaaatctgacgtctgggcttttggggtattgttgtgggaaattgctacctatggaatgtcaccatatccaggtattgacctgtctcaggtctatgacctactagaaaaaggatatcgaatggaacagcctgagggatgcccccctaaggtttatgaacttatgagagcatgctggaagtggagccctgccgataggccctcttttgctgaaacacaccaagcttttgaaaccatgttccatgactccagcatttctgaagaggtagctgaggagcttgggagagccgcctcctcgtcatctgttgttccatacctgccccggctacctatacttccttccaagactcggacactgaagaaacaggtggagaacaaggagaacattgaaggggcacaagatgccacagaaaattctgcttccagtttagcaccagggttcatcagaggtgcacaggcctctagtggatccccagcactgcctcgaaagcaaagagacaagtcacccagcagcctcttggaagatgccaaagagacatgcttcaccagggataggaaggggggcttcttcagctccttcatgaagaagagaaatgctcctacaccccccaaacgcagcagctccttccgagaaatggagaatcagccccataagaaatacgaactcacggggcttccagagcaggataggatggcaatgacccttcccaggaactgccagaggtccaaactccagctggaaaggacagtgtccacctcttctcagccagaagagaatgtggacagggccaatgacatgcttccaaaaaaatcagaggaaagtgctgctccaagcagggagagaccaaaagccaagttattgcccagaggagccacagctcttcctctcagaacaccctctggggatctagccattacagagaaggaccctccaggggtgggagtggctggagtggcagctgcccccaagggtaaagagaagaatggtggggcacgacttgggatggctggagttccagaggatggagagcagccgggctggccttctccagccaaggctgcccccgtcctcccaaccactcacaaccacaaagtgccagtccttatctcacccactctgaaacacactccagctgacgtgcagctcattggcacagactctcaggggaataaattcaagctcttatctgagcatcaggtcacatcctctggagacaaggaccgaccccgacgggtaaaaccaaagtgtgccccacccccaccaccagtgatgagactactgcagcatccgtccatctgctcagaccctacagaagagccaactgccctaactgcaggacagtccacatcagaaacacaggaaggaggaaagaaggcagctctgggcgcagtgcccatcagtgggaaagctgggaggccagtgatgcctccacctcaagtgcctctgcccacatcttccatctcgccagccaaaatggccaatggcacagcaggtactaaagtggctctgagaaaaaccaaacaggccgctgagaaaatctcagcagacaaaatcagcaaagaggccctgctggaatgtgctgacctactgtccagtgcactcacggaacctgtgcccaacagccagctggtagacactggacaccagctgcttgactactgctcaggctatgtggactgcatccctcaaactcgcaacaaatttgccttccgagaggctgtgagcaaactggaactcagcctgcaggagctacaggtttcttcagcagctgctggtgtgcccgggacaaaccctgtccttaataacttattgtcatgtgtacaggaaatcagtgatgtggtgcagaggtagccactgttagcctggtgggaaaatgcacacatttctgaggggagagggaaaaggacttgttttcctgtgttcttgttttcagaaaatgaaagactcatacttgagtgtgtttatgtgaagtacctcagatccctgagttctcacgtttacagtttcatctcaaaaataagaagcaaaccacataagtataggagaggtaaattaagtgggggcaaggcagtagtggacagggttggaaactgcactggaaaatagggaacatgtgtatgtcataaggaaggcaatgcagcccatccctacctggaatgctgggaagtgctaggcagggctgctctcagcaagactgcagcagctgcacccagacctggggctctggtaggtactaatggtgattatgctccaatttacctaatgaatttggtgggacagcagaaaagaaagctgggaatgtaccaagagaaatttttgttcagggctgttggaagtagctgttagccttgcttccacaaggccattgctgctgtaataagaactgcaaatcagagtgctacaacataaaactgggaaatatggccctatctgaatgcctctgtcctattttccgctggtgtatcagttagtgcaggaagtaaagaatgctggaaagttgaatcagaaattgaaaaccttctaaaatcttacacagattagcagaagtcacttctcccagtctggtatattatttcataatggaccaggatcggcttcctgcctgttggtggctatctgtaaaccataagtacaggggtctccctagtggttcttctctgtcttttgctgggcaggctgtcttcctttattcctggtagcattcagagcattaaccagtgttgattttgaaaatagtagtccctacaggttctcacaaaggaatgaatcctgttctgatacagttcccctgcatactgacatactggccaaggacttgagcagctgtgtatttttctttatcaactaaaataccagggagatggtcttttcttgaaacccagtggcctgtatgtgactgagaggaaaagctggcttggtcctaatggctgtttctctgtacctttcccttcccttaccaccttaagcccaatccaggtagagaatagggagaggcattctcctctctatggatttgaagtgaatcacccccacattattctcacatgcttttcttctctcacatattcctccctactcccccacccaatcattgtgcttatttgtacagatcttattgggaatattctttatttattttgtcatttcacttctattttaagaatgcataattgaaggagtagtcattttcagggagcaccaggtagaccctgggaacctaatgacttaatccttaaatatgttttgcccttgaaaaataggccttttccttccttccttagttataattgtggaagctaattaggatggcatggaagtgaatctaatgagttaggtattattaatgttcttggtatcgggtctaattccagttactgcttcattctctttttaaagctttatgaatacttcccccatcctccccaaggagagctcaatacacacatatttttattttattctctcaaaggaatattagcttaggaagataggaattcaacattgagcactgagttttcttctggctctgtcattgatacactgtcaaaccacagcctcatctcttaatctatttaattaaggtaacagtacatgttctcaagggtgttgcaagtaagtgtgcagctatcccttggagagcctctctggaaagctcttttagtgcagtgttgttatgctgaattgttttccattatcttatttgctgagtagaaaatattaatgaaattaagaattgttgagattatatgaattgggctagaatactaaggggaaaactatgttttgaatagagtttggcatttttgaccaagaacaaaattgagttttcattggaaagaaaggaaaccttgattcttaccattgctgctccaaaggaggcccaggttaagaggattagaggagacacgcggtgctgggcattcctggcaggtgttgggtgatccccgcagtatgtcacctgcagttgcagcacaggcagctagtgattgggttcatctcctcctagtggttggaagagaactcagatgtaaaaaccagcggtccttctcccaccttctttcctgccattcttgctcatcatacatgtccgtaaacttgaagaactcgttttagcagctagccttttaaggtcgaggatgggaaagctaaaactgtagaatattattatgctgctttttaggtttatccctgttgttgtgggatgcaagttaagggattgtaattgtttttcagggtttttttgttttttgttttttaagcaagggctctattttcccttgagagttctggaactaagccttggagaaacactactgagtgtatttaggctccctggttttcttgcccaacaacaatctgaagggtagggggtgggggctgtgtcttactcaggggcagcacctagctgtcttgcctacagtgggtgcacgatatataaatggaattgatttttgtcaacactgtcaagagtggcattgactattggagcataccccgtccacatgatgcttgaactatgtaacttcaggggttgagggctcaaggttcaggttaaagaggcactgtcaacttactatacaagcataatttaggtttttcctttttctacttgaaaaggaccagcttaaacacaaacccttatgtaaattaaaaggtttgaatccaaagcagagagaactgcttctggaaaagtgtagtttaattttaactattctaaaagcaatgagcaaaggcccttgtccaaggcgttgacagttttctaaagtggttatgctgtatatctggatgcatgcctttgggctgccactgcttgattcctttcatgtacagataatattacttcagtttagatttcccactttaaaatgcagtgatttgtgttgaatacatcttgattgtgctttacctaaagtattttcttaaaaggctttgtgtaaaatttaaatgtatatattttcctgtagacttccatcatgattttcagagattagccttaaaaaatttggccctaagaaattcattcagtgtttttctagatgacctctgtacatagaggtcattatagtggagaccctttaccagcagcattttaagatttaaattagatagaaagtttcttaggattcaactgaaaattggctagtaaaatatgtcccaggtaataaagcatgctgactttgctaaggcactgcccatttttatttaactaaagtcatggagattttgagtttaaaggatgcagtatagatagtggtttagtgtttaggctctaatgccagtctaaaaggcaagtcatttaaccttgggagcctcagtttcctcactgtaaaacagggataataatagtaactacctcagggttgttgtaaggattaaatgagatgatatttgtaagatacttagctcaagtgcctggcacacaatgagcacactctataaatgttctactactactattattaacacctagtctagggatgcacagcagaatcccctagggttaaaaaacaaaacaaaacaa

SEQ ID NO: 34003 - DNA, 2140 bp, Homo sapiens
  source 1..2140: mol_type = unassigned DNA
gctcggtggtttaaagatggcggcggcggtggcggcggcggcggcggcggcgttgggggcgcggagccgcgacaggaggagggaaaagcagaatctgtgagtcgcctggaggcagcgcggcggctgccgtgaggaggccgggtgcggagccgccggtggcccagccactcagggccagggcctgggctgggagggagagaccggagcagcgccaggagcccgaggccggagccgaggaggaatgtgaccaggggtcggcgggggcgcgggagtacgcgagagcagggatggggcagcaggtgggccgcgtcggggaagctccggggctccagcagcctcagccccgcgggatccggggcagcagtgcagccaggccctccggccgcaggcgggacccggcggggcgcaccacagagaccggcttcaatatcttcacccagcatgaagctttgcatcgtccctatggttgtgatgttgaaccccaggcactaaatgaggctatcaggtggagctccaaggagaacttgctcggagccactgagagtgaccctaatctcttcgttgcactttatgattttgtagcaagtggtgataacacactcagcatcactaaaggtgaaaagctacgagtccttggttacaaccagaatggtgagtggagtgaagttcgctctaagaatgggcagggctgggtgccaagcaactacatcaccccagtgaacagcctggaaaaacactcctggtaccatggacctgtgtcacgcagtgcagctgagtatctgctcagcagtctaatcaatggcagcttcctggtgcgagaaagtgagagtagccctgggcagctgtccatctcgctcaggtacgagggacgtgtgtatcactacaggatcaataccactgcagatggcaaggtgtatgtgactgctgagagccgcttcagcaccttggcagagcttgtacaccatcactccacagtggctgatgggctggtgacaacattacactacccagcacccaagtgtaataagcctacagtctatggtgtgtcccccatccacgacaaatgggaaatggagcgaacagatattaccatgaagcacaaacttgggggcggtcagtatggagaggtttacgttggcgtctggaagaaatacagccttacagttgctgtgaaaacattgaaggaagataccatggaggtagaagaattcctgaaagaagctgcagtaatgaaggaaatcaagcatcctaatctggtacaacttttaggtgtgtgtactttggagccaccattttacattgtgactgaatacatgccatacgggaatttgctggattacctccgagaatgcaaccgagaagaggtgactgcagttgtgctgctctacatggccactcagatttcttctgcaatggagtacttagagaagaagaatttcatccatagagatcttgcagctcgtaactgcctagtgggagaaaaccatgtggtaaaagtggctgactttggcttaagtagattgatgactggagacacttatactgctcatgctggagccaaatttcctattaagtggacagcaccagagagtcttgcctacaataccttctcaattaaatctgacgtctgggcttttggggtattgttgtgggaaattgctacctatggaatgtcaccatatccaggtattgacctgtctcaggtctatgacctactagaaaaaggatatcgaatggaacagcctgagggatgcccccctaaggtttatgaacttatgagagcatgctggaagtggagccctgccgataggccctcttttgctgaaacacaccaagcttttgaaaccatgttccatgactccagcatttctgaagttctcctacattgtgccaatcagacgtgcataacattgtgaaccaaaagacacagagcaggatgatgctagcaacgtattcatagtaactccaaactggaaacaacctaaacatccatcaagaggagaacaggtggattgtggtatattcacacgttggcatgctacacagcaatgagaacccctgccacatgcagcagcgtggacgaatctacacacatgatactgggcgaaagaagccagacaaaagagtacatactttatga

SEQ ID NO: 34004 - DNA, 11831 bp, Homo sapiens
  source 1..11831: mol_type = unassigned DNA
atggtccttgggacagttctccttccacctaatagttatggcagagatcaggacacttcactttgctgcctgtgcactgaggcctcagaatctgctctacccgacttaacagaagctttgcatcgtccctatggttgtgatgttgaaccccaggcactaaatgaggctatcaggtggagctccaaggagaacttgctcggagccactgagagtgaccctaatctcttcgttgcactttatgattttgtagcaagtggtgataacacactcagcatcactaaaggtgaaaagctacgagtccttggttacaaccagaatggtgagtggagtgaagttcgctctaagaatgggcagggctgggtgccaagcaactacatcaccccagtgaacagcctggaaaaacactcctggtaccatggacctgtgtcacgcagtgcagctgagtatctgctcagcagtctaatcaatggcagcttcctggtgcgagaaagtgagagtagccctgggcagctgtccatctcgctcaggtacgagggacgtgtgtatcactacaggatcaataccactgcagatggcaaggtgtatgtgactgctgagagccgcttcagcaccttggcagagcttgtacaccatcactccacagtggctgatgggctggtgacaacattacactacccagcacccaagtgtaataagcctacagtctatggtgtgtcccccatccacgacaaatgggaaatggagcgaacagatattaccatgaagcacaaacttgggggcggtcagtatggagaggtttacgttggcgtctggaagaaatacagccttacagttgctgtgaaaacattgaaggaagataccatggaggtagaagaattcctgaaagaagctgcagtaatgaaggaaatcaagcatcctaatctggtacaacttttaggtgtgtgtactttggagccaccattttacattgtgactgaatacatgccatacgggaatttgctggattacctccgagaatgcaaccgagaagaggtgactgcagttgtgctgctctacatggccactcagatttcttctgcaatggagtacttagagaagaagaatttcatccatagagatcttgcagctcgtaactgcctagtgggagaaaaccatgtggtaaaagtggctgactttggcttaagtagattgatgactggagacacttatactgctcatgctggagccaaatttcctattaagtggacagcaccagagagtcttgcctacaataccttctcaattaaatctgacgtctgggcttttggggtattgttgtgggaaattgctacctatggaatgtcaccatatccaggtattgacctgtctcaggtctatgacctactagaaaaaggatatcgaatggaacagcctgagggatgcccccctaaggtttatgaacttatgagagcatgctggaagtggagccctgccgataggccctcttttgctgaaacacaccaagcttttgaaaccatgttccatgactccagcatttctgaagaggtagctgaggagcttgggagagccgcctcctcgtcatctgttgttccatacctgccccggctacctatacttccttccaagactcggacactgaagaaacaggtggagaacaaggagaacattgaaggggcacaagatgccacagaaaattctgcttccagtttagcaccagggttcatcagaggtgcacaggcctctagtggatccccagcactgcctcgaaagcaaagagacaagtcacccagcagcctcttggaagatgccaaagagacatgcttcaccagggataggaaggggggcttcttcagctccttcatgaagaagagaaatgctcctacaccccccaaacgcagcagctccttccgagaaatggagaatcagccccataagaaatacgaactcacgggtaacttctcatctgttgcttctctacagcatgctgatgggttctctttcactcctgcccagcaagaggcgaatctggtgccacccaagtgctatggggggagctttgcacagaggaacctctgtaatgacgacggtggtgggggtgggggcagtggcactgctgggggtgggtggtctggcatcacaggcttctttacaccacgcttaatcaaaaagacactgggcttacgagcaggtaaacccacagccagtgatgacacttccaagccttttccaaggtcaaactctacatcttccatgtcctcagggcttccagagcaggataggatggcaatgacccttcccaggaactgccagaggtccaaactccagctggaaaggacagtgtccacctcttctcagccagaagagaatgtggacagggccaatgacatgcttccaaaaaaatcagaggaaagtgctgctccaagcagggagagaccaaaagccaagttattgcccagaggagccacagctcttcctctcagaacaccctctggggatctagccattacagagaaggaccctccaggggtgggagtggctggagtggcagctgcccccaagggtaaagagaagaatggtggggcacgacttgggatggctggagttccagaggatggagagcagccgggctggccttctccagccaaggctgcccccgtcctcccaaccactcacaaccacaaagtgccagtccttatctcacccactctgaaacacactccagctgacgtgcagctcattggcacagactctcaggggaataaattcaagctcttatctgagcatcaggtcacatcctctggagacaaggaccgaccccgacgggtaaaaccaaagtgtgccccacccccaccaccagtgatgagactactgcagcatccgtccatctgctcagaccctacagaagagccaactgccctaactgcaggacagtccacatcagaaacacaggaaggaggaaagaaggcagctctgggcgcagtgcccatcagtgggaaagctgggaggccagtgatgcctccacctcaagtgcctctgcccacatcttccatctcgccagccaaaatggccaatggcacagcaggtactaaagtggctctgagaaaaaccaaacaggccgctgagaaaatctcagcagacaaaatcagcaaagaggccctgctggaatgtgctgacctactgtccagtgcactcacggaacctgtgcccaacagccagctggtagacactggacaccagctgcttgactactgctcaggctatgtggactgcatccctcaaactcgcaacaaatttgccttccgagaggctgtgagcaaactggaactcagcctgcaggagctacaggtttcttcagcagctgctggtgtgcccgggacaaaccctgtccttaataacttattgtcatgtgtacaggaaatcagtgatgtggtgcagaggtagccactgttagcctggtgggaaaatgcacacatttctgaggggagagggaaaaggacttgttttcctgtgttcttgttttcagaaaatgaaagactcatacttgagtgtgtttatgtgaagtacctcagatccctgagttctcacgtttacagtttcatctcaaaaataagaagcaaaccacataagtataggagaggtaaattaagtgggggcaaggcagtagtggacagggttggaaactgcactggaaaatagggaacatgtgtatgtcataaggaaggcaatgcagcccatccctacctggaatgctgggaagtgctaggcagggctgctctcagcaagactgcagcagctgcacccagacctggggctctggtaggtactaatggtgattatgctccaatttacctaatgaatttggtgggacagcagaaaagaaagctgggaatgtaccaagagaaatttttgttcagggctgttggaagtagctgttagccttgcttccacaaggccattgctgctgtaataagaactgcaaatcagagtgctacaacataaaactgggaaatatggccctatctgaatgcctctgtcctattttccgctggtgtatcagttagtgcaggaagtaaagaatgctggaaagttgaatcagaaattgaaaaccttctaaaatcttacacagattagcagaagtcacttctcccagtctggtatattatttcataatggaccaggatcggcttcctgcctgttggtggctatctgtaaaccataagtacaggggtctccctagtggttcttctctgtcttttgctgggcaggctgtcttcctttattcctggtagcattcagagcattaaccagtgttgattttgaaaatagtagtccctacaggttctcacaaaggaatgaatcctgttctgatacagttcccctgcatactgacatactggccaaggacttgagcagctgtgtatttttctttatcaactaaaataccagggagatggtcttttcttgaaacccagtggcctgtatgtgactgagaggaaaagctggcttggtcctaatggctgtttctctgtacctttcccttcccttaccaccttaagcccaatccaggtagagaatagggagaggcattctcctctctatggatttgaagtgaatcacccccacattattctcacatgcttttcttctctcacatattcctccctactcccccacccaatcattgtgcttatttgtacagatcttattgggaatattctttatttattttgtcatttcacttctattttaagaatgcataattgaaggagtagtcattttcagggagcaccaggtagaccctgggaacctaatgacttaatccttaaatatgttttgcccttgaaaaataggccttttccttccttccttagttataattgtggaagctaattaggatggcatggaagtgaatctaatgagttaggtattattaatgttcttggtatcgggtctaattccagttactgcttcattctctttttaaagctttatgaatacttcccccatcctccccaaggagagctcaatacacacatatttttattttattctctcaaaggaatattagcttaggaagataggaattcaacattgagcactgagttttcttctggctctgtcattgatacactgtcaaaccacagcctcatctcttaatctatttaattaaggtaacagtacatgttctcaagggtgttgcaagtaagtgtgcagctatcccttggagagcctctctggaaagctcttttagtgcagtgttgttatgctgaattgttttccattatcttatttgctgagtagaaaatattaatgaaattaagaattgttgagattatatgaattgggctagaatactaaggggaaaactatgttttgaatagagtttggcatttttgaccaagaacaaaattgagttttcattggaaagaaaggaaaccttgattcttaccattgctgctccaaaggaggcccaggttaagaggattagaggagacacgcggtgctgggcattcctggcaggtgttgggtgatccccgcagtatgtcacctgcagttgcagcacaggcagctagtgattgggttcatctcctcctagtggttggaagagaactcagatgtaaaaaccagcggtccttctcccaccttctttcctgccattcttgctcatcatacatgtccgtaaacttgaagaactcgttttagcagctagccttttaaggtcgaggatgggaaagctaaaactgtagaatattattatgctgctttttaggtttatccctgttgttgtgggatgcaagttaagggattgtaattgtttttcagggtttttttgttttttgttttttaagcaagggctctattttcccttgagagttctggaactaagccttggagaaacactactgagtgtatttaggctccctggttttcttgcccaacaacaatctgaagggtagggggtgggggctgtgtcttactcaggggcagcacctagctgtcttgcctacagtgggtgcacgatatataaatggaattgatttttgtcaacactgtcaagagtggcattgactattggagcataccccgtccacatgatgcttgaactatgtaacttcaggggttgagggctcaaggttcaggttaaagaggcactgtcaacttactatacaagcataatttaggtttttcctttttctacttgaaaaggaccagcttaaacacaaacccttatgtaaattaaaaggtttgaatccaaagcagagagaactgcttctggaaaagtgtagtttaattttaactattctaaaagcaatgagcaaaggcccttgtccaaggcgttgacagttttctaaagtggttatgctgtatatctggatgcatgcctttgggctgccactgcttgattcctttcatgtacagataatattacttcagtttagatttcccactttaaaatgcagtgatttgtgttgaatacatcttgattgtgctttacctaaagtattttcttaaaaggctttgtgtaaaatttaaatgtatatattttcctgtagacttccatcatgattttcagagattagccttaaaaaatttggccctaagaaattcattcagtgtttttctagatgacctctgtacatagaggtcattatagtggagaccctttaccagcagcattttaagatttaaattagatagaaagtttcttaggattcaactgaaaattggctagtaaaatatgtcccaggtaataaagcatgctgactttgctaaggcactgcccatttttatttaactaaagtcatggagattttgagtttaaaggatgcagtatagatagtggtttagtgtttaggctctaatgccagtctaaaaggcaagtcatttaaccttgggagcctcagtttcctcactgtaaaacagggataataatagtaactacctcagggttgttgtaaggattaaatgagatgatatttgtaagatacttagctcaagtgcctggcacacaatgagcacactctataaatgttctactactactattattaacacctagtctagggatgcacagcagaatcccctagggttaaaaaacaaaacaaaacaaacaaaaaaaactgacggaatagccccactccagatcagaattcccagtgggctggggtctcggccagtgtattctccagtaatctcgccaggtgtttgaaacacccagtgctatctgaaaactatcagtaccccaaccctttggtttatagattaagaaactagcagaagatggttaaattacttgcctattgtctcagaacggttaattagtggcggagccaaggctagaattcaagtctcttgactttatggttgtggggtctttccaccatacctgctgccatgtgagacactgcaaaaaagtggctcagaccgacaatcagcctgtgtggtgctgcacactttctaaagcacatgctcctgacactttgaccttaaggggcttgaatgtggagtaatgggaacacaagccaagcaagcactcagtagaattcagtcatttaaaaaattcaatggggtcattcttttggacagacctcagcaacacagcaatgtgcactttgtagtaaagaaataccaacttgagtttttaaaaaacctagttagtcctacattcccttttctttaaaaaaactttattgttcacattattttaatgactatgagataatgtatatgacagcactttgagaaaatatcaactgtaatataactataaggttgtagtattgtctgtttaaaagataagacagttgattcaatgtggatggaccctgtggggtacctgaaaatgtagatacgtaagaatcacctctgtcatttatcacatttagaaatatgaaactgcttaacaggtatgagcaggtatagcaagtgtttgctaaagttgtagttcagagctgaattacttcaggaaactagggaccaactttttggtttaattccgatctttaaaaagtaagaatgtgtactcactccagaacacagaagctcttccaaggaccttgactcaagaaggatgaggtcctcttactcttctccatttatccactatatgcttggccatttatcctaaatgtggtgggaacagacttgttatctgttgatgttgacagtgtcttttttaacctatgtcctgcatagttttgttaggtttacagggggaggtggatggccataaaaccagtgcactttgggaattacttttctaggatttcctaccagttataaatgacattgacatttgtcatcttttttttctttttctaaaaagaatagctgaatttaattcacctattataaaatactcaaaagtaaattgccttggtggccacttctgaattatagctacatttcattatgaccccttctgctcccttccattttgctactgatgtcattcttgttatcaggctgtgcccctaccaggagttcatattgggttgacagggttatctatatttttgttcttgatttttgagtttcatcatcttgcattaaattgttccacctggatttggggttcatctctgtgccctaaggatctgctatgaccaatcctctttttgtaggtgggtctctggcttaagtattgataggcttcagcggtttgtgtctctgtcttagcttgtatcaagccagtagtagctcacttcctttgtaaattcctgcttcagtctgggatccgtaggagtatgtgagaacttctgaaacgtctccaactcttaacagtcaagatatctatatcatttggatagagttctggttttccaactactagacttaaagaaattctggccgggtgcggtggctcacgcctgtaatcccagcactttggggggctgaggcgggtggatcacgaggtcaggagattgagaccatcctggctaacacggtgaaaccccacctctactaaaaatacaaaaacttagctgggcgtggtggcgggcgcctgtagtcccagctactggggaggctgaggcaggagaatggcgtgaacccaggaggcggagcttgcagtgagcccagatcgcgccactgcactccagcctgggtgacagtgagactccgtctcaaaaaaaaaaaaaaaaaaaaaaaaaaaaaaaaaaagaaattctaatgcaaagcttgctttttttttcttttttccagcaagccagtagtaatagttattgttacttgctctgttcagcacaactgtagttcacttgaacttcactgtcattccctacgctcctctcttactgagaagcatgggtgggattcagggctgtgggacaagctacagcctactctggagcactcacccccatgactcagtccagcctgtctcttgggaagtttattgcaatgtgcagacggatgaatttctgcttttcatgccacctctctgaggtatgtattctatcttgagtatgtacaagatgataccttttggctgggcacagtggctcgtgcctgtaatcccagcactttgggagaccaagatgggcggatcacttgaggtcaggagtttgagaccagcctggccaacatggtgaaaccccgtctctactaaaaatataaaaattagccgggcgtagtacatgcctgtaatcccagctactcccgaggctgaggcagaattgcttgaacccaggaggcggaggttgcagtgagctgagatcgcgccgctgcactccagcctaagtgacagagtgagacacgttaagaagaaaaaaaaaaaaaaggataccttcatttctgactcaatatcctagatccaaaggacaggaaattagggaaggcttcaccctgtgggatcaagataagaagatcccatacttcttcccaggtaaggaggcctgtggcaggtcatgattcaaagctgacttggaatggcagaaactgctgagaggccacccttggagatttgtgccttcaaagatgggtttcatgagtctcagagaggaaaagacttgtcagctgggttgattttgcatgattattgaactagagctggtagacacgagcttctcagatggcagtggccagatcctccatctgtgagaatccgccacttgaagtggtttcctgagagtgttcacttggcagttgctgcgtttctcaagcccacctggcgaggtctcgccggacccttccctccaagtgcacttacttcttcatccccatgtacatctctaactttgaaattgtttacctctcctacaaaaatcttaccttttgacctgagcagagtagcaaagccctgttcactctgagggagcagctggcgtgttgaaggggaaaggccaggcacagcactgtcctcagaccacaccatatttggagcagaattgtgatacatgtcatctgtgtctattctggaaggttctttgttcatcactgtactcgcatcagcaaattttcagggtcctacctgtcactccaggctactgagctgaaccctcagaagctgaggtctccgagcatgctaagtaaccttttagaaaagctggaggcaaactgtcgaatgctagcaggctttatgaaaggaaacataaggagtttgtgtagtcagaacttgcttaaatttgcttcggaattaggcaccataaactttagttggagaatgggacttaaattttcacatatatgtatacttaattttcagcaattatgacacaataaaaagaatatgcaaatttattgttgtttcagaaggttttgcaggactgggaacgctttagtgtcatcaacagtaaacctcagatactgttctgcacagttcagaagtaccataccaggtattgtgagtggcaagaacgccaggggacagagatgcttctggtagatgagggccagagaaaccagctctcctccattttgacagcaatttctcactgtggccatttggcctccattatgttttgagaggaatttcttgagatcttgagaaatcaccatgattaggccaattgtcaatcagtattcagaaactagaaaggaacaatgagatacttgtttatggttctttagggcatatgtttgaaaaccctctcatctcagatctgtatagctggtgtgtgtttgtgtccataaatacacgtgcattgctgtcgtgcccattaagaaagggggagtaagtaaaagaggaatcgctcagatctttccttggatgaacagcagtggcgtggttggtgtgttgactgtgaacaggctgacttagctgttgatgtatactcagaacctccatctcctcccagaccctgcacttttccttctctgcagtctgattctctaatgactgtcactggacaaaccccagttttatgctcgcttagtaaaaataagtttaaacatttcatggtggttgacagaactttgtccccaaacatgcggattcaattctttaaaactcgttgaacgtttataccaaaggtcccgccccgcaggtgtgtatgtggtgcacagagggtgaggtttggagcatcgggcactgtgtgcattgctaaggggacatagtgagacaatgtgggatttaactaaaaacacatcaattgtgtgtcacattaccagtgttgtcaggtatttgttcttaattgttattgtaatatattttcagttgtttttctaatttaattctctccgtctgttgtctgactgtgaactgctaacagtgttaaacttgatgtaaataaatgaggcccttgaaagggactgctttctctgtcttctcacaaggtttgccaagttgtgttctgttttaaataaaggttgcaatattttattggcaaagt

SEQ ID NO: 34005 - DNA, 12144 bp, Homo sapiens
  source 1..12144: mol_type = unassigned DNA
aaaagcagaatctgtgagtcgcctggaggcagcgcggcggctgccgtgaggaggccgggtgcggagccgccggtggcccagccactcagggccagggcctgggctgggagggagagaccggagcagcgccaggagcccgaggccggagccgaggaggaatgtgaccaggggtcggcgggggcgcgggagtacgcgagagcagggatggggcagcaggtgggccgcgtcggggaagctccggggctccagcagcctcagccccgcgggatccggggcagcagtgcagccaggccctccggccgcaggcgggacccggcggggcgcaccacagagaccggcttcaatatcttcacccagcatgatcactttgccagctgtgtggaggatggatttgagggagacaagactggaggcagtagtccagaagctttgcatcgtccctatggttgtgatgttgaaccccaggcactaaatgaggctatcaggtggagctccaaggagaacttgctcggagccactgagagtgaccctaatctcttcgttgcactttatgattttgtagcaagtggtgataacacactcagcatcactaaaggtgaaaagctacgagtccttggttacaaccagaatggtgagtggagtgaagttcgctctaagaatgggcagggctgggtgccaagcaactacatcaccccagtgaacagcctggaaaaacactcctggtaccatggacctgtgtcacgcagtgcagctgagtatctgctcagcagtctaatcaatggcagcttcctggtgcgagaaagtgagagtagccctgggcagctgtccatctcgctcaggtacgagggacgtgtgtatcactacaggatcaataccactgcagatggcaaggtgtatgtgactgctgagagccgcttcagcaccttggcagagcttgtacaccatcactccacagtggctgatgggctggtgacaacattacactacccagcacccaagtgtaataagcctacagtctatggtgtgtcccccatccacgacaaatgggaaatggagcgaacagatattaccatgaagcacaaacttgggggcggtcagtatggagaggtttacgttggcgtctggaagaaatacagccttacagttgctgtgaaaacattgaaggaagataccatggaggtagaagaattcctgaaagaagctgcagtaatgaaggaaatcaagcatcctaatctggtacaacttttaggtgtgtgtactttggagccaccattttacattgtgactgaatacatgccatacgggaatttgctggattacctccgagaatgcaaccgagaagaggtgactgcagttgtgctgctctacatggccactcagatttcttctgcaatggagtacttagagaagaagaatttcatccatagagatcttgcagctcgtaactgcctagtgggagaaaaccatgtggtaaaagtggctgactttggcttaagtagattgatgactggagacacttatactgctcatgctggagccaaatttcctattaagtggacagcaccagagagtcttgcctacaataccttctcaattaaatctgacgtctgggcttttggggtattgttgtgggaaattgctacctatggaatgtcaccatatccaggtattgacctgtctcaggtctatgacctactagaaaaaggatatcgaatggaacagcctgagggatgcccccctaaggtttatgaacttatgagagcatgctggaagtggagccctgccgataggccctcttttgctgaaacacaccaagcttttgaaaccatgttccatgactccagcatttctgaagaggtagctgaggagcttgggagagccgcctcctcgtcatctgttgttccatacctgccccggctacctatacttccttccaagactcggacactgaagaaacaggtggagaacaaggagaacattgaaggggcacaagatgccacagaaaattctgcttccagtttagcaccagggttcatcagaggtgcacaggcctctagtggatccccagcactgcctcgaaagcaaagagacaagtcacccagcagcctcttggaagatgccaaagagacatgcttcaccagggataggaaggggggcttcttcagctccttcatgaagaagagaaatgctcctacaccccccaaacgcagcagctccttccgagaaatggagaatcagccccataagaaatacgaactcacgggtaacttctcatctgttgcttctctacagcatgctgatgggttctctttcactcctgcccagcaagaggcgaatctggtgccacccaagtgctatggggggagctttgcacagaggaacctctgtaatgacgacggtggtgggggtgggggcagtggcactgctgggggtgggtggtctggcatcacaggcttctttacaccacgcttaatcaaaaagacactgggcttacgagcaggtaaacccacagccagtgatgacacttccaagccttttccaaggtcaaactctacatcttccatgtcctcagggcttccagagcaggataggatggcaatgacccttcccaggaactgccagaggtccaaactccagctggaaaggacagtgtccacctcttctcagccagaagagaatgtggacagggccaatgacatgcttccaaaaaaatcagaggaaagtgctgctccaagcagggagagaccaaaagccaagttattgcccagaggagccacagctcttcctctcagaacaccctctggggatctagccattacagagaaggaccctccaggggtgggagtggctggagtggcagctgcccccaagggtaaagagaagaatggtggggcacgacttgggatggctggagttccagaggatggagagcagccgggctggccttctccagccaaggctgcccccgtcctcccaaccactcacaaccacaaagtgccagtccttatctcacccactctgaaacacactccagctgacgtgcagctcattggcacagactctcaggggaataaattcaagctcttatctgagcatcaggtcacatcctctggagacaaggaccgaccccgacgggtaaaaccaaagtgtgccccacccccaccaccagtgatgagactactgcagcatccgtccatctgctcagaccctacagaagagccaactgccctaactgcaggacagtccacatcagaaacacaggaaggaggaaagaaggcagctctgggcgcagtgcccatcagtgggaaagctgggaggccagtgatgcctccacctcaagtgcctctgcccacatcttccatctcgccagccaaaatggccaatggcacagcaggtactaaagtggctctgagaaaaaccaaacaggccgctgagaaaatctcagcagacaaaatcagcaaagaggccctgctggaatgtgctgacctactgtccagtgcactcacggaacctgtgcccaacagccagctggtagacactggacaccagctgcttgactactgctcaggctatgtggactgcatccctcaaactcgcaacaaatttgccttccgagaggctgtgagcaaactggaactcagcctgcaggagctacaggtttcttcagcagctgctggtgtgcccgggacaaaccctgtccttaataacttattgtcatgtgtacaggaaatcagtgatgtggtgcagaggtagccactgttagcctggtgggaaaatgcacacatttctgaggggagagggaaaaggacttgttttcctgtgttcttgttttcagaaaatgaaagactcatacttgagtgtgtttatgtgaagtacctcagatccctgagttctcacgtttacagtttcatctcaaaaataagaagcaaaccacataagtataggagaggtaaattaagtgggggcaaggcagtagtggacagggttggaaactgcactggaaaatagggaacatgtgtatgtcataaggaaggcaatgcagcccatccctacctggaatgctgggaagtgctaggcagggctgctctcagcaagactgcagcagctgcacccagacctggggctctggtaggtactaatggtgattatgctccaatttacctaatgaatttggtgggacagcagaaaagaaagctgggaatgtaccaagagaaatttttgttcagggctgttggaagtagctgttagccttgcttccacaaggccattgctgctgtaataagaactgcaaatcagagtgctacaacataaaactgggaaatatggccctatctgaatgcctctgtcctattttccgctggtgtatcagttagtgcaggaagtaaagaatgctggaaagttgaatcagaaattgaaaaccttctaaaatcttacacagattagcagaagtcacttctcccagtctggtatattatttcataatggaccaggatcggcttcctgcctgttggtggctatctgtaaaccataagtacaggggtctccctagtggttcttctctgtcttttgctgggcaggctgtcttcctttattcctggtagcattcagagcattaaccagtgttgattttgaaaatagtagtccctacaggttctcacaaaggaatgaatcctgttctgatacagttcccctgcatactgacatactggccaaggacttgagcagctgtgtatttttctttatcaactaaaataccagggagatggtcttttcttgaaacccagtggcctgtatgtgactgagaggaaaagctggcttggtcctaatggctgtttctctgtacctttcccttcccttaccaccttaagcccaatccaggtagagaatagggagaggcattctcctctctatggatttgaagtgaatcacccccacattattctcacatgcttttcttctctcacatattcctccctactcccccacccaatcattgtgcttatttgtacagatcttattgggaatattctttatttattttgtcatttcacttctattttaagaatgcataattgaaggagtagtcattttcagggagcaccaggtagaccctgggaacctaatgacttaatccttaaatatgttttgcccttgaaaaataggccttttccttccttccttagttataattgtggaagctaattaggatggcatggaagtgaatctaatgagttaggtattattaatgttcttggtatcgggtctaattccagttactgcttcattctctttttaaagctttatgaatacttcccccatcctccccaaggagagctcaatacacacatatttttattttattctctcaaaggaatattagcttaggaagataggaattcaacattgagcactgagttttcttctggctctgtcattgatacactgtcaaaccacagcctcatctcttaatctatttaattaaggtaacagtacatgttctcaagggtgttgcaagtaagtgtgcagctatcccttggagagcctctctggaaagctcttttagtgcagtgttgttatgctgaattgttttccattatcttatttgctgagtagaaaatattaatgaaattaagaattgttgagattatatgaattgggctagaatactaaggggaaaactatgttttgaatagagtttggcatttttgaccaagaacaaaattgagttttcattggaaagaaaggaaaccttgattcttaccattgctgctccaaaggaggcccaggttaagaggattagaggagacacgcggtgctgggcattcctggcaggtgttgggtgatccccgcagtatgtcacctgcagttgcagcacaggcagctagtgattgggttcatctcctcctagtggttggaagagaactcagatgtaaaaaccagcggtccttctcccaccttctttcctgccattcttgctcatcatacatgtccgtaaacttgaagaactcgttttagcagctagccttttaaggtcgaggatgggaaagctaaaactgtagaatattattatgctgctttttaggtttatccctgttgttgtgggatgcaagttaagggattgtaattgtttttcagggtttttttgttttttgttttttaagcaagggctctattttcccttgagagttctggaactaagccttggagaaacactactgagtgtatttaggctccctggttttcttgcccaacaacaatctgaagggtagggggtgggggctgtgtcttactcaggggcagcacctagctgtcttgcctacagtgggtgcacgatatataaatggaattgatttttgtcaacactgtcaagagtggcattgactattggagcataccccgtccacatgatgcttgaactatgtaacttcaggggttgagggctcaaggttcaggttaaagaggcactgtcaacttactatacaagcataatttaggtttttcctttttctacttgaaaaggaccagcttaaacacaaacccttatgtaaattaaaaggtttgaatccaaagcagagagaactgcttctggaaaagtgtagtttaattttaactattctaaaagcaatgagcaaaggcccttgtccaaggcgttgacagttttctaaagtggttatgctgtatatctggatgcatgcctttgggctgccactgcttgattcctttcatgtacagataatattacttcagtttagatttcccactttaaaatgcagtgatttgtgttgaatacatcttgattgtgctttacctaaagtattttcttaaaaggctttgtgtaaaatttaaatgtatatattttcctgtagacttccatcatgattttcagagattagccttaaaaaatttggccctaagaaattcattcagtgtttttctagatgacctctgtacatagaggtcattatagtggagaccctttaccagcagcattttaagatttaaattagatagaaagtttcttaggattcaactgaaaattggctagtaaaatatgtcccaggtaataaagcatgctgactttgctaaggcactgcccatttttatttaactaaagtcatggagattttgagtttaaaggatgcagtatagatagtggtttagtgtttaggctctaatgccagtctaaaaggcaagtcatttaaccttgggagcctcagtttcctcactgtaaaacagggataataatagtaactacctcagggttgttgtaaggattaaatgagatgatatttgtaagatacttagctcaagtgcctggcacacaatgagcacactctataaatgttctactactactattattaacacctagtctagggatgcacagcagaatcccctagggttaaaaaacaaaacaaaacaaacaaaaaaaactgacggaatagccccactccagatcagaattcccagtgggctggggtctcggccagtgtattctccagtaatctcgccaggtgtttgaaacacccagtgctatctgaaaactatcagtaccccaaccctttggtttatagattaagaaactagcagaagatggttaaattacttgcctattgtctcagaacggttaattagtggcggagccaaggctagaattcaagtctcttgactttatggttgtggggtctttccaccatacctgctgccatgtgagacactgcaaaaaagtggctcagaccgacaatcagcctgtgtggtgctgcacactttctaaagcacatgctcctgacactttgaccttaaggggcttgaatgtggagtaatgggaacacaagccaagcaagcactcagtagaattcagtcatttaaaaaattcaatggggtcattcttttggacagacctcagcaacacagcaatgtgcactttgtagtaaagaaataccaacttgagtttttaaaaaacctagttagtcctacattcccttttctttaaaaaaactttattgttcacattattttaatgactatgagataatgtatatgacagcactttgagaaaatatcaactgtaatataactataaggttgtagtattgtctgtttaaaagataagacagttgattcaatgtggatggaccctgtggggtacctgaaaatgtagatacgtaagaatcacctctgtcatttatcacatttagaaatatgaaactgcttaacaggtatgagcaggtatagcaagtgtttgctaaagttgtagttcagagctgaattacttcaggaaactagggaccaactttttggtttaattccgatctttaaaaagtaagaatgtgtactcactccagaacacagaagctcttccaaggaccttgactcaagaaggatgaggtcctcttactcttctccatttatccactatatgcttggccatttatcctaaatgtggtgggaacagacttgttatctgttgatgttgacagtgtcttttttaacctatgtcctgcatagttttgttaggtttacagggggaggtggatggccataaaaccagtgcactttgggaattacttttctaggatttcctaccagttataaatgacattgacatttgtcatcttttttttctttttctaaaaagaatagctgaatttaattcacctattataaaatactcaaaagtaaattgccttggtggccacttctgaattatagctacatttcattatgaccccttctgctcccttccattttgctactgatgtcattcttgttatcaggctgtgcccctaccaggagttcatattgggttgacagggttatctatatttttgttcttgatttttgagtttcatcatcttgcattaaattgttccacctggatttggggttcatctctgtgccctaaggatctgctatgaccaatcctctttttgtaggtgggtctctggcttaagtattgataggcttcagcggtttgtgtctctgtcttagcttgtatcaagccagtagtagctcacttcctttgtaaattcctgcttcagtctgggatccgtaggagtatgtgagaacttctgaaacgtctccaactcttaacagtcaagatatctatatcatttggatagagttctggttttccaactactagacttaaagaaattctggccgggtgcggtggctcacgcctgtaatcccagcactttggggggctgaggcgggtggatcacgaggtcaggagattgagaccatcctggctaacacggtgaaaccccacctctactaaaaatacaaaaacttagctgggcgtggtggcgggcgcctgtagtcccagctactggggaggctgaggcaggagaatggcgtgaacccaggaggcggagcttgcagtgagcccagatcgcgccactgcactccagcctgggtgacagtgagactccgtctcaaaaaaaaaaaaaaaaaaaaaaaaaaaaaaaaaaagaaattctaatgcaaagcttgctttttttttcttttttccagcaagccagtagtaatagttattgttacttgctctgttcagcacaactgtagttcacttgaacttcactgtcattccctacgctcctctcttactgagaagcatgggtgggattcagggctgtgggacaagctacagcctactctggagcactcacccccatgactcagtccagcctgtctcttgggaagtttattgcaatgtgcagacggatgaatttctgcttttcatgccacctctctgaggtatgtattctatcttgagtatgtacaagatgataccttttggctgggcacagtggctcgtgcctgtaatcccagcactttgggagaccaagatgggcggatcacttgaggtcaggagtttgagaccagcctggccaacatggtgaaaccccgtctctactaaaaatataaaaattagccgggcgtagtacatgcctgtaatcccagctactcccgaggctgaggcagaattgcttgaacccaggaggcggaggttgcagtgagctgagatcgcgccgctgcactccagcctaagtgacagagtgagacacgttaagaagaaaaaaaaaaaaaaggataccttcatttctgactcaatatcctagatccaaaggacaggaaattagggaaggcttcaccctgtgggatcaagataagaagatcccatacttcttcccaggtaaggaggcctgtggcaggtcatgattcaaagctgacttggaatggcagaaactgctgagaggccacccttggagatttgtgccttcaaagatgggtttcatgagtctcagagaggaaaagacttgtcagctgggttgattttgcatgattattgaactagagctggtagacacgagcttctcagatggcagtggccagatcctccatctgtgagaatccgccacttgaagtggtttcctgagagtgttcacttggcagttgctgcgtttctcaagcccacctggcgaggtctcgccggacccttccctccaagtgcacttacttcttcatccccatgtacatctctaactttgaaattgtttacctctcctacaaaaatcttaccttttgacctgagcagagtagcaaagccctgttcactctgagggagcagctggcgtgttgaaggggaaaggccaggcacagcactgtcctcagaccacaccatatttggagcagaattgtgatacatgtcatctgtgtctattctggaaggttctttgttcatcactgtactcgcatcagcaaattttcagggtcctacctgtcactccaggctactgagctgaaccctcagaagctgaggtctccgagcatgctaagtaaccttttagaaaagctggaggcaaactgtcgaatgctagcaggctttatgaaaggaaacataaggagtttgtgtagtcagaacttgcttaaatttgcttcggaattaggcaccataaactttagttggagaatgggacttaaattttcacatatatgtatacttaattttcagcaattatgacacaataaaaagaatatgcaaatttattgttgtttcagaaggttttgcaggactgggaacgctttagtgtcatcaacagtaaacctcagatactgttctgcacagttcagaagtaccataccaggtattgtgagtggcaagaacgccaggggacagagatgcttctggtagatgagggccagagaaaccagctctcctccattttgacagcaatttctcactgtggccatttggcctccattatgttttgagaggaatttcttgagatcttgagaaatcaccatgattaggccaattgtcaatcagtattcagaaactagaaaggaacaatgagatacttgtttatggttctttagggcatatgtttgaaaaccctctcatctcagatctgtatagctggtgtgtgtttgtgtccataaatacacgtgcattgctgtcgtgcccattaagaaagggggagtaagtaaaagaggaatcgctcagatctttccttggatgaacagcagtggcgtggttggtgtgttgactgtgaacaggctgacttagctgttgatgtatactcagaacctccatctcctcccagaccctgcacttttccttctctgcagtctgattctctaatgactgtcactggacaaaccccagttttatgctcgcttagtaaaaataagtttaaacatttcatggtggttgacagaactttgtccccaaacatgcggattcaattctttaaaactcgttgaacgtttataccaaaggtcccgccccgcaggtgtgtatgtggtgcacagagggtgaggtttggagcatcgggcactgtgtgcattgctaaggggacatagtgagacaatgtgggatttaactaaaaacacatcaattgtgtgtcacattaccagtgttgtcaggtatttgttcttaattgttattgtaatatattttcagttgtttttctaatttaattctctccgtctgttgtctgactgtgaactgctaacagtgttaaacttgatgtaaataaatgaggcccttgaaagggactgctttctctgtcttctcacaaggtttgccaagttgtgttctgttttaaataaaggttgcaatattttattggcaaagta

SEQ ID NO: 34006 - DNA, 3132 bp, Homo sapiens
  source 1..3132: mol_type = unassigned DNA
atggtccttgggacagttctccttccacctaatagttatggcagagatcaggacacttcactttgctgcctgtgcactgaggcctcagaatctgctctacccgacttaacagaagctttgcatcgtccctatggttgtgatgttgaaccccaggcactaaatgaggctatcaggtggagctccaaggagaacttgctcggagccactgagagtgaccctaatctcttcgttgcactttatgattttgtagcaagtggtgataacacactcagcatcactaaaggtgaaaagctacgagtccttggttacaaccagaatggtgagtggagtgaagttcgctctaagaatgggcagggctgggtgccaagcaactacatcaccccagtgaacagcctggaaaaacactcctggtaccatggacctgtgtcacgcagtgcagctgagtatctgctcagcagtctaatcaatggcagcttcctggtgcgagaaagtgagagtagccctgggcagctgtccatctcgctcaggtacgagggacgtgtgtatcactacaggatcaataccactgcagatggcaaggtgtatgtgactgctgagagccgcttcagcaccttggcagagcttgtacaccatcactccacagtggctgatgggctggtgacaacattacactacccagcacccaagtgtaataagcctacagtctatggtgtgtcccccatccacgacaaatgggaaatggagcgaacagatattaccatgaagcacaaacttgggggcggtcagtatggagaggtttacgttggcgtctggaagaaatacagccttacagttgctgtgaaaacattgaaggaagataccatggaggtagaagaattcctgaaagaagctgcagtaatgaaggaaatcaagcatcctaatctggtacaacttttaggtgtgtgtactttggagccaccattttacattgtgactgaatacatgccatacgggaatttgctggattacctccgagaatgcaaccgagaagaggtgactgcagttgtgctgctctacatggccactcagatttcttctgcaatggagtacttagagaagaagaatttcatccatagagatcttgcagctcgtaactgcctagtgggagaaaaccatgtggtaaaagtggctgactttggcttaagtagattgatgactggagacacttatactgctcatgctggagccaaatttcctattaagtggacagcaccagagagtcttgcctacaataccttctcaattaaatctgacgtctgggcttttggggtattgttgtgggaaattgctacctatggaatgtcaccatatccaggtattgacctgtctcaggtctatgacctactagaaaaaggatatcgaatggaacagcctgagggatgcccccctaaggtttatgaacttatgagagcatgctggaagtggagccctgccgataggccctcttttgctgaaacacaccaagcttttgaaaccatgttccatgactccagcatttctgaagaggtagctgaggagcttgggagagccgcctcctcgtcatctgttgttccatacctgccccggctacctatacttccttccaagactcggacactgaagaaacaggtggagaacaaggagaacattgaaggggcacaagatgccacagaaaattctgcttccagtttagcaccagggttcatcagaggtgcacaggcctctagtggatccccagcactgcctcgaaagcaaagagacaagtcacccagcagcctcttggaagatgccaaagagacatgcttcaccagggataggaaggggggcttcttcagctccttcatgaagaagagaaatgctcctacaccccccaaacgcagcagctccttccgagaaatggagaatcagccccataagaaatacgaactcacggggcttccagagcaggataggatggcaatgacccttcccaggaactgccagaggtccaaactccagctggaaaggacagtgtccacctcttctcagccagaagagaatgtggacagggccaatgacatgcttccaaaaaaatcagaggaaagtgctgctccaagcagggagagaccaaaagccaagttattgcccagaggagccacagctcttcctctcagaacaccctctggggatctagccattacagagaaggaccctccaggggtgggagtggctggagtggcagctgcccccaagggtaaagagaagaatggtggggcacgacttgggatggctggagttccagaggatggagagcagccgggctggccttctccagccaaggctgcccccgtcctcccaaccactcacaaccacaaagtgccagtccttatctcacccactctgaaacacactccagctgacgtgcagctcattggcacagactctcaggggaataaattcaagctcttatctgagcatcaggtcacatcctctggagacaaggaccgaccccgacgggtaaaaccaaagtgtgccccacccccaccaccagtgatgagactactgcagcatccgtccatctgctcagaccctacagaagagccaactgccctaactgcaggacagtccacatcagaaacacaggaaggaggaaagaaggcagctctgggcgcagtgcccatcagtgggaaagctgggaggccagtgatgcctccacctcaagtgcctctgcccacatcttccatctcgccagccaaaatggccaatggcacagcaggtactaaagtggctctgagaaaaaccaaacaggccgctgagaaaatctcagcagacaaaatcagcaaagaggccctgctggaatgtgctgacctactgtccagtgcactcacggaacctgtgcccaacagccagctggtagacactggacaccagctgcttgactactgctcaggctatgtggactgcatccctcaaactcgcaacaaatttgccttccgagaggctgtgagcaaactggaactcagcctgcaggagctacaggtttcttcagcagctgctggtgtgcccgggacaaaccctgtccttaataacttattgtcatgtgtacaggaaatcagtgatgtggtgcagaggtag

SEQ ID NO: 34007 - DNA, 3635 bp, Homo sapiens
  source 1..3635: mol_type = unassigned DNA
ctgggcagaggtatggtccttgggacagttctccttccacctaatagttatggcagagatcaggacacttcactttgctgcctgtgcactgaggcctcagaatctgctctacccgacttaacagatcactttgccagctgtgtggaggatggatttgagggagacaagactggaggcagtagtccagaagctttgcatcgtccctatggttgtgatgttgaaccccaggcactaaatgaggctatcaggtggagctccaaggagaacttgctcggagccactgagagtgaccctaatctcttcgttgcactttatgattttgtagcaagtggtgataacacactcagcatcactaaaggtgaaaagctacgagtccttggttacaaccagaatggtgagtggagtgaagttcgctctaagaatgggcagggctgggtgccaagcaactacatcaccccagtgaacagcctggaaaaacactcctggtaccatggacctgtgtcacgcagtgcagctgagtatctgctcagcagtctaatcaatggcagcttcctggtgcgagaaagtgagagtagccctgggcagctgtccatctcgctcaggtacgagggacgtgtgtatcactacaggatcaataccactgcagatggcaaggtgtatgtgactgctgagagccgcttcagcaccttggcagagcttgtacaccatcactccacagtggctgatgggctggtgacaacattacactacccagcacccaagtgtaataagcctacagtctatggtgtgtcccccatccacgacaaatgggaaatggagcgaacagatattaccatgaagcacaaacttgggggcggtcagtatggagaggtttacgttggcgtctggaagaaatacagccttacagttgctgtgaaaacattgaaggaagataccatggaggtagaagaattcctgaaagaagctgcagtaatgaaggaaatcaagcatcctaatctggtacaacttttaggtgtgtgtactttggagccaccattttacattgtgactgaatacatgccatacgggaatttgctggattacctccgagaatgcaaccgagaagaggtgactgcagttgtgctgctctacatggccactcagatttcttctgcaatggagtacttagagaagaagaatttcatccatagagatcttgcagctcgtaactgcctagtgggagaaaaccatgtggtaaaagtggctgactttggcttaagtagattgatgactggagacacttatactgctcatgctggagccaaatttcctattaagtggacagcaccagagagtcttgcctacaataccttctcaattaaatctgacgtctgggcttttggggtattgttgtgggaaattgctacctatggaatgtcaccatatccaggtattgacctgtctcaggtctatgacctactagaaaaaggatatcgaatggaacagcctgagggatgcccccctaaggtttatgaacttatgagagcatgctggaagtggagccctgccgataggccctcttttgctgaaacacaccaagcttttgaaaccatgttccatgactccagcatttctgaagaggtagctgaggagcttgggagagccgcctcctcgtcatctgttgttccatacctgccccggctacctatacttccttccaagactcggacactgaagaaacaggtggagaacaaggagaacattgaaggggcacaagatgccacagaaaattctgcttccagtttagcaccagggttcatcagaggtgcacaggcctctagtggatccccagcactgcctcgaaagcaaagagacaagtcacccagcagcctcttggaagatgccaaagagacatgcttcaccagggataggaaggggggcttcttcagctccttcatgaagaagagaaatgctcctacaccccccaaacgcagcagctccttccgagaaatggagaatcagccccataagaaatacgaactcacgggtaacttctcatctgttgcttctctacagcatgctgatgggttctctttcactcctgcccagcaagaggcgaatctggtgccacccaagtgctatggggggagctttgcacagaggaacctctgtaatgacgacggtggtgggggtgggggcagtggcactgctgggggtgggtggtctggcatcacaggcttctttacaccacgcttaatcaaaaagacactgggcttacgagcaggtaaacccacagccagtgatgacacttccaagccttttccaaggtcaaactctacatcttccatgtcctcagggcttccagagcaggataggatggcaatgacccttcccaggaactgccagaggtccaaactccagctggaaaggacagtgtccacctcttctcagccagaagagaatgtggacagggccaatgacatgcttccaaaaaaatcagaggaaagtgctgctccaagcagggagagaccaaaagccaagttattgcccagaggagccacagctcttcctctcagaacaccctctggggatctagccattacagagaaggaccctccaggggtgggagtggctggagtggcagctgcccccaagggtaaagagaagaatggtggggcacgacttgggatggctggagttccagaggatggagagcagccgggctggccttctccagccaaggctgcccccgtcctcccaaccactcacaaccacaaagtgccagtccttatctcacccactctgaaacacactccagctgacgtgcagctcattggcacagactctcaggggaataaattcaagctcttatctgagcatcaggtcacatcctctggagacaaggaccgaccccgacgggtaaaaccaaagtgtgccccacccccaccaccagtgatgagactactgcagcatccgtccatctgctcagaccctacagaagagccaactgccctaactgcaggacagtccacatcagaaacacaggaaggaggaaagaaggcagctctgggcgcagtgcccatcagtgggaaagctgggaggccagtgatgcctccacctcaagtgcctctgcccacatcttccatctcgccagccaaaatggccaatggcacagcaggtactaaagtggctctgagaaaaaccaaacaggccgctgagaaaatctcagcagacaaaatcagcaaagaggccctgctggaatgtgctgacctactgtccagtgcactcacggaacctgtgcccaacagccagctggtagacactggacaccagctgcttgactactgctcaggctatgtggactgcatccctcaaactcgcaacaaatttgccttccgagaggctgtgagcaaactggaactcagcctgcaggagctacaggtttcttcagcagctgctggtgtgcccgggacaaaccctgtccttaataacttattgtcatgtgtacaggaaatcagtgatgtggtgcagaggtagccactgttagcctggtgggaaaatgcacacatttctgaggggagagggaaaaggacttgttttcctgtgttcttgttttcagaaaatgaaagactcatacttgagtgtgtttatgtgaa

SEQ ID NO: 34008 - DNA, 3486 bp, Homo sapiens
  source 1..3486: mol_type = unassigned DNA
atggggcagcaggtgggccgcgtcggggaagctccggggctccagcagcctcagccccgcgggatccggggcagcagtgcagccaggccctccggccgcaggcgggacccggcggggcgcaccacagagaccggcttcaatatcttcacccagcatgaagctttgcatcgtccctatggttgtgatgttgaaccccaggcactaaatgaggctatcaggtggagctccaaggagaacttgctcggagccactgagagtgaccctaatctcttcgttgcactttatgattttgtagcaagtggtgataacacactcagcatcactaaaggtgaaaagctacgagtccttggttacaaccagaatggtgagtggagtgaagttcgctctaagaatgggcagggctgggtgccaagcaactacatcaccccagtgaacagcctggaaaaacactcctggtaccatggacctgtgtcacgcagtgcagctgagtatctgctcagcagtctaatcaatggcagcttcctggtgcgagaaagtgagagtagccctgggcagctgtccatctcgctcaggtacgagggacgtgtgtatcactacaggatcaataccactgcagatggcaaggtgtatgtgactgctgagagccgcttcagcaccttggcagagcttgtacaccatcactccacagtggctgatgggctggtgacaacattacactacccagcacccaagtgtaataagcctacagtctatggtgtgtcccccatccacgacaaatgggaaatggagcgaacagatattaccatgaagcacaaacttgggggcggtcagtatggagaggtttacgttggcgtctggaagaaatacagccttacagttgctgtgaaaacattgaaggaagataccatggaggtagaagaattcctgaaagaagctgcagtaatgaaggaaatcaagcatcctaatctggtacaacttttaggtgtgtgtactttggagccaccattttacattgtgactgaatacatgccatacgggaatttgctggattacctccgagaatgcaaccgagaagaggtgactgcagttgtgctgctctacatggccactcagatttcttctgcaatggagtacttagagaagaagaatttcatccatagagatcttgcagctcgtaactgcctagtgggagaaaaccatgtggtaaaagtggctgactttggcttaagtagattgatgactggagacacttatactgctcatgctggagccaaatttcctattaagtggacagcaccagagagtcttgcctacaataccttctcaattaaatctgacgtctgggcttttggggtattgttgtgggaaattgctacctatggaatgtcaccatatccaggtattgacctgtctcaggtctatgacctactagaaaaaggatatcgaatggaacagcctgagggatgcccccctaaggtttatgaacttatgagagcatgctggaagtggagccctgccgataggccctcttttgctgaaacacaccaagcttttgaaaccatgttccatgactccagcatttctgaagaggtagctgaggagcttgggagagccgcctcctcgtcatctgttgttccatacctgccccggctacctatacttccttccaagactcggacactgaagaaacaggtggagaacaaggagaacattgaaggggcacaagatgccacagaaaattctgcttccagtttagcaccagggttcatcagaggtgcacaggcctctagtggatccccagcactgcctcgaaagcaaagagacaagtcacccagcagcctcttggaagatgccaaagagacatgcttcaccagggataggaaggggggcttcttcagctccttcatgaagaagagaaatgctcctacaccccccaaacgcagcagctccttccgagaaatggagaatcagccccataagaaatacgaactcacgggtaacttctcatctgttgcttctctacagcatgctgatgggttctctttcactcctgcccagcaagaggcgaatctggtgccacccaagtgctatggggggagctttgcacagaggaacctctgtaatgacgacggtggtgggggtgggggcagtggcactgctgggggtgggtggtctggcatcacaggcttctttacaccacgcttaatcaaaaagacactgggcttacgagcaggtaaacccacagccagtgatgacacttccaagccttttccaaggtcaaactctacatcttccatgtcctcagggcttccagagcaggataggatggcaatgacccttcccaggaactgccagaggtccaaactccagctggaaaggacagtgtccacctcttctcagccagaagagaatgtggacagggccaatgacatgcttccaaaaaaatcagaggaaagtgctgctccaagcagggagagaccaaaagccaagttattgcccagaggagccacagctcttcctctcagaacaccctctggggatctagccattacagagaaggaccctccaggggtgggagtggctggagtggcagctgcccccaagggtaaagagaagaatggtggggcacgacttgggatggctggagttccagaggatggagagcagccgggctggccttctccagccaaggctgcccccgtcctcccaaccactcacaaccacaaagtgccagtccttatctcacccactctgaaacacactccagctgacgtgcagctcattggcacagactctcaggggaataaattcaagctcttatctgagcatcaggtcacatcctctggagacaaggaccgaccccgacgggtaaaaccaaagtgtgccccacccccaccaccagtgatgagactactgcagcatccgtccatctgctcagaccctacagaagagccaactgccctaactgcaggacagtccacatcagaaacacaggaaggaggaaagaaggcagctctgggcgcagtgcccatcagtgggaaagctgggaggccagtgatgcctccacctcaagtgcctctgcccacatcttccatctcgccagccaaaatggccaatggcacagcaggtactaaagtggctctgagaaaaaccaaacaggccgctgagaaaatctcagcagacaaaatcagcaaagaggccctgctggaatgtgctgacctactgtccagtgcactcacggaacctgtgcccaacagccagctggtagacactggacaccagctgcttgactactgctcaggctatgtggactgcatccctcaaactcgcaacaaatttgccttccgagaggctgtgagcaaactggaactcagcctgcaggagctacaggtttcttcagcagctgctggtgtgcccgggacaaaccctgtccttaataacttattgtcatgtgtacaggaaatcagtgatgtggtgcagaggtag

SEQ ID NO: 34009 - DNA, 3177 bp, Homo sapiens
  source 1..3177: mol_type = unassigned DNA
atggggcagcaggtgggccgcgtcggggaagctccggggctccagcagcctcagccccgcgggatccggggcagcagtgcagccaggccctccggccgcaggcgggacccggcggggcgcaccacagagaccggcttcaatatcttcacccagcatgaagctttgcatcgtccctatggttgtgatgttgaaccccaggcactaaatgaggctatcaggtggagctccaaggagaacttgctcggagccactgagagtgaccctaatctcttcgttgcactttatgattttgtagcaagtggtgataacacactcagcatcactaaaggtgaaaagctacgagtccttggttacaaccagaatggtgagtggagtgaagttcgctctaagaatgggcagggctgggtgccaagcaactacatcaccccagtgaacagcctggaaaaacactcctggtaccatggacctgtgtcacgcagtgcagctgagtatctgctcagcagtctaatcaatggcagcttcctggtgcgagaaagtgagagtagccctgggcagctgtccatctcgctcaggtacgagggacgtgtgtatcactacaggatcaataccactgcagatggcaaggtgtatgtgactgctgagagccgcttcagcaccttggcagagcttgtacaccatcactccacagtggctgatgggctggtgacaacattacactacccagcacccaagtgtaataagcctacagtctatggtgtgtcccccatccacgacaaatgggaaatggagcgaacagatattaccatgaagcacaaacttgggggcggtcagtatggagaggtttacgttggcgtctggaagaaatacagccttacagttgctgtgaaaacattgaaggaagataccatggaggtagaagaattcctgaaagaagctgcagtaatgaaggaaatcaagcatcctaatctggtacaacttttaggtgtgtgtactttggagccaccattttacattgtgactgaatacatgccatacgggaatttgctggattacctccgagaatgcaaccgagaagaggtgactgcagttgtgctgctctacatggccactcagatttcttctgcaatggagtacttagagaagaagaatttcatccatagagatcttgcagctcgtaactgcctagtgggagaaaaccatgtggtaaaagtggctgactttggcttaagtagattgatgactggagacacttatactgctcatgctggagccaaatttcctattaagtggacagcaccagagagtcttgcctacaataccttctcaattaaatctgacgtctgggcttttggggtattgttgtgggaaattgctacctatggaatgtcaccatatccaggtattgacctgtctcaggtctatgacctactagaaaaaggatatcgaatggaacagcctgagggatgcccccctaaggtttatgaacttatgagagcatgctggaagtggagccctgccgataggccctcttttgctgaaacacaccaagcttttgaaaccatgttccatgactccagcatttctgaagaggtagctgaggagcttgggagagccgcctcctcgtcatctgttgttccatacctgccccggctacctatacttccttccaagactcggacactgaagaaacaggtggagaacaaggagaacattgaaggggcacaagatgccacagaaaattctgcttccagtttagcaccagggttcatcagaggtgcacaggcctctagtggatccccagcactgcctcgaaagcaaagagacaagtcacccagcagcctcttggaagatgccaaagagacatgcttcaccagggataggaaggggggcttcttcagctccttcatgaagaagagaaatgctcctacaccccccaaacgcagcagctccttccgagaaatggagaatcagccccataagaaatacgaactcacggggcttccagagcaggataggatggcaatgacccttcccaggaactgccagaggtccaaactccagctggaaaggacagtgtccacctcttctcagccagaagagaatgtggacagggccaatgacatgcttccaaaaaaatcagaggaaagtgctgctccaagcagggagagaccaaaagccaagttattgcccagaggagccacagctcttcctctcagaacaccctctggggatctagccattacagagaaggaccctccaggggtgggagtggctggagtggcagctgcccccaagggtaaagagaagaatggtggggcacgacttgggatggctggagttccagaggatggagagcagccgggctggccttctccagccaaggctgcccccgtcctcccaaccactcacaaccacaaagtgccagtccttatctcacccactctgaaacacactccagctgacgtgcagctcattggcacagactctcaggggaataaattcaagctcttatctgagcatcaggtcacatcctctggagacaaggaccgaccccgacgggtaaaaccaaagtgtgccccacccccaccaccagtgatgagactactgcagcatccgtccatctgctcagaccctacagaagagccaactgccctaactgcaggacagtccacatcagaaacacaggaaggaggaaagaaggcagctctgggcgcagtgcccatcagtgggaaagctgggaggccagtgatgcctccacctcaagtgcctctgcccacatcttccatctcgccagccaaaatggccaatggcacagcaggtactaaagtggctctgagaaaaaccaaacaggccgctgagaaaatctcagcagacaaaatcagcaaagaggccctgctggaatgtgctgacctactgtccagtgcactcacggaacctgtgcccaacagccagctggtagacactggacaccagctgcttgactactgctcaggctatgtggactgcatccctcaaactcgcaacaaatttgccttccgagaggctgtgagcaaactggaactcagcctgcaggagctacaggtttcttcagcagctgctggtgtgcccgggacaaaccctgtccttaataacttattgtcatgtgtacaggaaatcagtgatgtggtgcagaggtag

SEQ ID NO: 34010 - DNA, 3240 bp, Homo sapiens
  source 1..3240: mol_type = unassigned DNA
atggggcagcaggtgggccgcgtcggggaagctccggggctccagcagcctcagccccgcgggatccggggcagcagtgcagccaggccctccggccgcaggcgggacccggcggggcgcaccacagagaccggcttcaatatcttcacccagcatgatcactttgccagctgtgtggaggatggatttgagggagacaagactggaggcagtagtccagaagctttgcatcgtccctatggttgtgatgttgaaccccaggcactaaatgaggctatcaggtggagctccaaggagaacttgctcggagccactgagagtgaccctaatctcttcgttgcactttatgattttgtagcaagtggtgataacacactcagcatcactaaaggtgaaaagctacgagtccttggttacaaccagaatggtgagtggagtgaagttcgctctaagaatgggcagggctgggtgccaagcaactacatcaccccagtgaacagcctggaaaaacactcctggtaccatggacctgtgtcacgcagtgcagctgagtatctgctcagcagtctaatcaatggcagcttcctggtgcgagaaagtgagagtagccctgggcagctgtccatctcgctcaggtacgagggacgtgtgtatcactacaggatcaataccactgcagatggcaaggtgtatgtgactgctgagagccgcttcagcaccttggcagagcttgtacaccatcactccacagtggctgatgggctggtgacaacattacactacccagcacccaagtgtaataagcctacagtctatggtgtgtcccccatccacgacaaatgggaaatggagcgaacagatattaccatgaagcacaaacttgggggcggtcagtatggagaggtttacgttggcgtctggaagaaatacagccttacagttgctgtgaaaacattgaaggaagataccatggaggtagaagaattcctgaaagaagctgcagtaatgaaggaaatcaagcatcctaatctggtacaacttttaggtgtgtgtactttggagccaccattttacattgtgactgaatacatgccatacgggaatttgctggattacctccgagaatgcaaccgagaagaggtgactgcagttgtgctgctctacatggccactcagatttcttctgcaatggagtacttagagaagaagaatttcatccatagagatcttgcagctcgtaactgcctagtgggagaaaaccatgtggtaaaagtggctgactttggcttaagtagattgatgactggagacacttatactgctcatgctggagccaaatttcctattaagtggacagcaccagagagtcttgcctacaataccttctcaattaaatctgacgtctgggcttttggggtattgttgtgggaaattgctacctatggaatgtcaccatatccaggtattgacctgtctcaggtctatgacctactagaaaaaggatatcgaatggaacagcctgagggatgcccccctaaggtttatgaacttatgagagcatgctggaagtggagccctgccgataggccctcttttgctgaaacacaccaagcttttgaaaccatgttccatgactccagcatttctgaagaggtagctgaggagcttgggagagccgcctcctcgtcatctgttgttccatacctgccccggctacctatacttccttccaagactcggacactgaagaaacaggtggagaacaaggagaacattgaaggggcacaagatgccacagaaaattctgcttccagtttagcaccagggttcatcagaggtgcacaggcctctagtggatccccagcactgcctcgaaagcaaagagacaagtcacccagcagcctcttggaagatgccaaagagacatgcttcaccagggataggaaggggggcttcttcagctccttcatgaagaagagaaatgctcctacaccccccaaacgcagcagctccttccgagaaatggagaatcagccccataagaaatacgaactcacggggcttccagagcaggataggatggcaatgacccttcccaggaactgccagaggtccaaactccagctggaaaggacagtgtccacctcttctcagccagaagagaatgtggacagggccaatgacatgcttccaaaaaaatcagaggaaagtgctgctccaagcagggagagaccaaaagccaagttattgcccagaggagccacagctcttcctctcagaacaccctctggggatctagccattacagagaaggaccctccaggggtgggagtggctggagtggcagctgcccccaagggtaaagagaagaatggtggggcacgacttgggatggctggagttccagaggatggagagcagccgggctggccttctccagccaaggctgcccccgtcctcccaaccactcacaaccacaaagtgccagtccttatctcacccactctgaaacacactccagctgacgtgcagctcattggcacagactctcaggggaataaattcaagctcttatctgagcatcaggtcacatcctctggagacaaggaccgaccccgacgggtaaaaccaaagtgtgccccacccccaccaccagtgatgagactactgcagcatccgtccatctgctcagaccctacagaagagccaactgccctaactgcaggacagtccacatcagaaacacaggaaggaggaaagaaggcagctctgggcgcagtgcccatcagtgggaaagctgggaggccagtgatgcctccacctcaagtgcctctgcccacatcttccatctcgccagccaaaatggccaatggcacagcaggtactaaagtggctctgagaaaaaccaaacaggccgctgagaaaatctcagcagacaaaatcagcaaagaggccctgctggaatgtgctgacctactgtccagtgcactcacggaacctgtgcccaacagccagctggtagacactggacaccagctgcttgactactgctcaggctatgtggactgcatccctcaaactcgcaacaaatttgccttccgagaggctgtgagcaaactggaactcagcctgcaggagctacaggtttcttcagcagctgctggtgtgcccgggacaaaccctgtccttaataacttattgtcatgtgtacaggaaatcagtgatgtggtgcagaggtag

SEQ ID NO: 34011 - DNA, 3106 bp, Homo sapiens
  source 1..3106: mol_type = unassigned DNA
agagtcatgtgactcgagtaacatggccgctgtctcgtgagtcccgctagtgccgggcgggagttgttaagcggccagggtcaggtgtgctggagcggggtccgggcccgggttccagggcgaggcggcggagcgtggcaggcaagcctagagcggcgtggtccatgcgccggcgccgggggcagagcggagccgcagactcccctggccccggcgcggccccggcagccgcgggctaaggagtcgcgaggttcccccagctgccaccatgaaccccgagaaggatttcgcgccgctcacgcctaacatcgtgcgcgccctcaatgacaagctgtacgaaaagcggaaggtggcagcgctggagatcgagaagctggtccgggagttcgtggcccagaacaataccgtgcaaatcaagcatgtgatccagaccctgtcccaggagtttgccctgtctcagcacccccacagccggaaagggggcctcatcggcctggccgcctgctccatcgcactgggcaaggactcagggctctacctgaaggagctgatcgagccagtgctgacctgcttcaatgatgcagacagcaggctgcgctactatgcctgcgaggccctctacaacatcgtcaaggtggcccggggcgctgtgctgccccacttcaacgtgctctttgacgggctgagcaagctggcagccgacccagaccccaatgtgaaaagcggatctgagctcctagaccgccttttaaaggacattgtgactgagagcaacaagtttgacctggtgagcttcatccccttgttgcgagagaggatttactccaacaaccagtatgcccggcagttcatcatctcctggatcctggttctggagtcggtgccagacattaacctgctggattacctgccggagatcctggatggactcttccagatcctgggtgacaatggcaaagagattcgcaaaatgtgtgaggttgttcttggagaattcttaaaagaaattaagaagaacccctccagtgtgaagtttgctgagatggccaacatcctggtgatccactgccagacaacagatgacctcatccagctgacagccatgtgctggatgcgggagttcatccagctggcgggccgcgtcatgctgccttactcctccgggatcctgactgctgtcttgccctgcttggcctacgatgaccgcaagaaaagcatcaaagaagtggccaacgtgtgcaaccagagcctgatgaagctggtcacccccgaggacgacgagctggatgagctgagacctgggcagaggcaggcagagcccacccctgacgatgccctgccaaagcaggagggcacagccagtggaggtccagatggttcctgtgactccagcttcagtagcggcatcagtgtcttcactgcagccagcactgaaagagccccagtgacccttcacctcgacgggatcgtgcaggtcctaaactgccacctcagtgacacggccattgggatgatgaccaggattgcagttctcaagtggctctaccacctctacatcaaaactcctcggaagatgttccggcacacggacagcctctttcccatcctactgcagacgttatcggatgaatcggatgaggtgatcctgaaggacctggaggtgctggcagaaatcgcttcctcccccgcaggccagacggatgacccaggccccctcgatggccctgacctccaggccagccactcagagctccaggtgcccacccctggcagagccggcctactgaacacctctggtaccaaaggcttagaatgttctccttcaactcccaccatgaattcttacttttataagttcatgatcaaccttctcaagagattcagcagcgaacggaagctcctggaggtcagaggccctttcatcatcaggcagctgtgcctcctgctgaatgcggagaacatcttccactcaatggcagacatcctgctgcgggaggaggacctcaagttcgcctcgaccatggtccacgccctcaacaccatcctgctgacctccacagagctcttccagctaaggaaccagctgaaggacctgaagaccctggagagccagaacctgttctgctgcctgtaccgctcctggtgccacaacccagtcaccacggtgtccctctgcttcctcacccagaactaccggcacgcctatgacctcatccagaagtttggggacctggaggtcaccgtggacttcctcgcagaggtggacaagctggtgcagctgattgagtgccccatcttcacatatctgcgcctgcagctgctggacgtgaagaacaacccctacctgatcaaggccctctacggcctgctcatgctcctgccgcagagcagcgccttccagctgctctcgcaccggctccagtgcgtgcccaaccctgagctgctgcagaccgaagacagtctaaaggcagcccccaagtcccagaaagctgactcccctagcatcgactacgcagagctgctgcagcactttgagaaggtccagaacaagcacctggaagtgcggcaccagcggagcgggcgtggggaccacctggaccggagggttgtcctctgacaggcctggcacggaggagggcccaccgagtggtcccatgaaacactaagggtcgtcacgccctcccgaggagctcaaggacctgcctgtcaggaccagggctgggcctgccaacccagggcagtgttggggccggaggctgctgtgtctgcccaagctcctctcagagtccagtccccaggcctccagcgctgtcagctgcaccctggcattctcacagagctggctgcccacccagtggggggctatagcctcagagaccactcatcctctggaatcaacctctttctaataccctcttggaaaaagagcttgcccctcctccagcacactagagctctggccttgtgtgtatatgtatacatacgtgaacacatgcctgtgtgtgtgtgtgtgtgtgtgtacttgtatgcacgtaggcaccagcacaaagatctgaatgatgcaccccacccccaccccaataaagaaataacagaaaaccctcaa

SEQ ID NO: 34012 - DNA, 2072 bp, Homo sapiens
  source 1..2072: mol_type = unassigned DNA
atcttctccagcctggccccagagccatggctggcgttcaggggcatttgggaagctgggcccaggtcatgcggagcggaggctgagtccagcgacctaggaggagatggaggtgtttcaggcctcccaccaagaaatgtggctcacgtcactgagcacccaagacctcggggcctccgacgccgtgttggaactgtggtgatgcttccctggagacgggatgcggcgtcaggcactggagcttagccccagacggaaggtggtgtgggcaggggtgccacgctgccgccagcccagcactcaggaagcgcagtgctgcacaccaccctctcaccagccaccccgctcatgccccatcctgcctgcatcatgctgttttggggaagctcccgaatccctgggactccagctgggaagcattgcccaggtgcccttcccctgcaggccaggcctccaagggcacgtggaaaagcagcgcggattcctccaagcctgtcctcaccacccacttctcactgctcgtgtcatccggcccagggaccctgaggaatctgcttttcttcatcctctgggttccctttttgccttttgtataacagggaggctcctcttcacaaagtccgatccttagccctgaacgactcttaactagacaagagatgggaaaggggtcatggcccagggaccagcgagccctaagtgactctggccgtaagtgactctgcgaccttagtcaagtcacttcaccagagtttcaccatccgtacagtgaagaaaaaactcagggtcataacgctgatcccacacggatctgtgctccaggccgcagggtacagcccgaacagtgcaaatccctgacctcgggggcttccaggaggaggagtggggcagtaaacaggcagctgtgcctcctgctgaatgcggagaacatcttccactcaatggcagacatcctgctgcgggaggaggacctcaagttcgcctcgaccatggtccacgccctcaacaccatcctgctgacctccacagagctcttccagctaaggaaccagctgaaggacctgaagaccctggagagccagaacctgttctgctgcctgtaccgctcctggtgccacaacccagtcaccacggtgtccctctgcttcctcacccagaactaccggcacgcctatgacctcatccagaagtttggggacctggaggtcaccgtggacttcctcgcagaggtggacaagctggtgcagctgattgagtgccccatcttcacatatctgcgcctgcagctgctggacgtgaagaacaacccctacctgatcaaggccctctacggcctgctcatgctcctgccgcagagcagcgccttccagctgctctcgcaccggctccagtgcgtgcccaaccctgagctgctgcagaccgaagacagtctaaaggcagcccccaagtcccagaaagctgactcccctagcatcgactacgcagagctgctgcagcactttgagaaggtccagaacaagcacctggaagtgcggcaccagcggagcgggcgtggggaccacctggaccggagggttgtcctctgacaggcctggcacggaggagggcccaccgagtggtcccatgaaacactaagggtcgtcacgccctcccgaggagctcaaggacctgcctgtcaggaccagggctgggcctgccaacccagggcagtgttggggccggaggctgctgtgtctgcccaagctcctctcagagtccagtccccaggcctccagcgctgtcagctgcaccctggcattctcacagagctggctgcccacccagtggggggctatagcctcagagaccactcatcctctggaatcaacctctttctaataccctcttggaaaaagagcttgcccctcctccagcacactagagctctggccttgtgtgtatatgtatacatacgtgaacacatgcctgtgtgtgtgtgtgtgtgtgtgtacttgtatgcacgtaggcaccagcacaaagatctgaatgatgcaccccacccccaccccaataaagaaataacagaaaaccct

SEQ ID NO: 34013 - DNA, 1745 bp, Homo sapiens
  source 1..1745: mol_type = unassigned DNA
cccgcccctcctcgtcgcctccgagccaatgggaaggctccatactgcagggtgcgaaggggccggcgccgctgccgagttacgagtcggcgaaagcggcgggaagttcgtactgggcagaacgcgacgggtctgcggcttaggtgaaaatgcctcgtgtaaaagcagctcaagctggaagacagagctctgcaaagagacatcttgcagaacaatttgcagttggagagataataactgacatggcaaaaaaggaatggaaagtaggattacccattggccaaggaggctttggctgtatatatcttgctgatatgaattcttcagagtcagttggcagtgatgcaccttgtgttgtaaaagtggaacccagtgacaatggacctctttttactgaattaaagttctaccaacgagctgcaaaaccagagcaaattcagaaatggattcgtacccgtaagctgaagtacctgggtgttcctaagtattgggggtctggtctacatgacaaaaatggaaaaagttacaggtttatgataatggatcgctttgggagtgaccttcagaaaatatatgaagcaaatgccaaaaggttttctcggaaaactgtcttgcagctaagcttaagaattctggatattctggaatatattcacgagcatgagtatgtgcatggagatatcaaggcctcaaatcttcttctgaactacaagaatcctgaccaggtgtacttggtagattatggccttgcttatcggtactgcccagaaggagttcataaagaatacaaagaagaccccaaaagatgtcacgatggcactattgaattcacgagcatcgatgcacacaatggcgtggccccatcaagacgtggtgatttggaaatacttggttattgcatgatccaatggcttactggccatcttccttgggaggataatttgaaagatcctaaatatgttagagattccaaaattagatacagagaaaatattgcaagtttgatggacaaatgttttcctgagaaaaacaaaccaggtgaaattgccaaatacatggaaacagtgaaattactagactacactgaaaaacctctttatgaaaatttacgtgacattcttttgcaaggactaaaagctataggaagtaaggatgatggcaaattggacctcagtgttgtggagaatggaggtttgaaagcaaaaacaataacaaagaagcgaaagaaagaaattgaagaaagcaaggaacctggtgttgaagatacggaatggtcaaacacacagacagaggaggccatacagacccgttcaagaaccagaaagagagtccagaagtaattcagatgctgtgaaccagatttccttttctttgttttcttttgacttttttctccttttctatttgaactgttttattttcctgtgagtcttgcgaggtggaagtaatgattaaatactcatgtgttcagaaaacataaactttttttataaaaatattttgtacaattcattaaaggctaatttatgaaatttgaaaatcttcaggttatactccttaagttatcccaaagccgtgtgtttgtgatgttttggagtacatatatatgaaaattattatgacacgcacttttctaatcattgtacatttctcagagtggataaaaatgtttgacaaagtcctcacttttaaggaaatgcaaagcttaaaataaaactctcttttgtttgatgcaaacacacagt

SEQ ID NO: 34014 - DNA, 1888 bp, Homo sapiens
  source 1..1888: mol_type = unassigned DNA
gggccgctgcactgcgaggccgacgcagctggagagaagttaggcaggtcctagggagggcaggctcgagtgctgggcccgcctccccgcgggactgtaggcccgggggctccgcctcgtcgcagcggcaggtaggaggcggtgcgcgcggcccggcgacgggggatcctgaggcccgaagtgatgccaccaaaaagaaatgaaaaatacaaacttcctattccatttccagaaggcaaggttctggatgatatggaaggcaatcagtgggtactgggcaagaagattggctctggaggatttggattgatatatttagctttccccacaaataaaccagagaaagatgcaagacatgtagtaaaagtggaatatcaagaaaatggcccgttattttcagaacttaaattttatcagagagttgcaaaaaaagactgtatcaaaaagtggatagaacgcaaacaacttgattatttaggaattcctctgttttatggatctggtctgactgaattcaagggaagaagttacagatttatggtaatggaaagactaggaatagatttacagaagatctcaggccagaatggtacctttaaaaagtcaactgtcctgcaattaggtatccgaatgttggatgtactggaatatatacatgaaaatgaatatgttcatggtgatataaaagcagcaaatctacttttgggttacaaaaatccagaccaggtttatcttgcagattatggactttcctacagatattgtcccaatgggaaccacaaacagtatcaggaaaatcctagaaaaggccataatgggacaatagagtttaccagcttggatgcccacaagggagtagccttgtccagacgaagtgacgttgagatcctcggctactgcatgctgcggtggttgtgtgggaaacttccctgggaacagaacctgaaggaccctgtggctgtgcagactgctaaaacaaatctgttggacgagctcccccagtcagtgcttaaatgggctccttctggaagcagttgctgtgaaatagcccaatttttggtatgtgctcatagtttagcatatgatgaaaagccaaactatcaagccctcaagaaaattttgaaccctcatggaatacctttaggaccactggacttttccacaaaaggacagagtataaatgtccatactccaaacagtcaaaaagttgattcacaaaaggctgcaacaaagcaagtcaacaaggcacacaataggttaatcgaaaaaaaagtccacagtgagagaagcgctgagtcctgtgcaacatggaaagtgcagaaagaggagaaactgattggattgatgaacaatgaagcagctcaggaaagcacaaggagaagacagaaatatcaagagtctcaagaacctttgaatgaagtaaacagtttcccacaaaaaatcagctatacacaattcccaaactcattttatgagcctcatcaagattttaccagtccagatatattcaagaagtcaagatctccatcttggtataaatacacttccacagtcagcacggggatcacagacttagaaagttcaactggactttggcctacaatttcccagtttactcttagtgaagagacaaacgcagatgtttattattatcgcatcatcatacctgtccttttgatgttagtatttcttgctttattttttctctgaagatgataccaaaattccttttgataattttttaagtttccagctcttcaccgaaatgttgtattcttatttcagtgtttccttccagacatttttaaggtaattggctttaaaaagagaacatattttaacaaagtttgtggacactctaaaaaataaaattgctttgtactagaaa

SEQ ID NO: 34015 - DNA, 1386 bp, Homo sapiens
  source 1..1386: mol_type = unassigned DNA
gggccgctgcactgcgaggccgacgcagctggagagaagttaggcaggtcctagggagggcaggctcgagtgctgggcccgcctccccgcgggactgtaggcccgggggctccgcctcgtcgcagcggcaggtaggaggcggtgcgcgcggcccggcgacgggggatcctgaggcccgaagtgatgccaccaaaaagaaatgaaaaatacaaacttcctattccatttccagaaggcaaggttctggatgatatggaaggcaatcagtgggtactgggcaagaagattggctctggaggatttggattgatatatttagctttccccacaaataaaccagagaaagatgcaagacatgtagtaaaagtggaatatcaagaaaatggcccgttattttcagaacttaaattttatcagagagttgcaaaaaaagactgtatcaaaaagtggatagaacgcaaacaacttgattatttaggaattcctctgttttatggatctggtctgactgaattcaagggaagaagttacagatttatggtaatggaaagactaggaatagatttacagaagatctcaggccagaatggtacctttaaaaagtcaactgtcctgcaattaggtatccgaatgttggatgtactggaatatatacatgaaaatgaatatgttcatggtgatataaaagcagcaaatctacttttgggttacaaaaatccagaccaggtttatcttgcagattatggactttcctacagatattgtcccaatgggaaccacaaacagtatcaggaaaatcctagaaaaggccataatgggacaatagagtttaccagcttggatgcccacaagggagtagccttgtccagacgaagtgacgttgagatcctcggctactgcatgctgcggtggttgtgtgggaaacttccctgggaacagaacctgaaggaccctgtggctgtgcagactgctaaaacaaatctgttggacgagctcccccagtcagtgcttaaatgggctccttctggaagcagttgctgtgaaatagcccaatttttggtatgtgctcatagtttagcatatgatgaaaagccaaactatcaagccctcaagaaaattttgaaccctcatggaatacctttaggaccactggacttttccacaaaaggacagagtataaatgtccatactccaaacagtcaaaaagttgattcacaaaaggctgcaacaaagcaagtcaacaaggcacacaataggttaatcgaaaaaaaagtccacagtgagagaagcgctgagtcctgtgcaacatggaaagtgcagaaagaggagaaactgattggattgatgaacaatgaagcagctcagatcaggcagctgggatattaa

SEQ ID NO: 34016 - DNA, 2036 bp, Homo sapiens
  source 1..2036: mol_type = unassigned DNA
attccccatgtagccgcgccctctccttcccctgggcgtctccggggcgtggacaggccgctgaaaggaaccggctgcggcctgtgtgaggctccgcgggccgctgcactgcgaggccgacgcagctggagagaagttaggcaggtcctagggagggcaggctcgagtgctgggcccgcctccccgcgggactgtaggcccgggggctccgcctcgtcgcagcggcagaagtgatgccaccaaaaagaaatgaaaaatacaaacttcctattccatttccagaaggcaaggttctggatgatatggaaggcaatcagtgggtactgggcaagaagattggctctggaggatttggattgatatatttagctttccccacaaataaaccagagaaagatgcaagacatgtagtaaaagtggaatatcaagaaaatggcccgttattttcagaacttaaattttatcagagagttgcaaaaaaagactgtatcaaaaagtggatagaacgcaaacaacttgattatttaggaattcctctgttttatggatctggtctgactgaattcaagggaagaagttacagatttatggtaatggaaagactaggaatagatttacagaagatctcaggccagaatggtacctttaaaaagtcaactgtcctgcaattaggtatccgaatgttggatgtactggaatatatacatgaaaatgaatatgttcatggtgatataaaagcagcaaatctacttttgggttacaaaaatccagaccaggtttatcttgcagattatggactttcctacagatattgtcccaatgggaaccacaaacagtatcaggaaaatcctagaaaaggccataatgggacaatagagtttaccagcttggatgcccacaagggagtagccttgtccagacgaagtgacgttgagatcctcggctactgcatgctgcggtggttgtgtgggaaacttccctgggaacagaacctgaaggaccctgtggctgtgcagactgctaaaacaaatctgttggacgagctcccccagtcagtgcttaaatgggctccttctggaagcagttgctgtgaaatagcccaatttttggtatgtgctcatagtttagcatatgatgaaaagccaaactatcaagccctcaagaaaattttgaaccctcatggaatacctttaggaccactggacttttccacaaaaggacagagtataaatgtccatactccaaacagtcaaaaagttgattcacaaaaggctgcaacaaagcaagtcaacaaggcacacaataggttaatcgaaaaaaaagtccacagtgagagaagcgctgagtcctgtgcaacatggaaagtgcagaaagaggagaaactgattggattgatgaacaatgaagcagctcagtttaggtagaagcttaggctattgatttgaacccactattttttctaatgaaagcacaaggagaagacagaaatatcaagagtctcaagaacctttgaatgaagtaaacagtttcccacaaaaaatcagctatacacaattcccaaactcattttatgagcctcatcaagattttaccagtccagatatattcaagaagtcaagatctccatcttggtataaatacacttccacagtcagcacggggatcacagacttagaaagttcaactggactttggcctacaatttcccagtttactcttagtgaagagacaaacgcagatgtttattattatcgcatcatcatacctgtccttttgatgttagtatttcttgctttattttttctctgaagatgataccaaaattccttttgataattttttaagtttccagctcttcaccgaaatgttgtattcttatttcagtgtttccttccagacatttttaaggtaattggctttaaaaagagaacatattttaacaaagtttgtggacactctaaaaaataaaattgctttgtactagaaatagtgtcatagaatagtgtcatagtacagtttggaaaacacttctgaag

SEQ ID NO: 34017 - DNA, 1375 bp, Homo sapiens
  source 1..1375: mol_type = unassigned DNA
ttcgtaccaaactggtctggcggcggttcttcgtccagacgctggcgggccagggtggagaagtgatgccaccaaaaagaaatgaaaaatacaaacttcctattccatttccagaaggcaaggttctggatgatatggaaggcaatcagtgggtactgggcaagaagattggctctggaggatttggattgatatatttagctttccccacaaataaaccagagaaagatgcaagacatgtagtaaaagtggaatatcaagaaaatggcccgttattttcagaacttaaattttatcagagagttgcaaaaaaagactgtattgtctttgtagtcaaaaagtggatagaacgcaaacaacttgattatttaggaattcctctgttttatggatctggtctgactgaattcaagggaagaagttacagatttatggtaatggaaagactaggaatagatttacagaagatctcaggccagaatggtacctttaaaaagtcaactgtcctgcaattaggtatccgaatgttggatgtactggaatatatacatgaaaatgaatatgttcatggtgatataaaagcagcaaatctacttttgggttacaaaaatccagaccaggtttatcttgcagattatggactttcctacagatattgtcccaatgggaaccacaaacagtatcaggaaaatcctagaaaaggccataatgggacaatagagtttaccagcttggatgcccacaagggagtagccttgtccagacgaagtgacgttgagatcctcggctactgcatgctgcggtggttgtgtgggaaacttccctgggaacagaacctgaaggaccctgtggctgtgcagactgctaaaacaaagtacaaattttcaagtatttcatcatgtactgcaccaggtctgaagggatacattaaagggagctaacaacacagagaagattggcattcacccaacatgacaaccaaagcaaatttctttagtttgaaaaatatgttttaaaaaaaccaaacaactaacacataaaatccattaaggtaacattgtaaaaagacatgtatttgaattacagtgcaaaatataaagtgaaatatctgttcttttacatggtatttccaaagcttagattctaggtggtagtgttttcaaggaagaatattttcaaattagcattgtacaagtatgttgaagtagtctgagcttggtacgattgatattaactgtgtaaaacagcactatgaaatgggacaaatagggcttatatttttcaagtgagagcaacatacctcttatttctgtcttggaggaagtatgttttctttcttaagaaacaaaatttttacatgagctatttatatgag

SEQ ID NO: 34018 - DNA, 2446 bp, Homo sapiens
  source 1..2446: mol_type = unassigned DNA
ggctattcacacgcttcagttcacaacttccatccagaatcctacttctctgattgtcctcatggggaaagtatgctatttccttcatcctacaagatgcttctcactgactctatccatattcttctcatccttcaagagccaagtcaaatctctctgcttccaataagccttccttgctacactcagaaatggaatgaatccccaagatggcttaaggatgcccttctgttttggaatgctttctcttggtgtatatcaaggttggttcagtttaccagagaaaagatgccagggtctcattctgtcacccaagctggagtccagtgacatggtcacagctcactgaagcctcaacctccttggctcaagcaatcctttcacctcagccttctaagtagctaggagcacagtgtcataaagaagaatatttgaagctctataaatatgttgctttacgtggcaaaaaggactttacagatctgagtacactggattatctgggtgggcacaatgtaatcacaaggggctttctaagaaggaagaaggagggttcaaggcagaaaaaccggaagaagttataacattggctttgaagatggaagatggggacacaagtcaaggaattcaggtggcctctagaagcctgaaaagtcaaagaaatgaattctcccctagagcctcaagaaggaacacagccctgctgacagcttgattttaggatttctgacctccagactaagtgatgccaccaaaaagaaatgaaaaatacaaacttcctattccatttccagaaggcaaggttctggatgatatggaaggcaatcagtgggtactgggcaagaagattggctctggaggatttggattgatatatttagctttccccacaaataaaccagagaaagatgcaagacatgtagtaaaagtggaatatcaagaaaatggcccgttattttcagaacttaaattttatcagagagttgcaaaaaaagactgtatcaaaaagtggatagaacgcaaacaacttgattatttaggaattcctctgttttatggatctggtctgactgaattcaagggaagaagttacagatttatggtaatggaaagactaggaatagatttacagaagatctcaggccagaatggtacctttaaaaagtcaactgtcctgcaattaggtatccgaatgttggatgtactggaatatatacatgaaaatgaatatgttcatggtgatataaaagcagcaaatctacttttgggttacaaaaatccagaccaggtttatcttgcagattatggactttcctacagatattgtcccaatgggaaccacaaacagtatcaggaaaatcctagaaaaggccataatgggacaatagagtttaccagcttggatgcccacaagggagtagccttgtccagacgaagtgacgttgagatcctcggctactgcatgctgcggtggttgtgtgggaaacttccctgggaacagaacctgaaggaccctgtggctgtgcagactgctaaaacaaatctgttggacgagctcccccagtcagtgcttaaatgggctccttctggaagcagttgctgtgaaatagcccaatttttggtatgtgctcatagtttagcatatgatgaaaagccaaactatcaagccctcaagaaaattttgaaccctcatggaatacctttaggaccactggacttttccacaaaaggacagagtataaatgtccatactccaaacagtcaaaaagttgattcacaaaaggctgcaacaaagcaagtcaacaaggcacacaataggttaatcgaaaaaaaagtccacagtgagagaagcgctgagtcctgtgcaacatggaaagtgcagaaagaggagaaactgattggattgatgaacaatgaagcagctcaggaaagcacaaggagaagacagaaatatcaagagtctcaagaacctttgaatgaagtaaacagtttcccacaaaaaatcagctatacacaattcccaaactcattttatgagcctcatcaagattttaccagtccagatatattcaagaagtcaagatctccatcttggtataaatacacttccacagtcagcacggggatcacagacttagaaagttcaactggactttggcctacaatttcccagtttactcttagtgaagagacaaacgcagatgtttattattatcgcatcatcatacctgtccttttgatgttagtatttcttgctttattttttctctgaagatgataccaaaattccttttgataattttttaagtttccagctcttcaccgaaatgttgtattcttatttcagtgtttccttccagacatttttaaggtaattggctttaaaaagagaacatattttaacaaagtttgtggacactctaaaaaataaaattgctttgtacta

SEQ ID NO: 34019 - DNA, 1676 bp, Homo sapiens
  source 1..1676: mol_type = unassigned DNA
gcagctggagagaagttaggcaggtcctagggagggcaggctcgagtgctgggcccgcctccccgcgggactgtaggcccgggggctccgcctcgtcgcagcggcagaaggcaaggttctggatgatatggaaggcaatcagtgggtactgggcaagaagattggctctggaggatttggattgatatatttagctttccccacaaataaaccagagaaagatgcaagacatgtagtaaaagtggaatatcaagaaaatggcccgttattttcagaacttaaattttatcagagagttgcaaaaaaagactgtatcaaaaagtggatagaacgcaaacaacttgattatttaggaattcctctgttttatggatctggtctgactgaattcaagggaagaagttacagatttatggtaatggaaagactaggaatagatttacagaagatctcaggccagaatggtacctttaaaaagtcaactgtcctgcaattaggtatccgaatgttggatgtactggaatatatacatgaaaatgaatatgttcatggtgatataaaagcagcaaatctacttttgggttacaaaaatccagaccaggtttatcttgcagattatggactttcctacagatattgtcccaatgggaaccacaaacagtatcaggaaaatcctagaaaaggccataatgggacaatagagtttaccagcttggatgcccacaagggagtagccttgtccagacgaagtgacgttgagatcctcggctactgcatgctgcggtggttgtgtgggaaacttccctgggaacagaacctgaaggaccctgtggctgtgcagactgctaaaacaaatctgttggacgagctcccccagtcagtgcttaaatgggctccttctggaagcagttgctgtgaaatagcccaatttttggtatgtgctcatagtttagcatatgatgaaaagccaaactatcaagccctcaagaaaattttgaaccctcatggaatacctttaggaccactggacttttccacaaaaggacagagtataaatgtccatactccaaacagtcaaaaagttgattcacaaaaggctgcaacaaagcaagtcaacaaggcacacaataggttaatcgaaaaaaaagtccacagtgagagaagcgctgagtcctgtgcaacatggaaagtgcagaaagaggagaaactgattggattgatgaacaatgaagcagctcaggaaagcacaaggagaagacagaaatatcaagagtctcaagaacctttgaatgaagtaaacagtttcccacaaaaaatcagctatacacaattcccaaactcattttatgagcctcatcaagattttaccagtccagatatattcaagaagtcaagatctccatcttggtataaatacacttccacagtcagcacggggatcacagacttagaaagttcaactggactttggcctacaatttcccagtttactcttagtgaagagacaaacgcagatgtttattattatcgcatcatcatacctgtccttttgatgttagtatttcttgctttattttttctctgaagatgataccaaaattccttttgataattttttaagtttccagctcttcaccgaaatgttgtattcttatttcagtgtttccttccagaca

SEQ ID NO: 34020 - DNA, 1100 bp, Homo sapiens
  source 1..1100: mol_type = unassigned DNA
gtccttagccggtagcttccgggtttcctgggctactacgatggcgatgagtttcgagtggccgtggcagtatcgcttcccacccttctttacgttacaaccgaatgtggacactcggcagaagcagctggccgcctggtgctcgctggtcctgtccttctgccgcctgcacaaacagtccagcatgacggtgatggaagctcaggagagcccgctcttcaacaacgtcaagctacagcgaaagcttcctgtggagtcgatccagattgtattagaggaactgaggaagaaagggaacctcgagtggttggataagagcaagtccagcttcctgatcatgtggcggaggccagaagaatgggggaaactcatctatcagtgggtttccaggagtggccagaacaactccgtctttaccctgtatgaactgactaatggggaagacacagaggatgaggagttccacgggctggatgaagccactctactgcgggctctgcaggccctacagcaggagcacaaggccgagatcatcactgtcagcgatggccgaggcgtcaagttcttctagcagggacctgtctccctttacttcttacctcccacctttccagggctttcaaaaggagacagacccagtgtcccccaaagactggatctgtgactccaccagactcaaaaggactccagtcctgaaggctgggacctggggatgggtttctcacaccccatatgtctgtcccttggatagggtgaggctgaagcaccagggagaaaatatgtgcttcttctcgccctacctcctttcccatcctagactgtccttgagccagggtctgtaaacctgacactttatatgtgttcacacatgtaagtacatacacacatgcgcctgcagcacatgcttctgtctcctcctcctcccacccctttagctgctgttgcctcccttctcaggctggtgctggatccttcctaggggatgggggaagccctggctgcaggcagccttccaggcaatatgaagataggaggcccacgggcctggcagtgagaggtgtggccccacaccgatttatgatattaaaatctcaactccc

SEQ ID NO: 34021 - DNA, 2697 bp, Homo sapiens
  source 1..2697: mol_type = unassigned DNA
gagcggtcacgtgtgaggggcggcccgaggtcacgtgacggagcgccggagcggagggagccggggctgggagttctcctgagggaagaggagtggagtaggggggacgcggcggcggcgttgacaatgagttttcttggaggcttttttggtccaatttgtgagatcgatattgttcttaatgatggggaaaccaggaaaatggcagaaatgaaaactgaagatggcaaagtagaaaaacactatctcttctatgacggagaatccgtttcaggaaaggtaaacctagcctttaagcaacctggaaagaggctagaacaccaaggaattagaattgaatttgtaggtcaaattgaacttttcaatgacaagagtaatactcatgaatttgtaaacctagtgaaagaactagccttacctggagaactgactcagagcagaagttatgattttgaatttatgcaagttgaaaagccatatgaatcttacatcggtgccaatgtccgcttgaggtattttcttaaagtgacaatagtgagaagactgacagatttggtaaaagagtatgatcttattgttcaccagcttgccacctatcctgatgttaacaactctattaagatggaagtgggcattgaagattgtctacatatagaatttgaatataataaatcaaagtatcatttaaaggatgtgattgttggaaaaatttacttcttattagtaagaataaaaatacaacatatggagttacagctgatcaaaaaagagatcacaggaattggacccagtaccacaacagaaacagaaacaatcgccaaatatgaaataatggatggtgcaccagtaaaaggtgaatcaattccaataaggctatttttagcaggatatgacccaactccaacaatgagagatgtgaacaaaaaattttcagtaaggtactttttgaatttagtgcttgttgatgaggaagaccggaggtacttcaaacagcaggagataattttatggagaaaagctcctgaaaaactgaggaaacagagaacaaactttcaccagcgatttgaatctccagaatcacaggcatctgccgaacagcctgaaatgtgaactgaacaggagaaaaaaagaaaagcaaaaaactcctgtaacccttgagattaagttcagcaggttaaagatggttgcagctggagggggcggaaaaaggccaaaactccatatatgttagtcttcctttatcttacagcgcagcatttattttatgatataatgaaatgttcgttcatgtatatacatttttaaaagtgctttctttgaaacactggaactttgttaagctgcctttttttttttaacttcctactttgatgataagcactcagatatatatcagcgtaaacatgaaaaattttcatgtgagtaggctggtatttgtaattttgctttctttctgcataatgttgattataaatcctctcttttcaggctaatgattacctcttattctctacatgcaaaaaattaaatattttgtgttcaaataaaattagaaaacctgagtggcctcttgtgtcctgcagagatttaaaacatggcatctcaatatttttgagaactacatttgtttttaacatatgtgtttgagaaaagcatatggagtgtttcaccgcaggcacttctgagtaccattccatggcttccagaattttatcctctttgaggtcttctgtgctatgaatattagatttctttccccaagggattatgtggcaggtcattatggccttcttttttttggccatattaagtaacagttttgctatattccagtagtaccgttgtgtgttttctgcaatgtggagttgacttagcttggcattttagatttgttaaaactattttttccataaatactttgaaacatatttatatatttcaatttaaggaatctttttgccatgtgtatgcaaatattattttcttcatacattcattttcttttcaggggaaaattttgggatgggggactcaggaggacctgtgaagcatgtagttatctagatctgggtaatttcatgtttattaaactcgaactttggctagttaaactcatattgaaacttcatctagtctcttaattttttaacactaaattcaagtcatttgttttaagtctctaaaaaagaagattgcagtcatccattcatatgcatggggtctgatcgcaaatacactaaatgtggagtgtaggaaccaaaatgaaacctgctgtatggaaactactttcacttatggttcattggtttttgtaccaatattttttatgcacttcagtgcaagtcttgtcagttaaccttactttatgagtaagctaaataacccaaattacatttctttaaacctgttttactactatggcactttgataaaatggtcaggaaccaactttactggcaaaagggtccatgtaccaccatgtgctggagcatctgttctacatgtggatatctatgaatggtaatgttttccttcatgtaagtgcctattcagagtttcagaattttaaaatgccaaatattttcatggtcatttgcatgtagtaagccagaaaatattcaaagagattttgaaaaccaattgtatttaaccagcctcaaattgtgcaaccatgatgtataataaagaatttgaaac

SEQ ID NO: 34022 - DNA, 3229 bp, Homo sapiens
  source 1..3229: mol_type = unassigned DNA
gcgcctttgccctctcagaacggctgggcggaacgaggcgagaaagccaagttaagaaaacccagactcagaaggaggtggagcgggactgcgttcaggcaaggtggcagaacgcctcgccgtggacgaagagagcacatctcttcttgcgaggcctaaggaagtagggctcccactcgcctcggcaacccaaggacccagccaaggagagagcctccagatgaatccttcctctcctccttccttcccagccgctcaaactttcacaaagaggaactgggtgcggtaaagaggccggacacggaaccgctcgtccggtgaccgaagagacggcgaggaggagcccgcgaacccgcctctgttcaggccccgcccactcgacgtaatttgcccgcccctctccaccctccgaagggtggagcctgaggccccgcctccaagcggcctctccccggagtgcctggcggccagcagggcggggcaggaggctgggagagggacgggtgcgggggtgggggagaggaagggagcggtcacgtgtgaggggcggcccgaggtcacgtgacggagcgccggagcggagggagccggggctgggagttctcctgagggaagaggagtggagtaggggggacgcggcggcggcgttgacaatgagttttcttggaggcttttttggtccaatttgtgagatcgatattgttcttaatgatggggaaaccaggaaaatggcagaaatgaaaactgaagatggcaaagtagaaaaacactatctcttctatgacggagaatccgtttcaggaaaggtaaacctagcctttaagcaacctggaaagaggctagaacaccaaggaattagaattgaatttgtaggtcaaattgaacttttcaatgacaagagtaatactcatgaatttgtaaacctagtgaaagaactagccttacctggagaactgactcagagcagaagttatgattttgaatttatgcaagttgaaaagccatatgaatcttacatcggtgccaatgtccgcttgaggtattttcttaaagtgacaatagtgagaagactgacagatttggtaaaagagtatgatcttattgttcaccagcttgccacctatcctgatgttaacaactctattaagatggaagtgggcattgaagattgtctacatatagaatttgaatataataaatcaaagtatcatttaaaggatgtgattgttggaaaaatttacttcttattagtaagaataaaaatacaacatatggagttacagctgatcaaaaaagagatcacaggaattggacccagtaccacaacagaaacagaaacaatcgccaaatatgaaataatggatggtgcaccagtaaaaggtgaatcaattccaataaggctatttttagcaggatatgacccaactccaacaatgagagatgtgaacaaaaaattttcagtaaggtactttttgaatttagtgcttgttgatgaggaagaccggaggtacttcaaacagcaggagataattttatggagaaaagctcctgaaaaactgaggaaacagagaacaaactttcaccagcgatttgaatctccagaatcacaggcatctgccgaacagcctgaaatgtgaactgaacaggagaaaaaaagaaaagcaaaaaactcctgtaacccttgagattaagttcagcaggttaaagatggttgcagctggagggggcggaaaaaggccaaaactccatatatgttagtcttcctttatcttacagcgcagcatttattttatgatataatgaaatgttcgttcatgtatatacatttttaaaagtgctttctttgaaacactggaactttgttaagctgcctttttttttttaacttcctactttgatgataagcactcagatatatatcagcgtaaacatgaaaaattttcatgtgagtaggctggtatttgtaattttgctttctttctgcataatgttgattataaatcctctcttttcaggctaatgattacctcttattctctacatgcaaaaaattaaatattttgtgttcaaataaaattagaaaacctgagtggcctcttgtgtcctgcagagatttaaaacatggcatctcaatatttttgagaactacatttgtttttaacatatgtgtttgagaaaagcatatggagtgtttcaccgcaggcacttctgagtaccattccatggcttccagaattttatcctctttgaggtcttctgtgctatgaatattagatttctttccccaagggattatgtggcaggtcattatggccttcttttttttggccatattaagtaacagttttgctatattccagtagtaccgttgtgtgttttctgcaatgtggagttgacttagcttggcattttagatttgttaaaactattttttccataaatactttgaaacatatttatatatttcaatttaaggaatctttttgccatgtgtatgcaaatattattttcttcatacattcattttcttttcaggggaaaattttgggatgggggactcaggaggacctgtgaagcatgtagttatctagatctgggtaatttcatgtttattaaactcgaactttggctagttaaactcatattgaaacttcatctagtctcttaattttttaacactaaattcaagtcatttgttttaagtctctaaaaaagaagattgcagtcatccattcatatgcatggggtctgatcgcaaatacactaaatgtggagtgtaggaaccaaaatgaaacctgctgtatggaaactactttcacttatggttcattggtttttgtaccaatattttttatgcacttcagtgcaagtcttgtcagttaaccttactttatgagtaagctaaataacccaaattacatttctttaaacctgttttactactatggcactttgataaaatggtcaggaaccaactttactggcaaaagggtccatgtaccaccatgtgctggagcatctgttctacatgtggatatctatgaatggtaatgttttccttcatgtaagtgcctattcagagtttcagaattttaaaatgccaaatattttcatggtcatttgcatgtagtaagccagaaaatattcaaagagattttgaaaaccaattgtatttaaccagcctcaaattgtgcaaccatgatgtataataaagaatttgaaacagaaa

SEQ ID NO: 34023 - DNA, 2554 bp, Homo sapiens
  source 1..2554: mol_type = unassigned DNA
gagcggtcacgtgtgaggggcggcccgaggtcacgtgacggagcgccggagcggagggagccggggctgggagttctcctgagggaagaggagtggagtaggggggacgcggcggcggcgttgacaatgagttttcttggaggcttttttggtccaatttgtgagatcgatattgttcttaatgatggggaaaccaggaaaatggcagaaatgaaaactgaagatggcaaagtagaaaaacactatctcttctatgacggagaatccgtttcaggaaaggtaaacctagcctttaagcaacctggaaagaggctagaacaccaaggaattagaattgaatttgtaggtcaaattgaacttttcaatgacaagagtaatactcatgaatttgtaaacctagtgaaagaactagccttacctggagaactgactcagagcagaagttatgattttgaatttatgcaagttgaaaagccatatgaatcttacatcggtgccaatgtccgcttgaggtattttcttaaagtgacaatagtgagaagactgacagatttggtaaaagagtatgatcttattgttcaccagcttgccacctatcctgatgttaacaactctattaagatggaagtgggcattgaagattgtctacatatagaatttgaatataataaatcaaagtatcatttaaaggatgtgattgttggaaaaatttacttcttattagtaagaataaaaatacaacatatggagttacagctgatcaaaaaagagatcacaggaattggacccagtaccacaacagaaacagaaacaatcgccaaatatgaaataatggatggtgcaccagtaaaaggagataattttatggagaaaagctcctgaaaaactgaggaaacagagaacaaactttcaccagcgatttgaatctccagaatcacaggcatctgccgaacagcctgaaatgtgaactgaacaggagaaaaaaagaaaagcaaaaaactcctgtaacccttgagattaagttcagcaggttaaagatggttgcagctggagggggcggaaaaaggccaaaactccatatatgttagtcttcctttatcttacagcgcagcatttattttatgatataatgaaatgttcgttcatgtatatacatttttaaaagtgctttctttgaaacactggaactttgttaagctgcctttttttttttaacttcctactttgatgataagcactcagatatatatcagcgtaaacatgaaaaattttcatgtgagtaggctggtatttgtaattttgctttctttctgcataatgttgattataaatcctctcttttcaggctaatgattacctcttattctctacatgcaaaaaattaaatattttgtgttcaaataaaattagaaaacctgagtggcctcttgtgtcctgcagagatttaaaacatggcatctcaatatttttgagaactacatttgtttttaacatatgtgtttgagaaaagcatatggagtgtttcaccgcaggcacttctgagtaccattccatggcttccagaattttatcctctttgaggtcttctgtgctatgaatattagatttctttccccaagggattatgtggcaggtcattatggccttcttttttttggccatattaagtaacagttttgctatattccagtagtaccgttgtgtgttttctgcaatgtggagttgacttagcttggcattttagatttgttaaaactattttttccataaatactttgaaacatatttatatatttcaatttaaggaatctttttgccatgtgtatgcaaatattattttcttcatacattcattttcttttcaggggaaaattttgggatgggggactcaggaggacctgtgaagcatgtagttatctagatctgggtaatttcatgtttattaaactcgaactttggctagttaaactcatattgaaacttcatctagtctcttaattttttaacactaaattcaagtcatttgttttaagtctctaaaaaagaagattgcagtcatccattcatatgcatggggtctgatcgcaaatacactaaatgtggagtgtaggaaccaaaatgaaacctgctgtatggaaactactttcacttatggttcattggtttttgtaccaatattttttatgcacttcagtgcaagtcttgtcagttaaccttactttatgagtaagctaaataacccaaattacatttctttaaacctgttttactactatggcactttgataaaatggtcaggaaccaactttactggcaaaagggtccatgtaccaccatgtgctggagcatctgttctacatgtggatatctatgaatggtaatgttttccttcatgtaagtgcctattcagagtttcagaattttaaaatgccaaatattttcatggtcatttgcatgtagtaagccagaaaatattcaaagagattttgaaaaccaattgtatttaaccagcctcaaattgtgcaaccatgatgtataataaagaatttgaaac

SEQ ID NO: 34024 - DNA, 1032 bp, Homo sapiens
  source 1..1032: mol_type = unassigned DNA
gagtaggggggacgcggcggcggcgttgacaatgagttttcttggaggcttttttggtccaatttgtgagatcgatattgttcttaatgatggggaaaccaggaaaatggcagaaatgaaaactgaagatggcaaagtagaaaaacactatctcttctatgacggagaatccgtttcaggaaagaacttttcaatgacaagagtaatactcatgaatttgtaaacctagtgaaagaactagccttacctggagaactgactcagagcagaagttatgattttgaatttatgcaagttgaaaagccatatgaatcttacatcggtgccaatgtccgcttgaggtattttcttaaagtgacaatagtgagaagactgacagatttggtaaaagagtatgatcttattgttcaccagcttgccacctatcctgatgttaacaactctattaagatggaagtgggcattgaagattgtctacatatagaatttgaatataataaatcaaagtatcatttaaaggatgtgattgttggaaaaatttacttcttattagtaagaataaaaatacaacatatggagttacagctgatcaaaaaagagatcacaggaattggacccagtaccacaacagaaacagaaacaatcgccaaatatgaaataatggatggtgcaccagtaaaaggtgaatcaattccaataaggctatttttagcaggatatgacccaactccaacaatgagagatgtgaacaaaaaattttcagtaaggtactttttgaatttagtgcttgttgatgaggaagaccggaggtacttcaaacagcaggagataattttatggagaaaagctcctgaaaaactgaggaaacagagaacaaactttcaccagcgatttgaatctccagaatcacaggcatctgccgaacagcctgaaatgtgaactgaacaggagaaaaaaagaaaagcaaaaaactcctgtaacccttgagattaagttcagcaggttaaagatggttgcagctggagggggcgg

SEQ ID NO: 34025 - DNA, 1410 bp, Homo sapiens
  source 1..1410: mol_type = unassigned DNA
acgtgacggagcgccggagcggagggagccggggctgggagttctcctgagggaagaggagtggagtaggggggacgcggcggcggcgttgacaatgagttttcttggaggcttttttggtccaatttgtgagatcgatattgttcttaatgatggggaaaccaggaaaatggcagaaatgaaaactgaagatggcaaagtagaaaaacactatctcttctatgacggagaatccgtttcaggaaaggtactctgtagaggacttgagtacttttgggatgtgtctatgcatggtcagatatgtttatgacgccttctataaggtaaacctagcctttaagcaacctggaaagaggctagaacaccaaggaattagaattgaatttgtaggtcaaattgaacttttcaatgacaagagtaatactcatgaatttgtaaacctagtgaaagaactagccttacctggagaactgactcagagcagaagttatgattttgaatttatgcaagttgaaaagccatatgaatcttacatcggtgccaatgtccgcttgaggtattttcttaaagtgacaatagtgagaagactgacagatttggtaaaagagtatgatcttattgttcaccagcttgccacctatcctgatgttaacaactctattaagatggaagtgggcattgaagattgtctacatatagaatttgaatataataaatcaaagtatcatttaaaggatgtgattgttggaaaaatttacttcttattagtaagaataaaaatacaacatatggagttacagctgatcaaaaaagagatcacaggaattggacccagtaccacaacagaaacagaaacaatcgccaaatatgaaataatggatggtgcaccagtaaaaggtgaatcaattccaataaggctatttttagcaggatatgacccaactccaacaatgagagatgtgaacaaaaaattttcagtaaggtactttttgaatttagtgcttgttgatgaggaagaccggaggtacttcaaacagcaggagataattttatggagaaaagctcctgaaaaactgaggaaacagagaacaaactttcaccagcgatttgaatctccagaatcacaggcatctgccgaacagcctgaaatgtgaactgaacaggagaaaaaaagaaaagcaaaaaactcctgtaacccttgagattaagttcagcaggttaaagatggttgcagctggagggggcggaaaaaggccaaaactccatatatgttagtcttcctttatcttacagcgcagcatttattttatgatataatgaaatgttcgttcatgtatatacatttttaaaagtgctttctttgaaacactggaactttgttaagctgcctttttttttttaacttcctac

SEQ ID NO: 34026 - DNA, 3691 bp, Homo sapiens
  source 1..3691: mol_type = unassigned DNA
gagctcgcccgccccctcccccgcccggagccgccgaagcgcctcggtgcgttgcaccgccggaggctgggcagctcgcagcgctgctcggcgctggaccccacccggcaggcgcaggccacccacacccggctctgtgcggctgccccccgcagcattgcacggccgaccctcgcccgcccactgccaccggccgcgggactggctgggactggctcggccgagggcactgctcctcggtgcattgctgctcgggcgccgcagcccgcagccgccagcctcccccggccgtgcccctcccccgtggagccggctgtccgtcggcgcccactgcccggcggcagcggcggagccaggcagccccgcggcggccgagcgcgctcgcgcatcgggccctctggccttctttacctagggcagcccgcgccccggtgcgagggagcggtccttaccgagacccgcccggcccggcggtgcgatgagcttcttcggcttcgggcagagcgtggaggtggaaatccttctgaacgatgcagagagtaggaagcgggccgagcacaagacggaggacgggaagaaggagaaatatttcctcttctacgacggggagacggtctccgggaaggtgagccttgccctcaagaaccccaacaagcggctggagcaccagggcatcaagatcgagttcatcgggcagatcgaactctactacgatcgcgggaaccaccatgagtttgtgtccctggtgaaggacctggcccggcctggagagatcacccagtcgcaggccttcgactttgagtttacccacgtggagaagccgtatgagtcctacacagggcagaatgtgaagctacgctatttccttcgtgctaccatcagccgccgcctcaatgatgttgtcaaagagatggacattgtagttcacacactcagcacatacccagagctgaactcttccatcaagatggaggttgggattgaggactgtctgcacattgaatttgagtacaataaatccaaataccacttgaaagatgtcattgtagggaagatatacttcctgctggtgagaatcaaaatcaagcacatggagatagacatcatcaagcgagaaacgacgggtacaggccccaacgtgtaccatgagaatgacacgatagccaagtacgagatcatggacggggcaccagtgcgaggagagtccatcccgatccggctcttcctggccgggtatgagctcacgcccaccatgcgggacatcaacaagaagttctctgtgcgctattacctcaacctggtgctgatagacgaggaggagcggcgctacttcaagcagcaggaagtggtgttgtggcggaagggtgacatcgtacggaagagcatgtcccaccaggcggccatcgcctcacagcgctttgagggcaccacctccctgggtgaggtgcggacccccagccagctgtctgacaacaactgcaggcagtaggcccccagggccgagaagatgctgggcacccacccagcacccccatctaccaacaccagcggctgggggcgggggcggaccttgtgaggctcagttgacccgttacttgcaacctgaaaacaaatcatgtttttgacttaaattcttttctctggagaacccaaggggcttggggtgggaagcagtctctccttgggattctgcggccgatgtgggatagaagaggtagcatcctggaagccagcctctctggggaacatgagcccccttcctcggggggctgccttgcgtcttagaggagggagagcagagagcacgcatccttggctcctggctctctgagcttcctgatacaggatctgagcatgtccctgggattctgagctgccaacagggccctgggtagtcacatcttgtactcccctttgctgtcccggaggtagtggcaggagttgggccagcccccactaagtggcaggggaagactcacgattgggaagctacctctttgggaatcttggatgtggtgatctcaagttcccacaggccacctccttctggccactcactgctgggacccaggcacctcccttctccatcctctctggattgtcagtaatgtcctggaacagaagcctgtgggatggccttgggcacggagaagccctggggtcagtgtcgtgcacggatggcggcagtgttgaacccaggaggctgaacccggcccaccacggaagatgagtgcatggcaaccgcctgccttcacgtcgctccacttggtaaccccaaggtctgggctgttctaggtattgcttcacgtgccccagcaagcccttaacaagagggcctggttccctgaagaaccaatcccaggaaggggccttgatccctccgccttgctgagagtgaaccctcgtctctcctcaccctccatttcatttctgggaattggggcttagtttcgaacctttggcaaggctgttcttactaatgcccaagcccctttacccctctccctataggttacacaggggagaccagggcctcggcagaagactgctgccacacttccgaatcattctgcttgccaaataggtcatcttcaccagttgactgacccaagtttaggaccattggtatcgtgtgtttaaaaaacacatataaaaaaactcttgtgaatattcttgttatgctagagaggaaggtacttctccctctacggctctgcgctggggcctatggtagtaaagttgtttactgtcctttttctgcttcccctggaaatgacaggcattactctcccattggcctcccttccctttatagaaagaccaagcaggccccactggccaagaggtacggtatttggcagtctgagttctcagtaatttggaaagttaaggagttggttcctgtgtcacctttcagttagtgtgggaaaggaagacttctgttttcctgagatcagtgcagtctcaggcctttggcagggctcatggatcagagctgagactggagggagaggcattttgggtagcctaggagggcgactggcggcagcagaaccgaggaaggcaaggttgtttcccccacgctgtgtcctgtgttcaggtgcgacacacaatcctcatgggaacaggatcacccatgcgctgcccttgatgatcaaggttggggcttaagtggataagggaggcaagttctgggttccttgccttttcagagcatgaggtcaggctctgtatccctccttttcctagctgatattctaactagaagcatttgtcaattcctttgcctcccaactgacaacacacgttcattttccaaccttcctaacatcttaaacctttcttctgggagaactagaagacagaatttgctttgattctctcaggcgctgtgcacaagccaggtcttctgttttctctttcttactctacccacattcttgccttctctatccaactgtgaaagtgaggggaggctcctgtccccctctcttaaggtccccaaacctgggagtgcataggtactaaatcaagcagtgcaacttgtaattaagcagctgcagtgtttacatgtttcttaatgtgtcatcttttcaatggctgtattaaaagaagaacgtttgttttaatggtctttctgattaaagaaagcccctgtggctttggaggcattgtgcccacggtccaccaa

SEQ ID NO: 34027 - DNA, 944 bp, Homo sapiens
  source 1..944: mol_type = unassigned DNA
cgctgaccgagcgcaccccgcccccggcgccatcttcccgaccgcgagccgtccaggtctcagtgctgtgccccccccagagcctagaggatgtttcatgggatcccagccacgccgggcataggagcccctgggaacaagccggagctgtatgaggaagtgaagttgtacaagaacgcccgggagagggagaagtacgacaacatggcagagctgtttgcggtggtgaagacaatgcaagccctggagaaggcctacatcaaggactgtgtctcccccagcgagtacactgcagcctgctcccggctcctggtccaatacaaagctgccttcaggcaggtccagggctcagaaatcagctctattgacgaattctgccgcaagttccgcctggactgcccgctggccatggagcggatcaaggaggaccggcccatcaccatcaaggacgacaagggcaacctcaaccgctgcatcgcagacgtggtctcgctcttcatcacggtcatggacaagctgcgcctggagatccgcgccatggatgagatccagcccgacctgcgagagctgatggagaccatgcaccgcatgagccacctcccacccgactttgagggccgccagacggtcagccagtggctgcagaccctgagcggcatgtcggcgtcagatgagctggacgactcacaggtgcgtcagatgctgttcgacctggagtcagcctacaacgccttcaaccgcttcctgcatgcctgagcccggggcactagcccttgcacagaagggcagagtctgaggcgatggctcctggtcccctgtccgccacacaggccgtggtcatccacacaactcactgtctgcagctgcctgtctggtgtctgtctttggtgtcagaactttgggggccgggcccctccccacaataaagatgctctccgaccttc

SEQ ID NO: 34028 - DNA, 1062 bp, Homo sapiens
  source 1..1062: mol_type = unassigned DNA
cgctgaccgagcgcaccccgcccccggcgccatcttcccgaccgcgagccgtccaggtctcagtgctgtgccccccccagagcctagaggatgtttcatgggatcccagccacgccgggcataggagcccctgggaacaagccggagctgtatgaggaagtgaagttgtacaagaacgcccgggagagggagaagtacgacaacatggcagagctgtttgcggtggtgaagacaatgcaagccctggagaaggcctacatcaaggactgtgtctcccccagcgagtacactgcagcctgctcccggctcctggtccaatacaaagctgccttcaggcaggtccagggctcagaaatcagctctattgacgaattctgccgcaagttccgcctggactgcccgctggccatggagcggatcaaggaggaccggcccatcaccatcaaggacgacaagggcaacctcaaccgctgcatcgcagacgtggtctcgctcttcatcacggtcatggacaagctgcgcctggagatccgcgccatggatgagatccagcccgacctgcgagagctgatggagaccatgcaccgcatgagccacctcccacccgactttgagggccgccagacggtcagccagtggtgggtgtccctcccagccaggcagagccccgcagtgcccgagaccctcccagccaggcggagccccgcagtgcccctgaggccctcagcccccacatgccctgtgctgcactcccaggctgcagaccctgagcggcatgtcggcgtcagatgagctggacgactcacaggtgcgtcagatgctgttcgacctggagtcagcctacaacgccttcaaccgcttcctgcatgcctgagcccggggcactagcccttgcacagaagggcagagtctgaggcgatggctcctggtcccctgtccgccacacaggccgtggtcatccacacaactcactgtctgcagctgcctgtctggtgtctgtctttggtgtcagaactttgggggccgggcccctccccacaataaagatgctctccgaccttc

SEQ ID NO: 34029 - DNA, 892 bp, Homo sapiens
  source 1..892: mol_type = unassigned DNA
ccaggtctcagtgctgtgccccccccagagcctagaggatgtttcatgggatcccagccacgccgggcataggagcccctgggaacaagccggagctgtatgaggaagtgaagttgtacaagaacgcccgggagagggagaagtacgacaacatggcagagctgtttgcggtggtgaagacaatgcaagccctggagaaggcctacatcaaggactgtgtctcccccagcgagtacactgcagcctgctcccggctcctggtccaatacaaagctgccttcaggcaggtccagggctcagaaatcagctctattgacgaattctgccgcaagttccgcctggactgcccgctggccatggagcggatcaaggaggaccggcccatcaccatcaaggacgacaagggcaacctcaaccgctgcatcgcagacgtggtctcgctcttcatcacggtcatggacaagctgcgcctggagatccgcgccatggatgagatccagcccgacctgcgagagctgatggagaccatgcaccgcatgagccacctcccacccgactttgagggccgccagacggtcagccagtggctgcagaccctgagcggcatgtcggcgtcagatgagctggacgactcacaggtgcgtcagatgctgttcgacctggagtcagcctacaacgccttcaaccgcttcctgcatgcctgagcccggggcactagcccttgcacagaagggcagagtctgaggcgatggctcctggtcccctgtccgccacacaggccgtggtcatccacacaactcactgtctgcagctgcctgtctggtgtctgtctttggtgtcagaactttgggggccgggcccctccccacaataaagatgctctccgaccttc

SEQ ID NO: 34030 - DNA, 3405 bp, Homo sapiens
  source 1..3405: mol_type = unassigned DNA
gtgcgctgccgtaccggtcacgtggacgtttggtcacgtgactgcgtccgtggtcctcccgtaggaaccggcggactcggttggcgttgtggggcagggggtggtggagcaagatggcggctcatctgtcctacggccgagtgaacctaaacgtgttgcgcgaggcggtgcgtcgcgagctgcgcgagttcctggacaagtgcgcaggaagcaaggcaatagtttgggatgaatacctaactggaccctttggcctgattgcacagtattcactattgaaggaacatgaagtggaaaaaatgttcacacttaaaggaaatcgtttgccggcagctgatgtgaagaatataattttttttgtcagacccaggctagagttgatggatataatcgctgaaaacgtgctcagtgaagatagacgaggcccaacgagagattttcatattctgtttgtgccacgccgtagcctgttgtgcgaacagcggttgaaggatctgggtgtcttgggatcctttattcacagggaggagtacagcttagatctcattccattcgatggggatctcttatccatggaatcagagggtgcattcaaagagtgctacctggagggtgaccagacgagcctgtaccacgcagccaaggggctgatgaccctgcaagctctgtatggaacgatcccccagatctttgggaaaggagaatgcgctcggcaagtggccaatatgatgatcaggatgaagagagagtttacaggaagccagaattcaatatttcctgtttttgataatctcttgttgcttgatcggaatgtggatttattaacacctcttgccactcagctgacatatgaaggactcattgatgaaatttatggcattcagaacagttatgtgaaattacctccagagaaatttgcacctaagaaacagggcgatggtggtaaggacctccccacggaagcaaagaagctgcagctgaattctgcagaggagctctatgctgagatccgagataagaacttcaacgcagttggctctgtgctcagcaagaaagcaaagatcatctctgcagcattcgaggaaagacacaatgctaagaccgtgggggagatcaagcagtttgtttcccagttgccccacatgcaggcagcaaggggctcgcttgcaaaccatacctcaattgcagaattgatcaaagatgtcactacttctgaagacttttttgataaattaaccgtggaacaggagtttatgtctggaatagacactgataaggtcaacaattacattgaggattgtatcgcccaaaagcactcgttgatcaaggtgttaagactagtttgcctccaatccgtgtgtaatagtgggctcaaacaaaaagttttggattattacaaaagagagattctccagacatacggctatgagcacatattgaccttacacaacctggagaaggccggcctgctgaaaccgcagacggggggcagaaacaattacccaactatacggaaaacattacgcctctggatggatgatgttaatgagcaaaaccccacggacatatcgtatgtgtacagtgggtatgccccgctcagtgtgcggctggcccagctgctttcccggcctggctggcggagcatcgaggaggtcctccgcatcctcccagggccccactttgaggagcggcagccactgcccacaggactgcagaagaaacgtcaaccgggagaaaaccgagtgactctgatatttttccttgggggcgtaaccttcgctgaaattgctgccctgcgatttctctcccagttggaagatggaggtacagaatatgtcattgccaccactaaactaatgaatggaaccagttggatagaggctctgatggaaaaacctttctaggatgttcagaggagacttaacaagtgtactgcagaataaactacctctttgaagaaattgctgaaaggaagtaaaaccccatagaagaaacatgggaatacagaatatattctggggtcagcttcttaaattatactactgtttactgctttctccgtctcttttgtattccctttttttttttcctttgagacggagtcttgctctgtcacccagactagagtgcagtggcacggtctcacctcactgcaacctccacctcctaggttcaagcaattctcctgcctcagcctcctgagtagctgggactacaggcatgcaccaccacacccggctaatttttgtatttttagtagccatggtgtttcaccatgttggccaggctggtctcaaactcctgacctcaggtgatccacctgcctcggcctcccacagtgctgggattacaggcctgagccaccgtgcctggcccctaatctgctgaagaaagaagaatagaagaaaatcaacctgagtaaaagcagcactggttttgagttttctaagctcagggtcttcattagagacctctggaaatacattaaggatggtgggggtagataatccattcagccagacaaacggggccagctcttaaaataagaaagctgagactgaggaggtgaaactgaaaataaaaagagaaagttcatcctctaatccccagtgctgtatttcttcaaggcgcatcaggcctaggacagtggttaagtgttgggagctggagatcattttatcactgagttgagatttctttttcctgcagagtgtgggagattatatttagggtcatcagtcactgtcgcaactgatcactaaggcaagtttgcttccttctacttcttacaaagcaagaggtttaggggagcttcttgcccagaaacaaagtttatgctctatgtgatcagctacatctccttaggttccatacttatcaggggcttttgacatggaagaatgtgataattggggagcaaccttctgagaattcagcctttgaagtaattcaaagacagtttcttagcacacacgttaactccagacacagcagtggtgggtgcctccattgaggtttccgttttctcttctgtccatcaagggcccaacatccaactggtcccacagtgagcaggggcaactcttgcttcttcagcatctggccacttcgtttccatggtaactgccacgtgtacttttctagcagtctgtggccactccgtactcagctgaaaacactgtttcagccccctctctggtgacctcagccttctccaggtgtatctcttgatgatcttggagaccagcagccacagctgctgctactcctgcaggagactgtcaggctgtggtggggggcaggggtgttggaggagaagttgaaaatccgtgtgttctctgcccctctgctcctccatcttagcttctggaggagttaaggcaccaagggcaccaagtcaggttg

SEQ ID NO: 34031 - DNA, 2767 bp, Homo sapiens
  source 1..2767: mol_type = unassigned DNA
gagatctaggaagtcgcttctttttctggtagaaggcggggttctcctcgtacgctgcggagtctctgcggggtgtagaccggaatcctgctgacgggcagagtggatcagggagggagggtcgagacacggtggctgcaggtctgagacaaggctgctccgaggtagtagctctcttgcctggaggtggccattcattcctggagtgctgctgaggagcgagggcccatctggggtctctggaagtcggtgcccaggcctgaaggatagccccccttgcgcttccctgggctgcggccggccttctcagaacgaagggcgtccttccaccccgcggcgcaggtgaccgctgccatggcttttccccatcggccggacgcccctgagctgcctgacttctccatgctgaagaggctggctcgagaccagctcatctatctgctggagcagcttcctggaaaaaaggatttattcattgaggcagatctcatgagccctttggatcgaattgccaatgtctccatcctgaagcaacacgaagtagacaagctatacaaggtggagaacaagccagccctcagctccaatgaacaattgtgcttcttggtcagaccccgcatcaagaatatgcgatacattgccagtcttgtcaatgctgacaaattggctggccgaactcgcaaatacaaagtgatcttcagccctcaaaagttctatgcgtgtgagatggtgcttgaggaagagggaatctatggagatgtgagctgtgatgaatgggccttctctttgctgcctcttgatgtggatctgctgagcatggaactaccagaatttttcagggattactttctggaaggagatcagcgttggatcaacactgtagctcaggccttacaccttctcagcactctctatggaccctttccaaactgctatggaattggcaggtgcgccaagatggcatatgaattgtggaggaacctggaggaggaggaggatggcgaaaccaagggccgaaggccagagattggacatatctttctcttggacagagatgtggactttgtgacagcactttgctcccaagtggtttatgagggcctagtagatgacaccttccgcatcaagtgtgggagtgtcgactttggcccagaagtcacatcctctgacaagagcctgaaggtgctactcaatgccgaggacaaggtgtttaatgagattcggaacgagcacttctccaatgtctttggcttcttgagccagaaggcccggaacttgcaggcccagtatgatcgccggagaggcatggacattaagcagatgaagaatttcgtgtcccaggagctcaagggcctgaaacaggagcaccgcctgctgagtctccatattggggcctgtgaatccatcatgaagaagaaaaccaagcaggatttccaggagctaatcaagactgagcatgcactgctagaggggttcaacatccgggagagcaccagctacattgaggaacacatagaccggcaggtgtcgcctatagaaagcctgcgcctcatgtgccttttgtccatcactgagaatggtttgatccccaaggattaccgatctctgaaaacacagtatctgcagagctatggccctgagcacctgctaaccttctccaatctgcgaagagctgggctcctaacggagcaggcccccggggacaccctcacagccgtggagagtaaagtgagcaagctggtgaccgacaaggctgcaggaaagattactgatgccttcagttctctggccaagaggagcaattttcgtgccatcagcaaaaagctgaatttgatcccacgtgtggacggcgagtatgatctgaaagtgccccgagacatggcttacgtcttcggtggtgcttatgtgcccctgagctgccgaatcattgagcaggtgctagagcggcgaagctggcagggccttgatgaggtggtacggctgctcaactgcagtgactttgcattcacagatatgactaaggaagacaaggcttccagtgagtccctgcgcctcatcttggtggtgttcttgggtggttgtacattctctgagatctcagccctccggttcctgggcagagagaaaggctacaggttcattttcctgacgacagcagtcacaaacagcgctcgccttatggaggccatgagtgaggtgaaagcctgatgtttttcccggccagtgttgacatcttccctgaacacattcctcagtgagatgcaggcatctggcacccagctgctataaccaagtgtccaccaactacctgctaagagccgggagcatggaacgtgttgggatttagagaacattatctgagaaaagagttcacttcctgctcccaggatatttctcttttctgtttatgaagtacaacccatgctgctaagatgcgagcaggaagaggcatcctttgctaaatcctgtttgaatgtcattgtaaataaagcctctgctctcagatgtaatacgttggtcgttctggacacgcacttccatctttattagtgaaagcccattggagcttgctacaggggcttcctgtgcttcttggcctggactttgtagtggctccaggcctggtctggttcttccctgtaaaaatcactctaccactctgtacctgagtttcctctaccataaaatgagggagatggctgaggtgaccagcaagcacgtttccagttctaaaatgttgtgattcattacatttttgagaaaatga

SEQ ID NO: 34032 - DNA, 1916 bp, Homo sapiens
  source 1..1916: mol_type = unassigned DNA
ggtagaaggcggggttctcctcgtacgctgcggagtctctgcggggtgtagaccggaatcctgctgacgggcagagtggatcagggaggctggctcgagaccagctcatctatctgctggagcagcttcctggaaaaaaggatttattcattgaggcagatctcatgagccctttggatcgaattgccaatgtctccatcctgaagcaacacgaagtagacaagctatacaaggtggagaacaagccagccctcagctccaatgaacaattgtgcttcttggtcagaccccgcatcaagaatatgcgatacattgccagtcttgtcaatgctgacaaattggctggccgaactcgcaaatacaaagtgatcttcagccctcaaaagttctatgcgtgtgagatggtgcttgaggaagagggaatctatggagatgtgagctgtgatgaatgggccttctctttgctgcctcttgatgtggatctgctgagcatggaactaccagaatttttcagggattactttctggaaggagatcagcgttggatcaacactgtagctcaggccttacaccttctcagcactctctatggaccctttccaaactgctatggaattggcaggtgcgccaagatggcatatgaattgtggaggaacctggaggaggaggaggatggcgaaaccaagggccgaaggccagagattggacatatctttctcttggacagagatgtggactttgtgacagcactttgctcccaagtggtttatgagggcctagtagatgacaccttccgcatcaagtgtgggagtgtcgactttggcccagaagtcacatcctctgacaagagcctgaaggtgctactcaatgccgaggacaaggtgtttaatgagattcggaacgagcacttctccaatgtctttggcttcttgagccagaaggcccggaacttgcaggcccagtatgatcgccggagaggcatggacattaagcagatgaagaatttcgtgtcccaggagctcaagggcctgaaacaggagcaccgcctgctgagtctccatattggggcctgtgaatccatcatgaagaagaaaaccaagcaggatttccaggagctaatcaagactgagcatgcactgctagaggggttcaacatccgggagagcaccagctacattgaggaacacatagaccggcaggtgtcgcctatagaaagcctgcgcctcatgtgccttttgtccatcactgagaatggtttgatccccaaggattaccgatctctgaaaacacagtatctgcagagctatggccctgagcacctgctaaccttctccaatctgcgaagagctgggctcctaacggagcaggcccccggggacaccctcacagccgtggagagtaaagtgagcaagctggtgaccgacaaggctgcaggaaagattactgatgccttcagttctctggccaagaggagcaattttcgtgccatcagcaaaaagctgaatttgatcccacgtgtggacggcgagtatgatctgaaagtgccccgagacatggcttacgtcttcggtggtgcttatgtgcccctgagctgccgaatcattgagcaggtgctagagcggcgaagctggcagggccttgatgaggtggtacggctgctcaactgcagtgactttgcattcacagatatgactaaggaagacaaggcttccagtgagtccctgcgcctcatcttggtggtgttcttgggtggttgtacattctctgagatctcagccctccggttcctgggcagagagaaaggctacaggttcattttcctgacgacagcagtcacaaacagcgctcgccttatggaggccatgagtgaggtgaaagcctgatgtttttcccggccagtgttgacatcttccctg

SEQ ID NO: 34033 - DNA, 4943 bp, Homo sapiens
  source 1..4943: mol_type = unassigned DNA
gaccgcgggaggctacgcgcggggcgggtgctgcttgctgcaggctctggggagtcgccatgcctacaacacagcagtcccctcaggatgagcaggaaaagctcttggatgaagccatacaggctgtgaaggtccagtcattccaaatgaagagatgcctggacaaaaacaagcttatggatgctctaaaacatgcttctaatatgcttggtgaactccggacttctatgttatcaccaaagagttactatgaactttatatggccatttctgatgaactgcactacttggaggtctacctgacagatgagtttgctaaaggaaggaaagtggcagatctctacgaacttgtacagtatgctggaaacattatcccaaggctttaccttttgatcacagttggagttgtatatgtcaagtcatttcctcagtccaggaaggatattttgaaagatttggtagaaatgtgccgtggtgtgcaacatcccttgaggggtctgtttcttcgaaattaccttcttcagtgtaccagaaatatcttacctgatgaaggagagccaacagatgaagaaacaactggtgacatcagtgattccatggattttgtactgctcaactttgcagaaatgaacaagctctgggtgcgaatgcagcatcagggacatagccgagatagagaaaaaagagaacgagaaagacaagaactgagaattttagtgggaacaaatttggtgcgcctcagtcagttggaaggtgtaaatgtggaacgttacaaacagattgttttgactggcatattggagcaagttgtaaactgtagggatgctttggctcaagaatatctcatggagtgtattattcaggttttccctgatgaatttcacctccagactttgaatccttttcttcgggcctgtgctgagttacaccagaatgtaaatgtgaagaacataatcattgctttaattgatagattagctttatttgctcaccgtgaagatggacctggaatcccagcggatattaaactttttgatatattttcacagcaggtggctacagtgatacagtctagacaagacatgccttcagaggatgttgtatctttacaagtctctctgattaatcttgccatgaaatgttaccctgatcgtgtggactatgttgataaagttctagaaacaacagtggagatattcaataagctcaaccttgaacatattgctaccagtagtgcagtttcaaaggaactcaccagacttttgaaaataccagttgacacttacaacaatattttaacagtcttgaaattaaaacattttcacccactctttgagtactttgactacgagtccagaaagagcatgagttgttatgtgcttagtaatgttctggattataacacagaaattgtctctcaagaccaggtggattccataatgaatttggtatccacgttgattcaagatcagccagatcaacctgtagaagaccctgatccagaagattttgctgatgagcagagccttgtgggccgcttcattcatctgctgcgctctgaggaccctgaccagcagtacttgattttgaacacagcacgaaaacattttggagctggtggaaatcagcggattcgcttcacactgccacctttggtatttgcagcttaccagctggcttttcgatataaagagaattctaaagtggatgacaaatgggaaaagaaatgccagaagattttttcatttgcccaccagactatcagtgctttgatcaaagcagagctggcagaattgcccttaagactttttcttcaaggagcactagctgctggggaaattggttttgaaaatcatgagacagtcgcatatgaattcatgtcccaggcattttctctgtatgaagatgaaatcagcgattccaaagcacagctagctgccatcaccttgatcattggcacttttgaaaggatgaagtgcttcagtgaagagaatcacgaacctctgaggactcagtgtgcccttgctgcatccaaacttctaaagaaacctgatcagggccgagctgtgagcacctgtgcacatctcttctggtctggcagaaacacggacaaaaatggggaggagcttcacggaggcaagagggtaatggagtgcctaaaaaaagctctaaaaatagcaaatcagtgcatggacccctctctacaagtgcagctttttatagaaattctgaacagatatatctatttttatgaaaaggaaaatgatgcggtaacaattcaggttttaaaccagcttatccaaaagattcgagaagacctcccgaatcttgaatccagtgaagaaacagagcagattaacaaacattttcataacacactggagcatttgcgcttgcggcgggaatcaccagaatccgaggggccaatttatgaaggtctcatcctttaaaaaggaaatagctcaccatactcctttccatgtacatccagtgagggttttattacgctaggtttcccttccatagattgtgcctttcagaaatgctgaggtaggtttcccatttcttacctgtgatgtgttttacccagcacctccggacactcaccttcaggaccttaataaaattattcacttggtaagtgttcaagtctttctgatcaccccaagtagcatgactgatctgcaatttaaaattcctgtgatctgtaaaaaaaaaaaaaaaaaaaaacacaaaacccacaagcacttatcttggctactaatgaagctctccttttttttgtttgtttgtttgcttcattgttgattgtgtattttcttcattcctggggagtactaacccaaaagcgtctgtctcttgttttctagtccagtttgagattaatttagaagaaaggaatactgtatgtgaaattcatcttgggctttcccctaaattgcaagataaggccatgtgtaagattttccctaaaactagaatatattaatgcatgtttgagaattttaaagcaccatggtcaaaaccagaagctatattttgcatatttggactcagccatccattaagaacccatgttgtcctctggacatatttatcaatataattgggttttaaatagtataaaagaaaacttgtgatctatataatttatgtatcaccttcattgtaaatttagcaggaaatgcatcacaattatgatttttttttttgcaccagtgaaacaataaagatgctattaacaattttggagctttttttcccctttcatactatctttaattgataaaaagtactagtagtatggctatagagtttaatagtcattctcatatattcacagagctcacttaactctagttttaagcacttgttgaacaaggcagcatctactcttttagtcatttataccccttttctttcctcaactttaccctgcttttcccaaggcatgatgaattcacataaaccccccaaaggctcaccaccgatactagttacctactatataataaaccatcccaaaacttactgtcttaaaacagcaaacatttatctcacaggtctctggatcaggaatttgggagcagcttagctggtggttctggcaaagagtgtggtgtaaggttgcaaacaagatactggttggggctgcagtcatctgatgctttgactggggctgacttttctgctcactgacctggctgttaggcagaggccccagttcctcttcttgagggcagaggccccagttcctctccttgagggcagaggcctaagttcctttccttgagggcagaggccccagttcctctccttgacggcccttccatagagtgtcctcacagcatggtggctggctttcccctgagtatgaaagcaagaaggaaaccacagtgcctttcagtggcctccctgtggaagtgacatgctcatttttgccttattctgtaagtggggagtcactaagtctagcctatattcaagggtaaggagaattaagctccacctcttaaagggaaaatttatagacattttcaaatgactacatcacttaacccctcaccatctgccctcccattgctagcacttgatgactagcccttgctgggctttacatgaacagatgtttcccaaagttataaaattagtaccactaaaatgtatcaaatgttaagccattctgtggtatgtcatagtccagcaaaccctttctgttctttgtaggtgttagtttaccccgtataaacctgattatggcttgacatgtccatattatttacatgttttgtgaaatacaactggaatagtagaaaagacatgagtcaagaacacttgagttggagagcttggtttgcaagtaaggtaatgtcagtacagtgtgtaaattatctcttattttctgggttgaggtaaacccaattttaaaaataataaaccaacaaaagtaaataaaagtgaaacaaaagcactgctagtatccttaacttacagattttttttgttgaacaaaaactgggtaccagatatagttaggcactgaatctaaaggtgaagaagatcatagcctctagcttcaagaacgttagtctgctgtgaagacagacctgtagttacagaagatggtaagggtttgtgcaggagagcagtgaagaagagctttgagggattggggatggggaagttctgcagagggttgtatgaattctcatggaacatcaagtccaatagtttatttagccttctgaggccagtgctttggcctgcagtcccaggctcctcagacccatgggctgaagcaagttatactcttggctgcctgtagtgaaatagatatttagaaattgacttagcatttaaaaccctttatagcaatttgacagagtaattttatgtctattggatgtaataaatatttggctttgtgctttgtgtgtctgcta

SEQ ID NO: 34034 - DNA, 2698 bp, Homo sapiens
  source 1..2698: mol_type = unassigned DNA
acgcgcggggcgggtgctgcttgctgcaggctctggggagtcgccatgcctacaacacagcagtcccctcaggatgagcaggaaaagctcttggatgaagccatacaggctgtgaaggtccagtcattccaaatgaagagatgcctggacaaaaacaagcttatggatgctctaaaacatgcttctaatatgcttggtgaactccggacttctatgttatcaccaaagagttactatgaactttatatggccatttctgatgaactgcactacttggaggtctacctgacagatgagtttgctaaaggaaggaaagtggcagatctctacgaacttgtacagtatgctggaaacattatcccaaggctttaccttttgatcacagttggagttgtatatgtcaagtcatttcctcagtccaggaaggatattttgaaagatttggtagaaatgtgccgtggtgtgcaacatcccttgaggggtctgtttcttcgaaattaccttcttcagtgtaccagaaatatcttacctgatgaaggagagccaacagatgaagaaacaactggtgacatcagtgattccatggattttgtactgctcaactttgcagaaatgaacaagctctgggtgcgaatgcagcatcagggacatagccgagatagagaaaaaagagaacgagaaagacaagaactgagaattttagtgggaacaaatttggtgcgcctcagtcagttggaaggtgtaaatgtggaacgttacaaacagattgttttgactggcatattggagcaagttgtaaactgtagggatgctttggctcaagaatatctcatggagtgtattattcaggttttccctgatgaatttcacctccagactttgaatccttttcttcgggcctgtgctgagttacaccagaatgtaaatgtgaagaacataatcattgctttaattgatagattagctttatttgctcaccgtgaagatggacctggaatcccagcggatattaaactttttgatatattttcacagcaggtggctacagtgatacagtctagacaagacatgccttcagaggatgttgtatctttacaagtctctctgattaatcttgccatgaaatgttaccctgatcgtgtggactatgttgataaagttctagaaacaacagtggagatattcaataagctcaaccttgaacatattgctaccagtagtgcagtttcaaaggaactcaccagacttttgaaaataccagttgacacttacaacaatattttaacagtcttgaaattaaaacattttcacccactctttgagtactttgactacgagtccagaaagagcatgagttgttatgtgcttagtaatgttctggattataacacagaaattgtctctcaagaccaggtggattccataatgaatttggtatccacgttgattcaagatcagccagatcaacctgtagaagaccctgatccagaagattttgctgatgagcagagccttgtgggccgcttcattcatctgctgcgctctgaggaccctgaccagcagtacttgattttgaacacagcacgaaaacattttggagctggtggaaatcagcggattcgcttcacactgccacctttggtatttgcagcttaccagctggcttttcgatataaagagaattctaaagtggatgacaaatgggaaaagaaatgccagaagattttttcatttgcccaccagactatcagtgctttgatcaaagcagagctggcagaattgcccttaagactttttcttcaaggagcactagctgctggggaaattggttttgaaaatcatgagacagtcgcatatgaattcatgtcccaggcattttctctgtatgaagatgaaatcagcgattccaaagcacagctagctgccatcaccttgatcattggcacttttgaaaggatgaagtgcttcagtgaagagaatcacgaacctctgaggactcagtgtgcccttgctgcatccaaacttctaaagaaacctgatcagggccgagctgtgagcacctgtgcacatctcttctggtctggcagaaacacggacaaaaatggggaggagcttcacggaggcaagagggtaatggagtgcctaaaaaaagctctaaaaatagcaaatcagtgcatggacccctctctacaagtgcagctttttatagaaattctgaacagatatatctatttttatgaaaaggaaaatgatgcgatagtaacaattcaggttttaaaccagcttatccaaaagattcgagaagacctcccgaatcttgaatccagtgaagaaacagagcagattaacaaacattttcataacacactggagcatttgcgcttgcggcgggaatcaccagaatccgaggggccaatttatgaaggtctcatcctttaaaaaggaaatagctcaccatactcctttccatgtacatccagtgagggttttattacgctaggtttcccttccatagattgtgcctttcagaaatgctgaggtaggtttcccatttcttacctgtgatgtgttttacccagcacctccggacactcaccttcaggaccttaataaaattattcacttggtaagtgttcaagtctttctgatcaccccaagtagcatgactgatctgcaatttaaaattcctgtgatctgt

SEQ ID NO: 34035 - DNA, 4315 bp, Homo sapiens
  source 1..4315: mol_type = unassigned DNA
ggagggccggggctgggtggcagcggccatggaccgcttcgtttggaccagcggcctcctggagatcaacgagaccctggtgatccagcagcgcggggtgcgaatctacgatggcgaggagaagataaaatttgatgctgggactctccttcttagtacacaccgactgatttggagagatcagaaaaatcatgagtgttgcatggccattctcctttcccaaattgtgttcattgaagaacaggcggctggaattgggaagagtgccaaaatagtggttcatcttcacccagctcctcctaacaaagaacctggcccattccagagtagtaagaactcctacatcaaactctccttcaaagaacatggccagattgagttttacaggcgtttatcagaggaaatgacacaaagaagatgggagaatatgccagtttcccagtcattacaaacaaatagaggaccccagccaggaagaataagggctgtaggaattgtaggtattgaaaggaaactggaagaaaaaagaaaagaaactgacaaaaacatttctgaggcctttgaagacctcagcaaactaatgatcaaggctaaggaaatggtggaattatcaaaatcaattgctaataaaattaaagacaaacaaggtgacatcacagaagatgagaccatcaggtttaaatcctacttgctgagcatgggaatagctaacccagttaccagagaaacctacggctcaggcacacagtaccacatgcagctggccaaacaactggctggaatattgcaggtgcctttagaggaacgagggggaataatgtcactcacggaggtgtactgcttagtaaaccgagctcgaggaatggaattgctctcaccagaagatttagtgaatgcgtgcaagatgctggaagcactgaaattacctctcaggctccgtgtgtttgacagtggcgtcatggtaattgagcttcagtctcacaaggaagaggaaatggtggcctcggccctggagacagtttcagaaaagggatccctaacatcagaagagtttgctaagcttgtgggaatgtctgtcctcctagccaaagaaaggttgctgcttgcagagaagatgggccatctttgccgtgatgactcagtggaaggcctgcgtttttacccaaatttatttatgacacagagctaagggttttgtatttaaaatcctttttgtccatatgcttgcgtcatgtagaggttgtatgacattgagctaagagataaaccccgatcaattgagaatttattggaacttcacagtgcaatgtaaatctcttttaatttctcactaaatatggtccaggaaatttatttagtatacgcataggaaaattcagaaaagtgaatgccaatatgaatttaaaatcatgctatagtgcagaaccctcagagtttaacttggaatatagtggattttaacttgatcctcaaatctaatcattttataaagaagggaatttagttttgcagagaataaaaagagaagttgcatgttcagacaggttagattattattttggtgtaactgaaattcactgattgcacatgacaatgttgggacaaaatatactgcagcatgctatatgaggctcctccccagggcttttagaagcagtcatagacatgtcttcaacataccaaataaaatacctttaaaaatgaaataattttatttgacacatatatttatatatattctatctagtttctctttgtttttttaagtgatgatttcatgactggcatttaaagaatgcaactgtgtcattttgtttccaaatgctgtggattttgaaactgaactagagagctgtatagacatgcccagagttatgattacaaatttaggaggtagacggctcaggaattccctgggattgttgtgctggtggaatggcagagggaacttcacaggaaccttagtgttcttttacctcaaagccacagacaggaaatagaaagtggaaaagtaatatctccttttcttttccataaggagtttcaacactgaactttaaaaagtctatcatattccagcaatattttttctttgtcctttatgttgtaagttgtgtggaaaaactacttcggtaagaaatgttactgagataacaacaactggctaatactgcatgtagattgcttaggttttaaagtgactgcctgacttcacatgttattgctacagcctccagtatgttcgcattatctcaaactcagggaccccacaggacaggagacaccctttctgaaactgagttggaagtgaaagggtggtgatggttttggccaagcctgcgggagggaaagtattgtattgggagcacccttgggaccaggaagagggatgcccaggttcacactctgggacccctaagacattgtcagtgggtaaggtggagggccactgccagaggctgctgcagtgccctctgggaagtgccagggaccctcagctgcagacccaggggatcccaatcccttatctctgcctgaaaagtggctattgctgcttcgtatcctccagtgtcacaggaatgctgtgcctgagacatcccactttagtttttgttttccaaacctgtcactgactcttcattgtggtgacagatcctctggttcccccattgctcagcctcaggtttattttgagggtaactcagtgtctgactgcccaagtcttttaggggttagttggaccattgtgtaagcttgtttgtatgtctcacctctttctggttggtacttactgtctcacactgctctggcaaacttgtacacacacacacactctctctctctctcacctggctaaggcttttaaaattatgaagataaataatctgtttcaccagctggagtgagttgcaaggaagattgctggagctactcaatctagcgctaatggtttggattcattactgcaaacctacataatttaacatatttgtttactttagtgtgacaactgatgaaaaaaaatggagcaatctgaattgtataaaataacttaagaaggaagaaaagtgatatataaatatattttgcaaatgtcacattaatttaaaaatgagtatgattgattttatttttaaagtgggcattcttcactgtttcgagacctttgtatgtatttgtgtatttttatctttttttttcaggccattattataaggtgttattttggccctctaatgtagaagttatgtttaaatacaaccaatcaggccctaagtgcaaaaaagttctgtcttggtgcttatcactggtataattattatttttttgttttcctaactttgctcttaggagcatgagcctctttgtagctttatggtaatgcaatatttctggtcatttactgtcaaaaaatttttttacattgtgttagtgaagactgtgttttcagggttaaatgattggtatcaatgtatatagagtaaaattattgcaaaatttaaaaatgatttttcttggcattctttttaaatactctgaaacatatatgcaaatgagaaacctttaatcatactaaagccagttatgttaagaatttttcctttggattttataattaagagttgcttataaatacttatgacattgagctcttactgttttagttgtcttaaaacaatgggacatgtcatgaactggtttctttttttaaaaaattcttgatgtgaattccactgttacctgaccatgtatattcagatgaatgtactctttcttgttccttgttaccagattaatctgagagaatgtggattcatcctgtcatctttctcatactcaaatacttaaaatggttcttttgcccaaaagtctcagagtcttcattttggtacagtggagtcacaacttgtaaggtggttaggttttaaagaccgtgcctaaggacaaaattgagcatgctcagaatggtccttgaaaatctcctaaattaccaataaatttctctttgtagtcttaaagtttaaatccctgtggagtgatatgtaggtatgaatatattatgcttatattaagtacaaaaatacaaactgcatatcaagagattcttatagcattaataatttccatgcatgtgtctttttccagtaggtatggttgaatttatgtaaatttattgctaatcccatcccttacgatctagagtataagctgcgcaagggcagaagtttttatctggtttgttcatggatgtattctaagagctgagaacagggcctggacacaataagcattcaataaatatttactgaatgaa

SEQ ID NO: 34036 - DNA, 911 bp, Homo sapiens
  source 1..911: mol_type = unassigned DNA
gcagagggggcggagagcgcccccgggggcggggcacgcaagtgacggcggcgcgggtggtggagcgctgggcggccaggctccctggctggccggtttgggcgtctgggccgtgaaggtgggacctcctgttccgggccgcaagtttccctctccagccgcccgccgttcgtagcatgtcccccagaactcggggagcgcaggcaggacaggcttagagaagacgcggtccccagcgcttgggccacggacgtcccaccccgctcctctgtcgctggagaaccgccgggccgagccactgggagaagcaggccagagccttccagggcctccggcccgtggacccgaggaggatgagctggctttttcccctgaccaagagcgcctcctcctccgcggctgggtcccccggtggcctcaccagcctccagcagcagaagcagcgcctgatcgagtccctccggaactcacactccagtatagccgaaatacagaaagatgtggaatacagattgccattcaccataaacaacctgacaattaacattaatatattgcttcctccacagtttcctcaggaaaaaccagtgatcagtgtttatccaccaatacgacatcacttaatggataaacaaggagtgtatgttacctctccattagtaaacaattttacaatgcactcagatcttggaaaaattattcagagtctgttggatgagttttggaagaatcctccagttttagctcctacttcaacagcatttccttaccagctagaaatcaggtggcaccatccgcactgcctggaaatctccttagctagatcatccaattcactagggttttccatttcttcctccatatcctccacaagaagcaaacaggagtatcacttctttatctgttgctga

SEQ ID NO: 34037 - DNA, 4906 bp, Homo sapiens
  source 1..4906: mol_type = unassigned DNA
agctggcgccatcgcgcaccctctcaggttcatcgtccccgccccctttctacttccctaacccgcccctccccccgtaaggctgcagcggatgcaagatctacttgtgtcgctgagctcgcgctcctcctcctcctcctcgccatagagacagcactcggcggcggtggcggtggcggtggcggtagcggcggcggcagcgggtgccccatagacacctctcgcccagcgaagggaaaggcgagcaggagctgcgccgcaccgtgctgcgccgtcgcttttcgcacgtcctgacgggggcgctagatgatgacgcgacacgcagagggggcggagagcgcccccgggggcggggcacgcaagtgacggcggcgcgggtggtggagcgctgggcggccaggctccctggctggccggtttgggcgtctgggccgtgaaggtgggacctcctgttccgggccgcaagtttccctctccagccgcccgccgttcgtagcatgtcccccagaactcggggagcgcaggcaggacaggcttagagaagacgcggtccccagcgcttgggccacggacgtcccaccccgctcctctgtcgctggagaaccgccgggccgagccactgggagaagcaggccagagccttccagggcctccggcccgtggacccgaggaggatgagctggctttttcccctgaccaagagcgcctcctcctccgcggctgggtcccccggtggcctcaccagcctccagcagcagaagcagcgcctgatcgagtccctccggaactcacactccagtatagccgaaatacagaaagatgtggaatacagattgccattcaccataaacaacctgacaattaacattaatatattgcttcctccacagtttcctcaggaaaaaccagtgatcagtgtttatccaccaatacgacatcacttaatggataaacaaggagtgtatgttacctctccattagtaaacaattttacaatgcactcagatcttggaaaaattattcagagtctgttggatgagttttggaagaatcctccagttttagctcctacttcaacagcatttccttatctatacagtaacccaagtgggatgtctccttatgcttctcagggttttccatttcttcctccatatcctccacaagaagcaaacaggagtatcacttctttatctgttgctgacactgtttcttcttcaacaacaagtcataccacagccaagcctgccgctccttcatttggtgtcctttcaaatctgccattacccattcccacagtggatgcttcaataccgacaagccaaaatggttttgggtacaagatgccagatgtccctgatgcatttccagaactctcagaactaagtgtgtcacaactcacagatatgaatgaacaagaggaggtattactagaacagtttctgactttgcctcaactaaaacaaattattaccgacaaagatgacttagtaaaaagtattgaggaactagcaagaaaaaatctccttttggagcccagcttggaagccaaaagacaaactgttttagataagtatgaattacttacacagatgaagtccactttcgaaaagaagatgcaaaggcagcatgaacttagtgagagctgtagtgcaagtgcccttcaggcaagattgaaagtagctgcacatgaagctgaggaagaatctgataatattgcagaagacttcttggagggaaagatggaaatagatgattttctcagtagcttcatggaaaagagaacaatttgccactgtagaagagccaaggaagagaaacttcagcaggcgatagcaatgcacagccaatttcatgctccactatagattttcctggaaacatgaactgccaagagaggaatgggacacaaaaccaaacactgttttatatttatggtttgcaaactggcatttcatcagtggctaaattcacagatatcctatatagattgtatacagaactgagactgattttgtaccgattagaatgattgctatgatctttgagaaatttttctgcactatttgcactgaaatgtttatttattgttgataaattgtatcatatttaagttccactgctgttcctcttaccttgattaaatgcctatgcatgtacttttagctagtttttaatattttataaaacttcatttaaatttgtatttttaacttgaagttccatttctttatcaaggatggtatttagatttttttcctcttaaccttttttcaaaaactattttcaactgtgaggaaacccttatttttctttctttgtggataaaactttcaaaagcaatttaagatattcatagtgttaggaaacaccaaacctgcctatgtgccatctcacaaaagaaacttttaatacctacaataaatcaaaagaataaaccagctgttcttatatattgtttcatttttaaaactaaagatgcatttaagaagcaatacaagtaaatattttacctaataggaaaaaaaaaagttgcctttcatttaaaccattccaacagaaattcttatgctaatttaaaacatatatatatctggtaggtttgtggttggataggttttctaaattcctaatgttaaaaacaatctttatgttaatatacactaaatctatacacaaaaaaagtcagtgaacttttctgacctttactgtgagttaccttttcctaagaggaaagctatagtaataagtaaaatttaatttttaggcaatcctgatttttaatgaatttaattgagtgttcttgtatactacattgagcagtttgcttctataccgtgtcacaaaattcatgtatttcttgagaagccctaaaagctcataaaggaaaatgccgtgaactatgtagctcaggcttggtaaggtgccatctaaattacaaaacaaactaatgcataattttgcttaaatttcatcccagtatgattgtcttcccaacaccagcatatagtatagattgtctgtcttttttatattttttagttcttcctgtacatgtttttggcaataaagttataggaagaacaaaattattttgttagaattaaaacatgcttaatatttagtctgtttgtggagggcaggtattcacgtggactgagatacaatgttggatacagaaaataactttcattgtcttcctgacactgtgctaaggacatgctgttaaagcttcaaagtgaccagatgaggaaggaataattaattattactcctgatttgtagataactgaggtaagagtgtttcaaatttatgatagtcttttgggtattcagaaacctttccttatactgcactggccaccagagcttaattttcccagcagttacagcaatgggagatagaacagtctcaatcttttgccaaccatcaggttcctagaaaccaggtaggtgtatcccataacaagggaggagcataccacagcccctcatttgattaattcatttgatctatctatgttattaagtacctactaggaataaggcattgtggaaatactatacaaagataaacattgtttagatgcttatctactttccttttcaccagaaaaacagaaaaaaaagaaacattttcttacagagtaaaaatgttctacataatcacatgagtagttcatctcagtgttttttattctttaaagttgaactatcccagtttcattctataccattcattggataaccttgttacaacccagtcatgaaacagagcagtgtgatcagttatctgcatttaacaaatagacaaatcagtttacataaaggttatgtatgtcacccacgatgaaaagaatctgcatttgaatatgcccgtatgaatgtgggttctgtttttgcaacagagattaagtgaccattttttctaattttatggctatatattttcttcataaaaattggtcacatcggagaagcagtgccacaggaaaaatgaaatgcatgtgaaagtttgtattctgattttacaagatgagatagaaatcagaattaaagaggaatacttaggagttactaggctaatcagtgtacgaatttgtcataggtagagatttaaaggttaatatcttaaaatagaagaaaattctaaatcaatcaatcagtgagatataaactaaacagacccacttcaaagttgaaagaaatttctaggcataaattgagactaggaaatttatatcagaatagagggtgcttgacacatatatatgcttaaattgaaggacagctcagattcatttttaggagaagaaagtaaactaatgtgctcttaaagaataaaaatttattctatggtttctgtctctgatcatcaccttccattctataaaaagctcagttactgatttgctgggtcatggtcaaaattcttacctatttatttcatatcaactttaaaaaataaattacttgcattctatatattactaattgggaagtaatatgcctcaaatcagttttatactggattattccctatgctttaaaccactgctctcaataaaacacttcctgattaatgtttgattattagatattttagtcttgttggggatattttagtcttgttgggttagccatgctctgaagaatctgtgaaagtacagtaaagttttaataagcaataaatgtaaccttttatataaatctcagtgctaggttaacttctaataagcagacgaacatgttacataaattataatgtctgtcttgtaaaaaagttgaggggactaaaagtttatgactctgatatggaagttgtcatattaaaaaactacattttaaaacatcaaatatttatactatttgcttttcaaataaaagcatagtgctgtttggcata

SEQ ID NO: 34038 - DNA, 1307 bp, Homo sapiens
  source 1..1307: mol_type = unassigned DNA
cccagcgcttgggccacggacgtcccaccccgctcctctgtcgctggagaaccgccgggccgagccactgggagaagcaggccagagccttccagggcctccggcccgtggacccgaggaggatgagctggctttttcccctgaccaagagcgcctcctcctccgcggctgggtcccccggtggcctcaccagcctccagcagcagaagcagcgcctgatcgagtccctccggaactcacactccagattgcttcctccacagtttcctcaggaaaaaccagtgatcagtgtttatccaccaatacgacatcacttaatggataaacaaggagtgtatgttacctctccattagtaaacaattttacaatgcactcagatcttggaaaaattattcagagtctgttggatgagttttggaagaatcctccagttttagctcctacttcaacagcatttccttatctatacagtaacccaagtgggatgtctccttatgcttctcagggttttccatttcttcctccatatcctccacaagaagcaaacaggagtatcacttctttatctgttgctgacactgtttcttcttcaacaacaagtcataccacagccaagcctgccgctccttcatttggtgtcctttcaaatctgccattacccattcccacagtggatgcttcaataccgacaagccaaaatggttttgggtacaagatgccagatgtccctgatgcatttccagaactctcagaactaagtgtgtcacaactcacagatatgaatgaacaagaggaggtattactagaacagtttctgactttgcctcaactaaaacaaattattaccgacaaagatgacttagtaaaaagtattgaggaactagcaagaaaaaatctccttttggagcccagcttggaagccaaaagacaaactgttttagataagtatgaattacttacacagatgaagtccactttcgaaaagaagatgcaaaggcagcatgaacttagtgagagctgtagtgcaagtgcccttcaggcaagattgaaagtagctgcacatgaagctgaggaagaatctgataatattgcagaagacttcttggagggaaagatggaaatagatgattttctcagtagcttcatggaaaagagaacaatttgccactgtagaagagccaaggaagagaaacttcagcaggcgatagcaatgcacagccaatttcatgctccactatagattttcctggaaacatgaactgccaagagaggaatgggacacaaaaccaaacactgttttatattt

SEQ ID NO: 34039 - DNA, 3021 bp, Homo sapiens
  source 1..3021: mol_type = unassigned DNA
gggctcacaggctgcgggaacttccttcccactgcctgttttccttggatcgcggtatctctcttcctggaggaaaaaggctcttatgacctcatggcgcgctctcccgagccgcagtgacgtcattaatgcgctcacgcgtcacagcccaatcatagggcccttcccctccctttagaagtcccgactgtccctgacacattccactccaagcgagccgcgacacttacgtcacgtccgcccgcccgcgcggtgatgacgtcacgacccagggctggcgtcacgtgtcccccccgcggggggcggcccttgagggcggcgcttccggtcggcggagcctggtggccgcagcggcggtggcgacgacggccgagacgtggggatggcgggcgccgggagcgaagcccggttcgccgggctgtcgctggtgcagctcaacgagctgctggaggacgagggccagctgacggagatggtgcagaagatggaggagacacagaatgttcagcttaacaaagaaatgacacttgccagcaaccggagcctggcagaaggaaaccttttgtaccagccccagctggacacgttgaaagcacgcttgacccagaaataccaggaactccaggttctctttgaagcctatcagataaagaagaccaaattagacagacagtctagcagtgcttccttggagaccctgttagcacttcttcaggcagaaggggccaagattgaggaagacactgagaacatggcagagaagtttctggatggagaacttcctctggattccttcattgatgtctatcagagcaaacggaaactggcccacatgcgacgggtgaaaatcgagaagctccaggagatggtcctaaaggggcagagactcccacaggccctggccccgctgccccccaggctgcccgaactggcacctaccgccccccttccctaccctgccccagaggccagtgggcctcctgccgttgcacctcggcgcatcccccccccaccacccccggtgcctgcgggacgcttagccaccccgtttactgcggccatgagttcgggacaggccgtgccgtacccaggattacagtgcccgcccctgcccccccgcgtgggcctccccactcagcaaggattctcttcgcagttcgtgtccccatatccgccacctctccctcagagacccccgccccggctccctccacaccagccgggtttcatcctccagtgagcgccggcgcggtccttcccgggagacttcttccacctggcgtgttgtgctctgctcacgggaaggaggctggaggtccgctctgtgccaagggctctggggccctgggccagcgtgtctgtctgattttagaactgtaggtcagtggtgagtagtaggagcccaggctttgggcatcaaggcagttgtgtgtgccgggttacagcctgacacctgtgcgttgcatcggtttgcattatccgtgtgatttctaagtatcttagcgttgatgaactcatgtttgggaagaaataggcctctcccccagtcccatttagaatcgtggtccttctgttgcagctttatttaatgagcatggttcatgatacttattttattttcgaaagacagtcctatgtgtctcacccaccggccactgcagccctggtgagggcgggtgggcgccggccggcctggaagagcgccgtggctgggccaccacctgtggctgcgttgttgctcactgaatctgttggggagaggtcaccatagtcaccgcctgacctggctgctgctcttgcttcagagccacaagcaaagtttgcactgggcccactgccgagtccagaggccggagaacggccactggtgtgggaggggagcgcacgagtgggactttgcacagcaaattgtgtccccagctcctcctctcccgcctgcctggagccggccctgaaggtttctatgaagaaataatcccccaatatttttactacgtgtgtgattttcctgttttatattgaaaaaacttttttgacactcccaagaccattcagggaaattttataaaaaatgcagatactgtcttgagcagatcgaaatgccgatgaagtggatgcaatttccttttgtgcaagcagtgcacggtgcccccccctcgggtgtccgtgctgtgccttagcttccccaggtgccgggactcacacctgctaggggctgggcaaggccccggctctgctttctctgaagggcttgtccaagttcattgccctgttacaggtggtcaagacgtccggccgccttgacccaggctacccttagccaatatcctctgcccctgggtggctggtggctgggcctcagggtgggcaacgttaggggtttggcgaaagcccgccccatgggattgagggacggggctgcactccaaccgtctgcacctgctcttcccccacccctgtgggacctcatcttcacgtgccatgtgtgctgaaggcccagggcccagcagggggcagtggcacctgttgacggaaaaggccgaggtgcttaccagtggaccttctggcccgcccctcccctgtcacttgtcgggcatccagggccccgacctgtgcctagccgccagggtgacagaaggcagaactgaagcggggtctgggccacgggccaggccactgccttttgtcctcagtgaccgtacattcctgctctcggacttgaactctactgtaactgttttcttaaaggaaatgaagctgtacaggacgattcactgccatgccagtcaggcgggcttgccatgttctgtgaatctcgagtgagcggtgccacccgcccccatacctccgccaccggccgctgtcggggatgccacagcctgccacggtcgcagccagacgtgagcttggcattgaagttgcaaagcggcccctggccgggctcgccgtcgctgtccagggccgtgtccggtgctgtggctgtaaagctgtaggaccctttttaataaatagagaattatt

SEQ ID NO: 34040 - DNA, 2865 bp, Homo sapiens
  source 1..2865: mol_type = unassigned DNA
gtggcccgggcggccgcgagcgtgtgtgtgtggcacgatgtcgtggtaactcagaggcgcgcgaggcggggcggccaacggggtcgcggggcgagcacgcgcgccactggggcgccggacgttgcaagggggtcacatccggtagggggcgggcctggcggaccccggaagtgtgggcgcggctgcggtttaacccgcggtggcggcggcgacggcggccctggcagggaaggatggagacgctgaaggataagaccctgcaggagctggaggagttgcagaatgactcggaggcgattgaccagctggccctggagtcccctgaggtccaggacctacagctggaacgggagatggcactggccaccaaccggagcctggcagagcggaacttggagttccagggtcccctggagatcagccgctcaaacctctcggatagataccaggagctccggaagctcgtggagcggtgccaggagcagaaggcaaagctggagaaattttcttcagcactgcagccagggaccttgttagaccttctgcaggtggaaggcatgaagatcgaagaagagtccgaggccatggctgagaagttcctggagggcgaggtgcccctggaaacgttcctggagaatttttcctccatgaggatgctgtcccacctgcgccgggttcgcgtggaaaagctccaggaagtggtgaggaagcccagggcttcccaggagctggccggcgatgcccctccaccccgtccaccacccccggtgcgcccagtcccccagggaacaccccctgtggttgaagagcagccgcagccaccattagccatgcctccctaccctttgccctacagcccatcccccagcctgcctgtgggccccactgcccatggagccctgccaccggcccctttcccagtagtgtcccagccctccttctacagcgggcctctgggccccacttacccggcagcccagcttggacccaggggtgctgcgggttactcctggtccccacagaggagcatgccaccccggccgggctatcctgggaccccaatgggtgcctctgggcctgggtaccccttgcggggaggcagggcccccagtcctggttatcctcaacagtccccataccccgcaacaggaggaaaacctccctacccaatacagcctcagctccccagctttccaggccagccccagccctcagtgcccctgcagcccccttatccccccgggcccgcccctccctatgggttcccaccaccgccggggcctgcctggcctgggtattagacacactcctggccctcggcccctccctagtcccacccacgctcaacctttggcccagccatcgccgagattcgagggtcaactggaagtggcgttggtgctccctgtggacttgcgtcggcacccagaggccttggagggacaaggcactgggcggtgtgactggtcatggcacttgctggccttctggccagaggtcctcctggaagcccctcctttcagtgcctggctgcagcggtgctagccaggctggagtccagcacctctcgccggtgtctgtgtgagtgagcgcatgtgcgcatttatgagcatctacttgcggctgcactcagggccatttgaacccagtgcagagttatctctatgaggaggccccgggtctccagccccctccatctcccctggggtttggcatatttgacatggagccccatgccaagggatgcagctgttggtgtctgtccagtccattcaaggctagcctgcccatgcactgtggcaggggttggattggagggagagaacagagttgggaaaaacaacaggtttgagtcctataaagccataatttaactccagtagctgatgtcagacaagcttgtcctatgtcctatttgagtggcagcagcgccagcccagcaagaaggctgggggttgtcaaggttgtccccagaccttgcttgcagtggttggagaacccagggggctgccttgggccctctggccagagggaagcgggcagctctagccctggagattgtggtcacattggggcttgtttaggattggagggccaggtcacctccccagccaccctcccttctctcctctggggtccccactttagggcgactttgcccgaggcccacgcatccatccactcctttagtgccttgaatctcattcacaagcagccccctcccttcccctccccttctcactctgttgatgtaatcctcccacccccagtgtccatcctaagacaggcatcaaaagaggccctaactttacttcccaaatggtgctttttaaaaaacaccatcactacattaggggcaattttttcacacctccctgtcttcagaatgtaaagggtggggattatgtctctgtttaatatgcagccccctgcactgtggggtttggggcatgttcagtaataagaatgaatacaatagacaaagggggtgtgatgagtgttaacttggttgttccagaggtaaaccaggtctcagggaagagcctggagctgctattgcttaggaagttgtacgtgccttgaaatgtccactacctgaggacgcagcatctggtgggcccggggctgctggggccaaggagggaccttgaccttctggtgcctgcccctccccggcctatgtgccatccgcgtgacgctaggtcagcgctgccggttctttaccaaatgtgcttgcttctcctaagttatttataaagagaaatcactaatggactctactggtttgagtgcttctgagctggatgaccgaccgcctgtatgtttgtgtaattaattgccataataaactttgatgagtcacat

SEQ ID NO: 34041 - DNA, 506 bp, Homo sapiens
  source 1..506: mol_type = unassigned DNA
ccccaccactcaccgccaccctcctttctgcgtctctgcaggccctcgtcccatatggaaggatggagacgctgaaggataagaccctgcaggagctggaggagttgcagaatgactcggaggcgattgaccagctggccctggagtcccctgaggtccaggacctacagctggaacgggagatggcactggccaccaaccggagcctggcagagcggaacttggagttccagggtcccctggagatcagccgctcaaacctctcggatagataccaggagctccggaagctcgtggagcggtgccaggagcagaaggcaaagctggagaaattttcttcagcactgcagccagggaccttgttagaccttctgcaggtggaaggcatgaagatcgaagaagagtccgaggccatggctgagaagttcctggagggcgaggtgcccctggaaacgttcctggagaatttttcctccatgaggatgctgtcccacctgcgccgggtt

SEQ ID NO: 34042 - DNA, 1230 bp, Homo sapiens
  source 1..1230: mol_type = unassigned DNA
actggggcgccggacgttgcaagggggtcacatccggtagggggcgggcctggcggaccccggaagtgtgggcgcggctgcggtttaacccgcggtggcggcggcgacggcggccctggcagggaaggatggagacgctgaaggataagaccctgcaggagctggaggagttgcagaatgactcggaggcgattgaccagctggccctggagtcccctgaggtccaggacctacagctggaacgggagatggcactggccaccaaccggagcctggcagagcggaacttggagttccagggtcccctggagatcagccgctcaaacctctcggatagataccaggagctccggaagctcgtggagcggtgccaggagcagaaggcaaagctggagaaattttcttcagcactgcagccagggaccttgttagaccttctgcaggtggaaggcatgaagatcgaagaagagtccgaggccatggctgagaagttcctggagggcgaggtgcccctggaaacgttcctggagaatttttcctccatgaggatgctgtcccacctgcgccgggttcgcgtggaaaagctccaggaagtggtgaggaagcccagggcttcccaggagctggccggcgatgcccctccaccccgtccaccacccccggtgcgcccagtcccccagggaacaccccctgtggttgaagagcagccgcagccaccattagccatgcctccctaccctttgccctacagcccatcccccagcctgcctgtgggccccactgcccatggagccctgccaccggcccctttcccagtagtgtcccagccctccttctacagcgggcctctgggccccacttacccggcagcccagcttggacccaggggtgctgcgggttactcctggtccccacagaggagcatgccaccccggccgggctatcctgggaccccaatgggtgcctctgggcctgggtaccccttgcggggaggcagggcccccagtcctggttatcctcaacagtccccataccccgcaacaggaggaaaacctccctacccaatacagcctcagctccccttctcactctgttgatgtaatcctcccacccccagtgtccatcctaagacaggcatcaaaagaggccctaactttacttcccaaatggtgctttttaaaaaacaccatcactacattaggggcaattttttcacacctccctgtcttc

SEQ ID NO: 34043 - DNA, 1624 bp, Homo sapiens
  source 1..1624: mol_type = unassigned DNA
ggcggcggagcggtgcgtgcggccggagccggagcggatcctggagccggagcggagcggagcggagcggagccggggcggagcgggccgagcgggccgagccagcagccgagctgggggcgcgggcgggcggcatgtaccgggcccgggcggcgcgggcggggccggagcccggcagcccggggcgctttgggatcctcagcaccgggcagctccgggacctgcttcaggatgagcccaagctggaccggatcgtgcggctcagcaggaagttccagggcctgcagctggagcgtgaggcctgcctggcctccaactacgcgctggccaaggagaacctggccctgcggccccgcctggagatgggccgggctgccctggccatcaaataccaggagcttcgtgaggtggccgagaactgcgcggacaagctgcagcgactggaggaaagcatgcatcgctggagtccccactgcgcgctgggctggctgcaggctgagctagaagaggcggagcaggaggcagaggagcagatggagcagctgctgctcggggagcaaagcctggaggccttcctgcctgccttccagcgtggccgcgccctggcccacctgaggcggacgcaggcagagaagctgcaggagctgctgcggcgtcgggagcgttctgcccagccggcccccacctcggctgctgatccccccaaatccttcccggctgcagctgtcctgcccactggggccgcccgggggccaccagcagtgccccggagcctgccccccttggactcccgcccagtgcccccactgaagggctcccccgggtgccccctcggcccggcccccctgctgagccctcggccctcgcagccagagcccccccaccggtaggatccacggtgcggccccccagttggggggcctagacaaacttgatgcgtggctcctcctcctcccccactgcctgggtggggggaggggcaggcccctccccctggcctcaggcaggccctggccctggaggctgagctggggaggagggtcccctggaagaggcccgagagggggctgggggtgggtgggcagggctttatgcctctggcgctgaagacaccctgccttttttgtttccgtgccccggggcctctagggtgatggaccagccccgttaaagaacttgactcaactacaggggcctgggaagatgcctgggtcccctaggggccttgccaaggggacctgtcgcaccccaccactccactgggctcgcacaacgccaaggccgccaggagtgttttacatcatgtcctgagcctacctttcccccaaattctggggcccacagcctaggagccaggtgatcaggcctcggctgtggggccagggacaccatggccctggggctactacgtgtccacacatgctccagaccctggggcaaggtaggccaggggcttctgacctgtgcaggtgagagtgggccatacccaggaaagaccattctgtatttttctgtccctgtctccttagaatggaagctttttgagggcaggtccttgtctttgtacgttctgtccccagccccgcctcttaggggccgtcaataaatgtgatgatgaggatga

SEQ ID NO: 34044 - DNA, 4844 bp, Homo sapiens
  source 1..4844: mol_type = unassigned DNA
agcaggaagtccggggttgacgatggctgtgttgttgaagggcctgtagccggggggttcctggccggatcccggtctacccttagcccagactcgttccggaccccagcccggcccggaacactctgggcgagacggcggtggcaactctccccttgccgccatgcacgacgctttcgagccagtgccgatcctagaaaagctgcctctgcaaatcgactgtctggctgcctgggaggaatggcttcttgtgggaaccaaacaaggacatcttcttctctataggattcggaaggacgttggttgcaacagatttgaagtgacactagagaaatccaataagaacttctccaaaaagattcagcagatccatgtggtttcccagtttaagattctggtcagcttgttagaaaataacatttatgtccatgacctattgacatttcaacaaatcactacggtttcaaaggcaaagggagcatcactgtttacttgtgacctccagcacacagagaccggtgaggaggtgttacggatgtgtgtggcagtaaaaaagaagctgcagctctatttctggaaggacagggaatttcatgaattgcagggggactttagtgtgccagatgtgcccaagtccatggcgtggtgtgaaaattctatctgtgtgggtttcaagagagactactacctaataagggtggatggaaaggggtccatcaaagagctctttccaacaggaaaacagctggagcccttagttgcacctctggcagatggaaaagtggctgtgggccaggatgatctcaccgtggtactcaatgaggaagggatctgcacacagaaatgtgccctgaactggacggacataccagtggccatggagcaccagcctccctacatcattgcagtgttgcctcgatatgttgagatccgaacatttgaaccgaggcttctggtccaaagcattgaattgcaaaggccccgtttcattacctcaggaggatcaaacattatctatgtggccagcaatcattttgtttggagactcatccctgtccccatggcaacccaaatccaacaacttctccaggacaagcagtttgaattggctctgcagctcgcagaaatgaaagatgattctgacagtgaaaagcagcaacaaattcatcacatcaagaacttgtatgccttcaacctcttctgccagaagcgttttgatgagtccatgcaggtctttgctaaacttggcacagatcccacccatgtgatgggcctgtaccctgacctgctgcccacagactacagaaagcagttgcagtatcccaacccattgcctgtgctctccggggctgaattggagaaggctcacttagctctgattgactacctgacacagaaacgaagtcaattggtaaagaagctgaatgactctgatcaccagtcaagcacctcaccgctcatggaaggcactcccaccatcaaatccaagaagaagctgctacaaatcatcgacaccaccctgctcaagtgctatctccatacaaatgtggccctggtggcccccttgctacgcctggagaacaatcactgccacatcgaggagagcgagcacgtgctaaagaaggctcacaagtacagtgagcttatcatcctgtatgagaagaaggggctccacgagaaagctctgcaggtgctcgtggaccagtccaagaaagccaactcccctctgaaaggccacgagaggacagtgcagtatctgcagcatctgggcacagaaaacctgcatttgattttctcctactcagtgtgggtgctgagagacttcccagaagatggcctgaagatatttactgaagatctcccggaagtggagtctctgccacgtgatcgagtcctcggcttcttaatagagaattttaagggtctggctattccttatctggaacacatcatccatgtttgggaggagacaggctctcggttccacaactgcctgatccagctatactgtgagaaggtgcaaggtctgatgaaggagtatctcctgtccttccctgcaggcaaaaccccagtcccagctggagaggaagagggtgagctgggagaataccggcaaaagctcctcatgttcttggagatttccagctactatgatccaggccggctcatctgtgattttccctttgatggcctcttagaagaacgagctctcctgttggggcgcatggggaaacatgaacaagctcttttcatttatgtccacatcttgaaggatacaaggatggctgaggagtactgccacaaacactatgaccgaaacaaagatggcaacaaagatgtgtatctgtccctgcttcggatgtacctgtcgccccccagcattcactgcctggggccaatcaagctggaactactggagccaaaagccaacctccaggccgctctgcaggtcctcgagctacaccacagcaaactggacaccaccaaggccctcaaccttctgccagcaaacactcagatcaatgacatacgcatcttcctggaaaaggtcttggaagaaaatgcacaaaagaaacggttcaatcaagtgctcaagaaccttctccatgcagaattcctgagggtccaggaagagcggattttacaccagcaggtgaagtgcatcatcacagaggagaaggtgtgcatggtgtgtaagaagaagattgggaacagtgcatttgcaagataccccaatggagtggtcgtccattacttctgttccaaagaggtaaacccagctgacacttgagcccagcatcctggggatccagcggatggacagcttggctctcccagagaggtgaaggagcacctggccttaggaatcctggctgccaccaccacaaggctccccatttggacattactggctatcttgtgccctggaacaactctgaattaattagactcatggtctggcattgccagctttttaatgggaaaagagattagttataccttataccattatgttgtgggcaattccagagaattcagtacctgcttggtcaggaggatgtgcaccatcttgcctttgcacaccagtcacctgaacaaggaaacttgtcacaagtgtttgtaaccatggggttgttcatcaagggcttttctattaagtacatgacttcacaaggaccgctcagcatggctcactggagagttccatgagagaacagcactcaagcttctggccgcatggacccgatggctcgcattctgtgtagtgttttacgtctccatggtaactgtgccctgcacccctcggtagccgccctgttagttttcagtctccttttctttctcaccatttatcacttccctcactgccctacccaggctttctctcccacttccctgactctgggaataactaatatttaagcaaggtaagatgagaagcaaggggtctcagttctaggaatacagtgctagttgattgtcaggtatgttgtaaatagaccctctttggccatacactccatgcctagatgcctcggagagcatcattctctgcctaggcaaggccctgcatcccttgcctcaggccgggctgagtgtgactgcagctcctgaggatgggcctgccctgtctggggtatgcgtgatccctagatacatgttcccacagaggtgcctgctccgtcttcgctcaccagacactcaggcaggctggcttagtctttgtgcgtggcgattttgtgctctgggccctttctctttttccagccagtttccattcacttgccttacagcctgccctggccgtcactccccagctttgttcagcaatggtgtggttggagagttgtgctgggatagcgcaggaaggtgggtcccggcaacacgcaggggatgagtggacctggaactgacaatggcgtgctgccaagtgttcctgagaggtgtttaggcacagcagaggggacgcggggggcaagaacagcaggacgctggtttaaaaataactcaccgccaaacctgtggagcagtgtggggcatcctgccagaggtgcacaggctggagtttcaggcactgcaggctgatgacacacagggagagtggccctgcctcctgtcctccccggggtttttgcagactcgaagtctcactgcaccagtgtctttgatggtggtgagggtgggtgatggtgcccagcaccaacagttttagtggcctgtccttgacctgccgtggtcctttgtaaactatggctccatgctgtgtgacagatcaacgtgctgatggtaagtagactaggcttccccaggcatgccgtccgtgggggcctgaagagacagtgagtgccattggccccattcgcagatgtgggagactctgctcaggcctgtgaggctgggcagcccttcaccagagttcggaggagcagtgtgtggcgccacgtcccgactggccatacccacacagaagcagtgctgcccggggcctcatctgggccagcttggactctgcttcctccaggagcagcagggaagctctgggccacctccctggatagcaggaacttgacctgccatgtgtgccctgccttcctggccagctgtgcttgttatcttccattctcacaaactgtctttgaagcaatagaataaagaatgtgtgttttctttcctggtatacatacatgatcccatgctcccaagctccattcttccttccctcaactctctgccctccacagagctatggagaaggctggagatgaaagctttgtagtgaggactgataaagatctcatcactgctccttataataaacctaataaagcaagaaaccaagccta

SEQ ID NO: 34045 - DNA, 2661 bp, Homo sapiens
  source 1..2661: mol_type = unassigned DNA
atgcacgacgctttcgagccagtgccgatcctagaaaagctgcctctgcaaatcgactgtctggctgcctgggaggaatggcttcttgtgggaaccaaacaaggacatcttcttctctataggattcggaaggacgttgtgccagcagatgtagcatcacctgaaagcggcagttgcaacagatttgaagtgacactagagaaatccaataagaacttctccaaaaagattcagcagatccatgtggtttcccagtttaagattctggtcagcttgttagaaaataacatttatgtccatgacctattgacatttcaacaaatcactacggtttcaaaggcaaagggagcatcactgtttacttgtgacctccagcacacagagaccggtgaggaggtgttacggatgtgtgtggcagtaaaaaagaagctgcagctctatttctggaaggacagggaatttcatgaattgcagggggactttagtgtgccagatgtgcccaagtccatggcgtggtgtgaaaattctatctgtgtgggtttcaagagagactactacctaataagggtggatggaaaggggtccatcaaagagctctttccaacaggaaaacagctggagcccttagttgcacctctggcagatggaaaagtggctgtgggccaggatgatctcaccgtggtactcaatgaggaagggatctgcacacagaaatgtgccctgaactggacggacataccagtggccatggagcaccagcctccctacatcattgcagtgttgcctcgatatgttgagatccgaacatttgaaccgaggcttctggtccaaagcattgaattgcaaaggccccgtttcattacctcaggaggatcaaacattatctatgtggccagcaatcattttgtttggagactcatccctgtccccatggcaacccaaatccaacaacttctccaggacaagcagtttgaattggctctgcagctcgcagaaatgaaagatgattctgacagtgaaaagcagcaacaaattcatcacatcaagaacttgtatgccttcaacctcttctgccagaagcgttttgatgagtccatgcaggtctttgctaaacttggcacagatcccacccatgtgatgggcctgtaccctgacctgctgcccacagactacagaaagcagttgcagtatcccaacccattgcctgtgctctccggggctgaattggagaaggctcacttagctctgattgactacctgacacagaaacgaagtcaattggtaaagaagctgaatgactctgatcaccagtcaagcacctcaccgctcatggaaggcactcccaccatcaaatccaagaagaagctgctacaaatcatcgacaccaccctgctcaagtgctatctccatacaaatgtggccctggtggcccccttgctacgcctggagaacaatcactgccacatcgaggagagcgagcacgtgctaaagaaggctcacaagtacagtgagcttatcatcctgtatgagaagaaggggctccacgagaaagctctgcaggtgctcgtggaccagtccaagaaagccaactcccctctgaaaggccacgagaggacagtgcagtatctgcagcatctgggcacagaaaacctgcatttgattttctcctactcagtgtgggtgctgagagacttcccagaagatggcctgaagatatttactgaagatctcccggaagtggagtctctgccacgtgatcgagtcctcggcttcttaatagagaattttaagggtctggctattccttatctggaacacatcatccatgtttgggaggagacaggctctcggttccacaactgcctgatccagctatactgtgagaaggtgcaaggtctgatgaaggagtatctcctgtccttccctgcaggcaaaaccccagtcccagctggagaggaagagggtgagctgggagaataccggcaaaagctcctcatgttcttggagatttccagctactatgatccaggccggctcatctgtgattttccctttgatggcctcttagaagaacgagctctcctgttggggcgcatggggaaacatgaacaagctcttttcatttatgtccacatcttgaaggatacaaggatggctgaggagtactgccacaaacactatgaccgaaacaaagatggcaacaaagatgtgtatctgtccctgcttcggatgtacctgtcgccccccagcattcactgcctggggccaatcaagctggaactactggagccaaaagccaacctccaggccgctctgcaggtcctcgagctacaccacagcaaactggacaccaccaaggccctcaaccttctgccagcaaacactcagatcaatgacatacgcatcttcctggaaaaggtcttggaagaaaatgcacaaaagaaacggttcaatcaagtgctcaagaaccttctccatgcagaattcctgagggtccaggaagagcggattttacaccagcaggtgaagtgcatcatcacagaggagaaggtgtgcatggtgtgtaagaagaagattgggaacagtgcatttgcaagataccccaatggagtggtcgtccattacttctgttccaaagaggtaaacccagctgacacttga

SEQ ID NO: 34046 - DNA, 2175 bp, Homo sapiens
  source 1..2175: mol_type = unassigned DNA
cctgcccgcgcaccgcgctcagcgcccaccgccgggcttcccgcgccggacccagtacctcggctccccggggccggaccgaggccgcaagcagcgccgcggggtgtggggcggacccaggagatgaaatgacaacgtcaaccctccagaaagccattgatctggtgacgaaagccacagaggaggacaaagccaagaactacgaggaggcgctgcggctgtaccagcatgcggtggagtacttcctccacgctatcaagtatgaggcccacagcgacaaggccaaggagagcattcgagccaagtgcgtgcagtacctagaccgggccgagaagctgaaggattatttacgaagcaaagagaaacacggcaagaagccagtcaaagagaaccagagtgagggcaagggcagtgacagtgacagtgaaggggataatccggagaaaaagaaactgcaagaacagctgatgggtgccgtcgtgatggagaagcccaacatacggtggaacgacgtggccgggctggagggggccaaggaggccctcaaagaagctgtcattttgccaatcaaattcccacacttgttcacaggcaagcgcaccccctggcgggggattctgctgttcggaccccctggcacagggaaatcctacctggccaaagccgtggcaacagaggccaacaactccaccttcttctctgtgtcctcctcagatctgatgtccaagtggctgggggagagtgaaaagctggtcaagaacctgtttgagctggccaggcagcacaagccctccatcatcttcatcgatgaggtggattccctctgcgggtcccgaaatgaaaatgagagtgaggccgcccggaggatcaaaacggagttcttggtccagatgcagggggtggggaataacaatgatgggactctggttcttggagccacaaacatcccatgggtgttggattcggccatcaggaggaggtttgaaaaacgaatttatatccccttgccggaggaagctgcccgcgcccagatgttccggttgcatctcgggagcactccccacaacctcacggatgcaaacatccacgagctggcccggaagacggaaggctactcgggcgcggacatcagcatcatcgtgcgggactctctcatgcagcccgtgaggaaggtgcagtcggccacacacttcaaaaaggtctgtggcccctctcgcaccaaccccagcatgatgattgatgacctcctgactccatgctcaccaggggacccaggagccatggagatgacttggatggatgtccctggggacaaactcttagagcctgtggtttgcatgtcggacatgctgcggtctctggccaccacccggcccacggtgaatgcagacgacctcctgaaagtgaagaaattctcagaggactttgggcaagagagttaaaagctgcttcacttgggcaatggtgaaggtgggaggttgattggggcaaatccaggcactccccatgtcaacagccagacagggctccagggcttgtcccagtcaatacagagttccctctgctgtctggccgtctgccagggagccagaaggaagggccttgcagccacagagacactccactgccctggggcacacagtggacactgctcttcctacttcctcctctcctggatgctcatcagctccttctgcctcccccccttttttttccatcttttgttcccctaaattaatgctgcttggattttcatcttatttataaagataaaatcacctggaagtgtcaaggagtggggcggggtggcgggggagaagcagccgtgctgccaggtcacccagacctccagacagccggctagccccactgcccgttccttttacgcccaagttttgctccttgagagcagattggctgatgcccctgcaaccccagcccaagctctgcctcaaagaccgagtgacataagccattcccaccctcctaggttcacatccagggctgtgtcttccttgggggaggagatggtgtcgtttagatcagggtaaggcagtcaggcgggtgttcaccactgccttttcttcctctgagcgtgagaacactgaacccagccactgcccctgggtccctgtcctggaaatggtctaataaatccttttcccttcttgagct

SEQ ID NO: 34047 - DNA, 3321 bp, Homo sapiens
  source 1..3321: mol_type = unassigned DNA
gcggaagtttggtggggagggtcggagctctggtggagagagtgttgtctaaaacaagttccggaagggaggctgcccttcgcggtccgagaaccaccggcctccccagtttgagggctgttaccccgtgcgcgcttcgacgttgctgctgttggctctcctcgcccctcgttcccttgggaaccgcctgggaactccgccatgtcatccacttcgcccaacctccagaaagcgatagatctggctagcaaagcagcgcaagaagacaaggctgggaactacgaagaagcccttcagctctatcagcatgctgtgcagtattttcttcatgtcgttaaatatgaagcacagggtgataaagccaagcaaagtatcagggcaaagtgtacagaatatcttgatagagcagaaaaactaaaggagtacctgaaaaataaagagaaaaaagcacagaagccagtgaaagaaggacagccgagtccagcagatgagaaggggaatgacagtgatggggaaggagaatctgatgatcctgaaaaaaagaaactacagaatcaacttcaaggtgccattgttatagaacgaccaaatgtgaaatggagtgacgttgctggacttgaaggagccaaagaagcactgaaagaggctgtgatactgcctattaaatttcctcatctttttacaggcaagagaacaccttggaggggaatcctattatttgggccgcctggaacaggaaagtcctacttagccaaagctgtagcaacagaagccaacaactcaacatttttttcaatatcttcctctgatcttgtttctaagtggctaggtgaaagtgaaaaactggttaagaatttattccaacttgccagagagaacaagccctccattatcttcattgatgaaattgattctctctgtggttcaagaagtgaaaatgaaagtgaagccgcacgtagaattaagacggagttcctagtgcaaatgcaaggggttggtgtagacaatgatggaattttggttctgggagctacaaatataccctgggttctggattctgccattaggcgaagatttgagaaacgaatttatattcccttgccggaaccccatgcccgagcagcaatgtttaaactgcacctagggaccactcagaacagtctcacggaagcagactttcgggaacttgggaggaaaacagatggttattcaggggcagatataagtatcattgtacgtgatgcccttatgcagcctgttaggaaagtacagtcagctactcattttaaaaaggttcgcggaccttcccgagctgatcctaaccatcttgtagatgatctgctaacaccttgctctccaggtgaccctggtgccattgaaatgacatggatggatgtccctggagataaacttttggagccagttgtttccatgtcggatatgttgcggtcactatctaacacaaaacctacagtcaatgaacatgacttgttgaaattaaagaagtttacagaagattttggtcaagaaggctaagccaaagacaaggaagatgcttaccatatgtattctttctttcatagatatttttgtctatttggatcgcattaattgtttccagtaaaactcttttaccacagggaaatacacatctcacttcagagttccattaggttttatattgtacttttcctccattacttattaaatactcctattaacaaaaggtacaaaataacaggttatgaggaaatgagcgatatatgaacggcataaaaacagaaattacccagtaaaaaggatgtcagaaattgacatacaaatatttacaatttttatgaatggtggtctttgcaaagagcatttatattttcttttttttttactaaaatgatatagggtttattttatattttcaaaaaaattgttaaacatcattcttatcaatgtaaaatttacgttattaaaaaattacaaatgatagaatctttactcagggatgggcaataaaacagcaaagagctttgtgattgggtttgaaagattttgaattatagacagtgctcttaatagtttttaataagttgatatttttttctgtgtagatttaaataatttctttaaaagcgtaagctttggctgggcatggtggcttatgcctgtaatcccagcactttgggaggctacgatgggtggatcacctgaggtcaggagttcaagaccagtctggccaacatggtgaaatgccgtctctactaaaaatacaaaaattagctgggcatgatggcgagtgtctgtaatcccagctactcaggaggctgaggcgggagaatcacttgaacctgggaggcagaggttgcagtgagctgagatcgcgctactgcattccagcctgggcgccgagatagcgccattgcactccagcctgggcgactgaataaaactctgtctcaaaaaaaaacaaaaacggtaagcttttatatttaattaactgatacctttcactgtgcaatctcaagaggaagattttctaaattagacattgtctttaccttaaagaagaaaattgtctatttcagtgtcttttttagcaagattgaccaaaacaggtggtaggtgtgtaatttttaactgtcatgaaatactgtaatgcgcacctttgctaataaggaaatggtctccctttgaattatgggaagtttcttgtctgtgatatggggtgtctgtgtacatatatgtatatttccttttttaatacaggataataatatggggtcttgtccttcaccttttaagttcagggaacagtttgtcctgaccacacatatgttatcagtgtaatgctttatgaagctttagaaatgagctcatgactcattaaaaaataataaacgatgctattttaatattttcaaataaataatctgaggatgtgtttcatactttagcatcaacgctgagttgtgccttgtagaattgcattgtctatacatgcaaaagactattaagttaggatgaactagattccctaattacagtgaaattctatcttgcaaatgctatagaataacttgcattttaaagtgtatttgcacattttacatatgctatgtggttgcctttgggttttctgtacagattgtttttgttattaaatggaaaaggcctgaattatgctcttatgtgaagtaaattgatataacctattgactgtattctgtgtattattctttattttgggaccttctgtgtaaaagaaaatattacctaaattggttagatacaaagaaatcattaaaattattaatgtatatatgaaaa

SEQ ID NO: 34048 - DNA, 769 bp, Homo sapiens
  source 1..769: mol_type = unassigned DNA
gactctcccgtggcgccatggcggaagcagaggagcaggaaactgggtcccttgaagaatctacagatgagtctgaggaagaagagagcgaagaggaacccaagctgaagtatgaaaggctttccaatggggtaactgaaatacttcagaaggatgcagctagctgcatgacagtccatgacaagtttttggcattgggcacacattatggcaaggtttatttacttgatgtccaggggaacatcactcagaagtttgatgtaagtcctgtgaagataaatcagattagcttggatgaaagtggagagcacatgggtgtgtgttcagaggatggcaaggtgcaggtatttggactgtattctggagaagaatttcacgagacttttgactgtcccattaaaattattgctgtgcacccacatttcgtgagatccagttgcaagcagtttgtgaccggagggaagaagctgctactgtttgaacggtcttggatgaacagatggaagtctgctgttctgcatgaaggggaagggaacataaggagtgtgaagtggagaggccatctgattgcttgggccaataatatgagtaagaaacctgaggcatggagagtagccaagaaaatgaaaagctatcttaataattgaaggactgcattgggaatgggtcttgaaaatatcatttgcctgttggccaaagggtgtgaagatttttgacatcatctcaaagcaaagaatcaccaatgtgccccgggatgatataagtcttc

SEQ ID NO: 34049 - DNA, 5903 bp, Homo sapiens
  source 1..5903: mol_type = unassigned DNA
aagtgtgtggtttcctcttatttccgggtctgtcaggtgactctcccgtggcgccatggcggaagcagaggagcaggaaactgggtcccttgaagaatctacagatgagtctgaggaagaagagagcgaagaggaacccaagctgaagtatgaaaggctttccaatggggtaactgaaatacttcagaaggatgcagctagctgcatgacagtccatgacaagtttttggcattgggcacacattatggcaaggtttatttacttgatgtccaggggaacatcactcagaagtttgatgtaagtcctgtgaagataaatcagattagcttggatgaaagtggagagcacatgggtgtgtgttcagaggatggcaaggtgcaggtatttggactgtattctggagaagaatttcacgagacttttgactgtcccattaaaattattgctgtgcacccacatttcgtgagatccagttgcaagcagtttgtgaccggagggaagaagctgctactgtttgaacggtcttggatgaacagatggaagtctgctgttctgcatgaaggggaagggaacataaggagtgtgaagtggagaggccatctgattgcttgggccaataatatgggtgtgaagatttttgacatcatctcaaagcaaagaatcaccaatgtgccccgggatgatataagtcttcgcccagacatgtatccctgcagcctctgctggaaggacaatgtgacactgattattggctgggggacttctgtcaaggtgtgctcagtgaaggaacggcatgccagtgaaatgagggatttgccaagtcgatatgttgaaatagtgtctcagtttgaaactgaattctacatcagtggacttgcacctctctgtgatcagcttgttgtactttcgtatgtaaaggagatttcagaaaaaacggaaagagaatactgtgccaggcctagactggacatcatccagccactttctgagacttgtgaagagatctcttctgatgctttgacagtcagaggctttcaggagaatgaatgtagagattatcatttagaatactctgaaggggaatcacttttttacatcgtgagtccgagagatgttgtagtggccaaggaacgagaccaagatgatcacattgactggctccttgaaaagaagaaatatgaagaagcattgatggcagctgaaattagccaaaaaaatattaaaagacataagattctggatattggcttggcatatataaatcacctggtggagagaggagactatgacatagcagcacgcaaatgccagaaaattcttgggaaaaatgcagcactctgggaatatgaagtttataaatttaaagaaattggacagcttaaggctattagtccttatttgccaagaggtgatccagttctgaaaccactcatctatgaaatgatcttacatgaatttttggagagtgattatgagggttttgccacattgatccgagaatggcctggagatctgtataataattcagtcatagttcaagcagttcgggatcatttgaagaaagatagtcagaacaagactttacttaaaaccctggcagaattgtacacctatgacaagaactatggcaatgctctggaaatatacttaacattaagacataaagacgtttttcagttgatccacaagcataatcttttcagttctatcaaggataaaattgttttattaatggattttgattcagagaaagctgttgacatgcttttggacaatgaagataaaatttcaattaaaaaggtagtggaagaattggaagacagaccagagctacagcatgtgtatttgcataagcttttcaagagagaccaccataaggggcagcgttaccatgaaaaacagatcagtctttatgctgaatatgatcgaccaaacttacttccctttctccgagacagtacccattgcccacttgaaaaggctcttgagatctgtcaacagagaaactttgtagaagagacagtttatcttctgagccgaatgggtaatagccgaagtgccctgaagatgattatggaggaattacatgatgttgataaagcaatcgaatttgccaaggagcaagatgatggagagctgtgggaagatttgattttatattccattgacaaaccaccatttattactggcttgttaaacaacattggcacacatgttgacccaattctactgattcaccgtattaaggaaggaatggagatccccaatttgagagattccttggttaaaattctgcaagactacaatttgcaaattctgcttcgtgaaggctgcaagaagattctcgtagctgactctttgtccttactgaagaaaatgcaccgaactcaaatgaaaggtgttcttgttgatgaggagaacatctgtgagtcgtgcctttcccctattcttccatcagatgcagctaagcccttcagcgtggtggtcttccattgccggcacatgttccacaaggagtgcctgcccatgcccagcatgaactctgctgcacagttctgcaacatctgcagtgctaagaaccgtggaccaggaagtgcaattttggagatgaaaaaatagctcatttctccttgtcagtctccttgtcaccactctttttgagactgtttttgcaacaacaaaagcatttgttgacactcgtgctgttaagagatttgtttatgtttatattatactcaaaaacaatttcttcatctattcctgtactaatggtttctctttgcagttcacagagaatttggggctctcttcatgccttgaaattttggggtccatagtgaatattttgttatttatttgtttggctcattctttatatagtaatggaaacataagtctaggagttagaaatgaattttttagaccttagtaaaaccatttaaccataaaatggacaactgagaattctcccagctgcctgaaagcgtcgccaactgtggttatcctgcaagctgctacctgcaacttggacgttgtttccacgtgctctgctggctacgattcttgcattctgggtttggcttttttctgtgtcatcaactatggttatcctctaaataggcatttaatgaaacattgtacaaattgtcactcatttgatgacacctgggaataacattagcaggctgatgtcctgcaccattatgtttactaatcacatgttctgtgtgctgtgacgactgtcaaagagtatctggccatggcggacactcagcatttgttgattgaataaatgttagctcttctcattgtgaaggactcacttttactgggataaacaaatgcagttaagaattctggcacccttgtaaggaagaaaagagagttcaacaccttcgagtctgagcgcttgtggctagagtttgccaggagggaggaaaccagtgaccctgaaaactgagggtgcctcaggagcagtgggaccacctgatgctgaaggacggactaatgatgtttcctcttgccttctctggtgcctccattgccctcatggaacagagcatatcatagagggagaaaagtcaaacttgtaattgtgtcttacagttactggcttcatcttccttgggatatatggtcatcctctaatgagtgtaaaagtgcgcaaaacacatccttattgttcctgatctcttagtcccataaatgggaacaaatacagctttctgcttctttctttttggggaaaggacagggtgctagtgagtactgacagcatgccagctaccgaagtcacccagccattcccatgagcagcagttcatttaattgtcacagcgtcgccaggaagaagatctgataaacctaggtttacagataaagaaagcaaaatgtagagatgttgttgaggtcacagaggtgactgcctaacttcagagcagggcttctgatccctttaagaaattacagggccagccgggcatggtggctcacgcccgtaatcccagggctttgggaggccttggcaggtggatcacctgagatcgcacgttcgagaccagcctgaccaacatggagaaaccccatctctactaaaaacacaaattagccaggcgtggtggtacatgcctgtaatcccagctactcaggaggctgaggcaggagaatcacttgaccccaggagacgtaggttgtggtgagctgagatcgcgccattgcactccagcctgggcaacaagagcaaaactccgtctcaaaaaagaaaagaaaagaaaagaaatcatagggccaagttcaaaggaaatgcacagaacatatcttcacattagagttaagaattctctagcaaacaacagatttttttgttgttgttagtcacaaatacttagaactggaaggctctttgttattattgaatgtacccctcagccttctcagcatttccttatcccaagactagtgtgctttctgctacactgctagttttcagttttgttcttacccaattgttttttcttttcaacattaccaatttacagattcagtttattacatttacattaatcctcacttatgatttgagcaagctcatttccagaaaagtttactttaagatcatcaataggatttgctaatttcagtgaagtcattttgcttcaggggtaaattatcctagttaccaagtcctatttggacataaagaaaatcctacttatagaaaaggagaaaataattaaacagtcttcatttttaagtaactgatttaaaaggaaaataataaaatatgttcgtttatcatttcagaaattgctgtaacacactggaaaattcctgaacaatatagattttatcgttaataaaaaacactagctttcgttccttagaatgtcttttcttttgaataaacagtattgggtgatttattaaaggatattcaatcctttttacttttcatcaacctataagggcttaaatatggcaaaataatccaagtgttagtcaattatttttcatgtgtgactagcccaatttaaaatataggtaaaaaggaaacccattcccctcgttttggggaagaacatagttgcaaagtacacacttcataagctattctttttttttttttttttttttttttttttgagatggagtctcgttctgttgccttggctggagtgcagtgacatgatcttggctcactgcaacctccgcctcccaggttcaagtgattctcccgtctcagcttccggagtaggtgggagtacaggcacgcaccaccatgcccagctaattttttgtactttggtagagatgaggtttcaccatgttgcccaagctggtctcgaactcctgagctcaggaatccgcccacctcggccttccgaagtgttaggattacaggcgtaagtcaccatgcccagccaagaaagctattcttgaagtgtaaaacagccaggtgcaaaattattttggagtactttagtttgcttttgtttttagccaaagggatttcatactggtttaattatgttcatccttgagaatttttgagaagtttccaacagatttgtagttcattttgctgttgttacaatgtaaagctatatatagttgacccttgaacaacacaggttggaactgcaaggatccacttatacatggattttcttctgcctctgccacccttgagacggcaagaccaggccctccccttcctcctccttctcagcctactcagtatgaagacgacagagatgaaacacttatgatgatccacttctacttaatgagtagtaaatatattttcttttccttatgattttcttactattttctttagcttgctttattataagaatatagcatataatataaataaaatataaaatatgtgttaatggtc

SEQ ID NO: 34050 - DNA, 3181 bp, Homo sapiens
  source 1..3181: mol_type = unassigned DNA
atggcggaagcagaggagcaggaaactgggtcccttgaagaatctacagatgagtctgaggaagaagagagcgaagaggaacccaagctgaagtatgaaaggctttccaatggggtaactgaaatacttcagaaggatgcagctagctgcatgacagtccatgacaagtttttggcattgggcacacattatggcaaggtttatttacttgatgtccaggggaacatcactcagaagtttgatgtagtgcaggtatttggactgtattctggagaagaatttcacgagacttttgactgtcccattaaaattattgctgtgcacccacatttcgtgagatccagttgcaagcagtttgtgaccggagggaagaagctgctactgtttgaacggtcttggatgaacagatggaagtctgctgttctgcatgaaggggaagggaacataaggagtgtgaagtggagaggccatctgattgcttgggccaataatatgggtgtgaagatttttgacatcatctcaaagcaaagaatcaccaatgtgccccgggatgatataagtcttcgcccagacatgtatccctgcagcctctgctggaaggacaatgtgacactgattattggctgggggacttctgtcaaggtgtgctcagtgaaggaacggcatgccagtgaaatgagggatttgccaagtcgatatgttgaaatagtgtctcagtttgaaactgaattctacatcagtggacttgcacctctctgtgatcagcttgttgtactttcgtatgtaaaggagatttcagaaaaaacggaaagagaatactgtgccaggcctagactggacatcatccagccactttctgagacttgtgaagagatctcttctgatgctttgacagtcagaggctttcaggagaatgaatgtagagattatcatttagaatactctgaaggggaatcacttttttacatcgtgagtccgagagatgttgtagtggccaaggaacgagaccaagatgatcacattgactggctccttgaaaagaagaaatatgaagaagcattgatggcagctgaaattagccaaaaaaatattaaaagacataagattctggatattggcttggcatatataaatcacctggtggagagaggagactatgacatagcagcacgcaaatgccagaaaattcttgggaaaaatgcagcactctgggaatatgaagtttataaatttaaagaaattggacagcttaaggctattagtccttatttgccaagaggtgatccagttctgaaaccactcatctatgaaatgatcttacatgaatttttggagagtgattatgagggttttgccacattgatccgagaatggcctggagatctgtataataattcagtcatagttcaagcagttcgggatcatttgaagaaagatagtcagaacaagactttacttaaaaccctggcagaattgtacacctatgacaagaactatggcaatgctctggaaatatacttaacattaagacataaagacgtttttcagttgatccacaagcataatcttttcagttctatcaaggataaaattgttttattaatggattttgattcagagaaagctgttgacatgcttttggacaatgaagataaaatttcaattaaaaaggtagtggaagaattggaagacagaccagagctacagcatgtgtatttgcataagcttttcaagagagaccaccataaggggcagcgttaccatgaaaaacagatcagtctttatgctgaatatgatcgaccaaacttacttccctttctccgagacagtacccattgcccacttgaaaaggctcttgagatctgtcaacagagaaactttgtagaagagacagtttatcttctgagccgaatgggtaatagccgaagtgccctgaagatgattatggaggaattacatgatgttgataaagcaatcgaatttgccaaggagcaagatgatggagagctgtgggaagatttgattttatattccattgacaaaccaccatttattactggcttgttaaacaacattggcacacatgttgacccaattctactgattcaccgtattaaggaaggaatggagatccccaatttgagagattccttggttaaaattctgcaagactacaatttgcaaattctgcttcgtgaaggctgcaagaagattctcgtagctgactctttgtccttactgaagaaaatgcaccgaactcaaatgaaaggtgttcttgttgatgaggagaacatctgtgagtcgtgcctttcccctattcttccatcagatgcagctaagcccttcagcgtggtggtcttccattgccggcacatgttccacaaggagtgcctgcccatgcccagcatgaactctgctgcacagttctgcaacatctgcagtgctaagaaccgtggaccaggaagtgcaattttggagatgaaaaaatagctcatttctccttgtcagtctccttgtcaccactctttttgagactgtttttgcaacaacaaaagcatttgttgacactcgtgctgttaagagatttgtttatgtttatattatactcaaaaacaatttcttcatctattcctgtactaatggtttctctttgcagttcacagagaatttggggctctcttcatgccttgaaattttggggtccatagtgaatattttgttatttatttgtttggctcattctttatatagtaatggaaacataagtctaggagttagaaatgaattttttagaccttagtaaaaccatttaaccataaaatggacaactgagaattctcccagctgcctgaaagcgtcgccaactgtggttatcctgcaagctgctacctgcaacttggacgttgtttccacgtgctctgctggctacgattcttgcattctgggtttggcttttttctgtgtcatcaactatggttatcctctaaataggcatttaatgaaacattgtacaaattgtcactcatttgatgacacctgggaataacattagcaggctgatgtcctgcaccattatgtttactaatcacatgttctgtgtgctgtgacgactgtcaaagagtatctggccatggcggacactcagcatttgttgattgaataaatgttagctcttctcatt

SEQ ID NO: 34051 - DNA, 2224 bp, Homo sapiens
  source 1..2224: mol_type = unassigned DNA
atgccacctcccttgccctcatctctcactgccatgcaagaaagcgttaatggcaaatagggcacgtagccacactccgtcgttcctgcttccaagcaaaccttgtgccaggttcctcatttcgcgaggctccactctcttgggcttcaggctgccgctgggcctccagcaccaaagggcaataggggtctgagagtccgggcctcaggcatcttcaggccgcagactggcatagtgagtatggtatacacacaatcggagattctacagaaggaagtgtacctctttgaacgcattgattctcaaaatcgagagatcatgaaacacctgaaggcaatttgttttcttcgacctacaaaggagaatgtggattatattattcaggagctccgaagacccaaatacactatatatttcatttatttcagtaatgtgatcagcaagagtgacgtgaagtcattggctgaagctgatgaacaggaagttgtggctgaggttcagcaagtgataactaaagaatatgaactgtttgaattccgtcggacagaggttcctccattgctccttattttagatcgctgtgatgatgccatcaccccattgctaaaccagtggacatatcaggccatggtccacgaactactaggcataaacaacaatcggattgatctttccagagtgccgggaatcagtaaagacttaagagaagtggtcctatctgctgaaaatgatgaattctatgctaataatatgtacctgaactttgctgagattggtagcaatataaagaatctcatggaagattttcagaagaagaaaccaaaagaacagcaaaaactagaatcaatagcagacatgaaggcgtttgttgagaattatccacagttcaagaaaatgtctgggactgtttcaaagcatgtgacagtggttggagaactgtctcgattggtcagtgaacggaatctgctggaggtttcagaggttgagcaagaactggcctgtcaaaatgaccattctagtgctctccagaatataaaaaggcttctgcagaaccccaaagtgacagagtttgatgctgcccgcctggtgatgctttatgctttacattatgagcgacacagcagcaatagcctgccaggactaatgatggacctcaggaataaaggtgtttctgagaagtatcgaaagctcgtgtctgcagttgttgaatatggtggtaaacgagtcagaggaagtgacctcttcagccccaaagatgctgtggctatcaccaaacaattcctcaaaggactgaagggagtagaaaatgtatatacacagcatcaacctttcctacatgaaaccctggatcatctcatcaaaggaaggcttaaggaaaacctatatccttatttaggccccagcacactcagagacagacctcaggatatcattgtgtttgtaattggaggagccacctatgaagaggctctaacagtttataacctgaaccgcaccactcctggagtgaggattgtcctgggaggcaccacagtgcacaacacgaaaagagatggggtttcactatgttcccctgcctggtttcgaactcctgggctcaagcgatccacccgcctcagcctcccaaagtgctgggattacagctttcctagaggaagttctggcttctggactgcacagccgaagcaaggagagctctcaagtcacatcaaggtcagcgagcagaagatgaaacggtggttgggggaagggcacagcttcctctcttgtccccactacaggttttccctactaaacaaaggtgttggagagcagctttgggttctgtgctggttgttagaactcatctccaggtagcccacggatacgtggttggcacagacacaagactcccagagttgtcctaacaataagtctgagcccatctcaacccacttttctccggtagtctttatgtatctgttagcacaatcacttcagttactgatgaattttgttgggatctgacttggggaaagggttatcagagcctagaggggcttaaaaagtaatcatttgatgtacataccacactccttggcttcctttctcttcccttaaccctttctgcttttcattaaccacattcctgcacaactcatttctgaaaacctaccatgtttctttacagagccatccaaaaattttttgtccctacatagcaattttctgtggcactgagaaa

SEQ ID NO: 34052 - DNA, 2790 bp, Homo sapiens
  source 1..2790: mol_type = unassigned DNA
actgtttcgcaaataccgcgtgtgatttattaaatgccgtctctccgagtcccaagcggccgggagcattatgccacctcccttgccctcatctctcactgccatgcaagaaagcgttaatggcaaatagggcacgtagccacactccgtcgttcctgcttccaagcaaaccttgtgccaggttcctcatttcgcgaggctccactctcttgggcttcaggctgccgctgggcctccagcaccaaagggcaataggggtctgagagtccgggcctcaggcatcttcaggccgcaggtgggtggagaatagcgcccgcgcgtggcagcggcccaggccgtctcagccggatttttccatccccggggtaggcttggtcccctgtacactccagcggaactacaactcccagcaccgtggctgcccggactcccggaagccgaatcccggctgggaggaagcagctgagacccggccaacagactgggggttaatttagccagaaaagggggcgggaagggctgtagggtacttgtcaattcgccgccatgaacgtggtttttgctgtgaagcagtacatttccaaaatgatagaggacagcgggcctggtatgaaagtacttctcatggataaagagacgactggcatagtgagtatggtatacacacaatcggagattctacagaaggaagtgtacctctttgaacgcattgattctcaaaatcgagagatcatgaaacacctgaaggcaatttgttttcttcgacctacaaaggagaatgtggattatattattcaggagctccgaagacccaaatacactatatatttcatttatttcagtaatgtgatcagcaagagtgacgtgaagtcattggctgaagctgatgaacaggaagttgtggctgaggttcaggaattttatggtgattacattgctgtgaacccacatttgttttccctcaatattttgggttgctgccagggtcgaaattgggatccagcccagctatctagaacaactcaagggcttacagctctccttttatctctgaagaagtgtcccatgattcgttatcagctctcatcagaggcagcaaagagacttgcagagtgcgttaagcaagtgataactaaagaatatgaactgtttgaattccgtcggacagaggttcctccattgctccttattttagatcgctgtgatgatgccatcaccccattgctaaaccagtggacatatcaggccatggtccacgaactactaggcataaacaacaatcggattgatctttccagagtgccgggaatcagtaaagacttaagagaagtggtcctatctgctgaaaatgatgaattctatgctaataatatgtacctgaactttgctgagattggtagcaatataaagaatctcatggaagattttcagaagaagaaaccaaaagaacagcaaaaactagaatcaatagcagacatgaaggcgtttgttgagaattatccacagttcaagaaaatgtctgggactgtttcaaagcatgtgacagtggttggagaactgtctcgattggtcagtgaacggaatctgctggaggtttcagaggttgagcaagaactggcctgtcaaaatgaccattctagtgctctccagaatataaaaaggcttctgcagaaccccaaagtgacagagtttgatgctgcccgcctggtgatgctttatgctttacattatgagcgacacagcagcaatagcctgccaggactaatgatggacctcaggaataaaggtgtttctgagaagtatcgaaagctcgtgtctgcagttgttgaatatggtggtaaacgagtcagaggaagtgacctcttcagccccaaagatgctgtggctatcaccaaacaattcctcaaaggactgaagggagtagaaaatgtatatacacagcatcaacctttcctacatgaaaccctggatcatctcatcaaaggaaggcttaaggaaaacctatatccttatttaggccccagcacactcagagacagacctcaggatatcattgtgtttgtaattggaggagccacctatgaagaggctctaacagtttataacctgaaccgcaccactcctggagtgaggattgtcctgggaggcaccacagtgcacaacacgaaaagtttcctagaggaagttctggcttctggactgcacagccgaagcaaggagagctctcaagtcacatcaaggtcagcgagcagaagatgaaacggtggttgggggaagggcacagcttcctctcttgtccccactacaggttttccctactaaacaaaggtgttggagagcagctttgggttctgtgctggttgttagaactcatctccaggtagcccacggatacgtggttggcacagacacaagactcccagagttgtcctaacaataagtctgagcccatctcaacccacttttctccggtagtctttatgtatctgttagcacaatcacttcagttactgatgaattttgttgggatctgacttggggaaagggttatcagagcctagaggggcttaaaaagtaatcatttgatgtacataccacactccttggcttcctttctcttcccttaaccctttctgcttttcattaaccacattcctgcacaactcatttctgaaaacctaccatgtttctttacagagccatccaaaaattttttgtccctacatagcaattttctgtggcactgagaaaccatgtatgaccacaataaaaatccattttgtgaaagga

SEQ ID NO: 34053 - DNA, 977 bp, Homo sapiens
  source 1..977: mol_type = unassigned DNA
gggctgtagggtacttgtcaattcgccgccatgaacgtggtttttgctgtgaagcagtacatttccaaaatgatagaggacagcgggcctggtatgaaagtacttctcatggataaagagacgactggcatagtgagtatggtatacacacaatcggagattctacagaaggaagtgtacctctttgaacgcattgattctcaaaatcgagagatcatgaaacacctgaaggcaatttgttttcttcgacctacaaaggagaatgtggattatattattcaggagctccgaagacccaaatacactatatatttcatttatttcagtaatgtgatcagcaagagtgacgtgaagtcattggctgaagctgatgaacaggaagttgtggctgaggttcagcaagtgataactaaagaatatgaactgtttgaattccgtcggacagaggttcctccattgctccttattttagatcgctgtgatgatgccatcaccccattgctaaaccagtggacatatcaggccatggtccacgaactactaggcataaacaacaatcggattgatctttccagagtgccgggaatcagtaaagacttaagagaagtggtcctatctgctgaaaatgatgaattctatgctaataatatgtacctgaactttgctgagattggtagcaatataaagaatctcatggaagattttcagaagaagaaaccaaaagaacagcaaaaactagaatcaatagcagacatgaaggcgtttgttgagaattatccacagttcaagaaaatgtctgggactgtttcaaagcatgtgacagtggttggagaactgtctcgattggtcagtgaacggaatctgctggaggtttcagaggttgagcaagaactggcctgtcaaaatgaccattctagtgctctccagaatataaaaaggcttctgcagaaccccaaagtgacagagtttgatgctgc

SEQ ID NO: 34054 - DNA, 1714 bp, Homo sapiens
  source 1..1714: mol_type = unassigned DNA
agccagaaaagggggcgggaagggctgtagggtacttgtcaattcgccgccatgaacgtggtttttgctgtgaagcagtacatttccaaaatgatagaggacagcgggcctggtatgaaagtacttctcatggataaagagacgactggcatagtgagtatggtatacacacaatcggagattctacagaaggaagtgtacctctttgaacgcattgattctcaaaatcgagagatcatgaaacacctgaaggcaatttgttttcttcgacctacaaaggagaatgtggattatattattcaggagctccgaagacccaaatacactatatatttcatttatttcagtaatgtgatcagcaagagtgacgtgaagtcattggctgaagctgatgaacaggaagttgtggctgaggttcagcaagtgataactaaagaatatgaactgtttgaattccgtcggacagaggttcctccattgctccttattttagatcgctgtgatgatgccatcaccccattgctaaaccagtggacatatcaggccatggtccacgaactactaggcataaacaacaatcggattgatctttccagagtgccgggaatcagtaaagacttaagagaagtggtcctatctgctgaaaatgatgaattctatgctaataatatgtacctgaactttgctgagattggtagcaatataaagaatctcatggaagattttcagaagaagaaaccaaaagaacagcaaaaactagaatcaatagcagacatgaaggcgtttgttgagaattatccacagttcaagaaaatgtctgggactgtttcaaagcatgtgacagtggttggagaactgtctcgattggtcagtgaacggaatctgctggaggtttcagaggttgagcaagaactggcctgtcaaaatgaccattctagtgctctccagaatataaaaaggcttctgcagaaccccaaagtgacagagtttgatgctgcccgcctggtgatgctttatgctttacattatgagcgacacagcagcaatagcctgccaggactaatgatggacctcaggaataaaggtgtttctgagaagtatcgaaagctcgtgtctgcagttgttgaatatggtggtaaacgagtcagaggaagtgacctcttcagccccaaagatgctgtggctatcaccaaacaattcctcaaaggactgaagggagtagaaaatgtatatacacagcatcaacctttcctacatgaaaccctggatcatctcatcaaaggaaggcttaaggaaaacctatatccttatttaggccccagcacactcagagacagaattgcctcttgtctctgataaaggcaagcaactttttcatttggtgaggaaatggagctatatgatcatgcattccagaatcagtcaattcaaaaaggaagtacttttcatgtttatacaaatgtagtagaatcttgttgctacagcttattttttgtttctgtgaagcagcagtcctttttcattggccttttttcctgcagtaaatgctcataagaactgtaccatttacctcaggatatcattgtgtttgtaattggaggagccacctatgaagaggctctaacagtttataacctgaaccgcaccactcctggagtgaggattgtcctgggaggcaccacagtgcacaacacgaaaagtttcctagaggaag

SEQ ID NO: 34055 - DNA, 1742 bp, Homo sapiens
  source 1..1742: mol_type = unassigned DNA
aatttagccagaaaagggggcgggaagggctgtagggtacttgtcaattcgccgccatgaacgtggtttttgctgtgaacccacatttgttttccctcaatattttgggttgctgccagggtcgaaattgggatccagcccagctatctagaacaactcaagggcttacagctctccttttatctctgaagaagtgtcccatgattcgttatcagctctcatcagaggcagcaaagagacttgcagagtgcgttaagcaagtgataactaaagaatatgaactgtttgaattccgtcggacagaggttcctccattgctccttattttagatcgctgtgatgatgccatcaccccattgctaaaccagtggacatatcaggccatggtccacgaactactaggcataaacaacaatcggattgatctttccagagtgccgggaatcagtaaagacttaagagaagtggtcctatctgctgaaaatgatgaattctatgctaataatatgtacctgaactttgctgagattggtagcaatataaagaatctcatggaagattttcagaagaagaaaccaaaagaacagcaaaaactagaatcaatagcagacatgaaggcgtttgttgagaattatccacagttcaagaaaatgtctgggactgtttcaaagcatgtgacagtggttggagaactgtctcgattggtcagtgaacggaatctgctggaggtttcagaggttgagcaagaactggcctgtcaaaatgaccattctagtgctctccagaatataaaaaggcttctgcagaaccccaaagtgacagagtttgatgctgcccgcctggtgatgctttatgctttacattatgagcgacacagcagcaatagcctgccaggactaatgatggacctcaggaataaaggtgtttctgagaagtatcgaaagctcgtgtctgcagttgttgaatatggtggtaaacgagtcagaggaagtgacctcttcagccccaaagatgctgtggctatcaccaaacaattcctcaaaggactgaagggagtagaaaatgtatatacacagcatcaacctttcctacatgaaaccctggatcatctcatcaaaggaaggcttaaggaaaacctatatccttatttaggccccagcacactcagagacagacctcaggatatcattgtgtttgtaattggaggagccacctatgaagaggctctaacagtttataacctgaaccgcaccactcctggagtgaggattgtcctgggaggcaccacagtgcacaacacgaaaagtttcctagaggaagttctggcttctggactgcacagccgaagcaaggagagctctcaagtcacatcaaggtcagcgagcagaagatgaaacggtggttgggggaagggcacagcttcctctcttgtccccactacaggttttccctactaaacaaaggtgttggagagcagctttgggttctgtgctggttgttagaactcatctccaggtagcccacggatacgtggttggcacagacacaagactcccagagttgtcctaacaataagtctgagcccatctcaacccacttttctccggtagtctttatgtatctgttagcacaatcacttcagttactgatgaattttgttgggatctgacttggggaaagggttatcagagcctagaggggcttaaaaagtaatcatttgatgtacataccacactccttgg

SEQ ID NO: 34056 - DNA, 1347 bp, Homo sapiens
  source 1..1347: mol_type = unassigned DNA
aggggctgcaggtggcggcgcagtctcggtaggcggtatgagtttggctgggggccgggcaccccggaagaccgctgggaaccggctttctgggcttttggaggcagaggaggaagatgagttctaccagacgacttatgggggtttcacagaggaatccggagatgatgagtatcaaggggaccagtcagacacagaggacgaagtggactctgactttgacattgatgaaggggatgaaccatccagtgatggagaagcagaagagccaagaaggaagcgccgagtagtcaccaaggcctataaggaacctctcaagagcttaaggcctcgaaaggtcaacaccccggctggtagctctcagaaggcgcgagaagagaaggcactactgccattagaactacaagatgacggctctgacagtcggaagtctatgcgtcagtctacagctgagcatacacgacaaacgttccttcgggtacaggagaggcagggccagtcaagacggcgaaaggggccccactgtgagcggccactaacccaggaggaactgctccgggaggccaagatcacagaagagcttaatttacggtcactggagacatatgagcggctcgaggctgataaaaagaagcaggttcataagaagcggaagtgccccgggcccataatcacctatcattcagtgacagtgccacttgttggggagccaggccccaaggaagagaacgttgacatagaaggctctttgtgtttttccttgtcttttgtcctcagacttgatcctgctccctcggtgtctgcattgactcctcatgctgggactggacccgtcaacccccctgctcgctgctcacgtaccttcatcacttttagtgatgatgcaactttcgaggaatggttcccccaagggcggcccccaaaagtccctgttcgtgaggtctgtccagtgacccatcgtccagccctataccgggaccctgttacagacataccctatgccactgctcgagccttcaagatcattcgtgaggcttacaagaagtacattactgcccatggactgccgcccactgcctcagccctgggccccggcccgccacctcctgagcccctccctggctctgggccccgagccttgcgccagaaaattgtcattaaatgaagagatgtctagtcctcagaaacttctttcctgccctgattggggctcttgctgttccgtttcttctccctgcttctcccctttgtcatctctgatctttgcctaatctgtttctttttccttttcccctagttcttacaggtttcgttgtgttttttaatctaataaaatagaaagatccc

SEQ ID NO: 34057 - DNA, 1527 bp, Homo sapiens
  source 1..1527: mol_type = unassigned DNA
gtggccacccgcaggtagtgatgtcgagcgtcgagctcccaaaaccgagctggtgaggggctgcaggtggcggcgcagtctcggtaggcggtatgagtttggctgggggccgggcaccccggaagaccgctgggaaccggctttctgggcttttggaggcagaggaggaagatgagttctaccagacgacttatgggggtttcacagaggaatccggagatgatgagtatcaaggggaccagtcagacacagaggacgaagtggactctgactttgacattgatgaaggggatgaaccatccagtgatggagaagcagaagagccaagaaggaagcgccgagtagtcaccaaggcctataaggaacctctcaagagcttaaggcctcgaaaggtcaacaccccggctggtagctctcagaaggcgcgagaagagaaggcactactgccattagaactacaagatgacggctctgacagtcggaagtctatgcgtcagtctacagctgagcatacacgacaaacgttccttcgggtacaggagaggcagggccagtcaagacggcgaaaggggccccactgtgagcggccactaacccaggaggaactgctccgggaggccaagatcacagaagagcttaatttacggtcactggagacatatgagcggctcgaggctgataaaaagaagcaggttcataagaagcggaagtgccccgggcccataatcacctatcattcagtgacagtgccacttgttggggagccaggccccaaggaagagaacgttgacatagaaggacttgatcctgctccctcggtgtctgcattgactcctcatgctgggactggacccgtcaacccccctgctcgctgctcacgtaccttcatcacttttagtgatgatgcaactttcgaggaatggttcccccaagggcggcccccaaaagtccctgttcgtgaggtctgtccagtgacccatcgtccagccctataccgggaccctgttacagacataccctatgccactgctcgagccttcaagatcattcgtgaggcttacaagaagtacattactgcccatggactgccgcccactgcctcagccctgggccccggcccgccacctcctgagcccctccctggctctgggccccgagccttgcgccagaaaattgtcattaaatgaagagatgtctagtcctcagaaacttctttcctgccctgattggggctcttgctgttccgtttcttctccctgcttctcccctttgtcatctctgatctttgcctaatctgtttctttttccttttcccctagttcttacaggtttcgttgtgttttttaatctaataaaatagaaagatcccttttgtctggtgtccagtctagggttgggagcaagaagtatttgaatacctgcatatatttgggtctttattcgatagcatttattatgagctgtcctttctaaattgtattcattcctccaactaaattataaacatctgaaaattgcacaccaaaa

SEQ ID NO: 34058 - DNA, 2172 bp, Homo sapiens
  source 1..2172: mol_type = unassigned DNA
attcttcctcttgccacacccacagggcccgcactaagagcctaactgaaatcccgcgaggatcaaccgagctcgccgaaaggagggaggaacgtatcccttctggaggctgtctcagggggcagagggaccggaccggaagtgacgtgagcgggttccggttgtctggagcccagcggcgggtgtgagagtccgtaaggagcagcttccaggatcctgagatccggagcagccggggtcggagcggctcctcaagagttactgatctatgaaatggcagagaatggaaaaaattgtgaccagagacgtgtagcaatgaacaaggaacatcataatggaaatttcacagacccctcttcagtgaatgaaaagaagaggagggagcgggaagaaaggcagaatattgtcctgtggagacagccgctcattaccttgcagtatttttctctggaaatccttgtaatcttgaaggaatggacctcaaaattatggcatcgtcaaagcattgtggtgtcttttttactgctgcttgctgtgcttatagctacgtattatgttgaaggagtgcatcaacagtatgtgcaacgtatagagaaacagtttcttttgtatgcctactggataggcttaggaattttgtcttctgttgggcttggaacagggctgcacacctttctgctttatctgggtccacatatagcctcagttacattagctgcttatgaatgcaattcagttaattttcccgaaccaccctatcctgatcagattatttgtccagatgaagagggcactgaaggaaccatttctttgtggagtatcatctcaaaagttaggattgaagcctgcatgtggggtatcggtacagcaatcggagagctgcctccatatttcatggccagagcagctcgcctctcaggtgctgaaccagatgatgaagagtatcaggaatttgaagagatgctggaacatgcagagtctgcacaagactttgcctcccgggccaaactggcagttcaaaaactagtacagaaagttggattttttggaattttggcctgtgcttcaattccaaatcctttatttgatctggctggaataacgtgtggacactttctggtacctttttggaccttctttggtgcaaccctaattggaaaagcaataataaaaatgcatatccagaaaatttttgttataataacattcagcaagcacatagtggagcaaatggtggctttcattggtgctgtccccggcataggtccatctctgcagaagccatttcaggagtacctggaggctcaacggcagaagcttcaccacaaaagcgaaatgggcacaccacagggagaaaactggttgtcctggatgtttgaaaagttggtcgttgtcatggtgtgttacttcatcctatctatcattaactccatggcacaaagttatgccaaacgaatccagcagcggttgaactcagaggagaaaactaaataagtagagaaagttttaaactgcagaaattggagtggatgggttctgccttaaattgggaggactccaagccgggaaggaaaattcccttttccaacctgtatcaatttttacaacttttttcctgaaagcagtttagtccatactttgcactgacatactttttccttctgtgctaaggtaaggtatccaccctcgatgcaatccaccttgtgttttcttagggtggaatgtgatgttcagcagcaaacttgcaacagactggccttctgtttgttactttcaaaaggcccacatgatacaattagagaattcccaccgcacaaaaaaagttcctaagtatgttaaatatgtcaagctttttaggcttgtcacaaatgattgctttgttttcctaagtcatcaaaatgtatataaattatctagattggataacagtcttgcatgtttatcatgttacaatttaatattccatcctgcccaacccttcctctcccatcctcaaaaaagggccattttatgatgcattgcacaccctctggggaaattgatctttaaattttgagacagtataaggaaaatctggttggtgtcttacaagtgagctgacaccattttttattctgtgtatttagaatgaagtcttgaaaaaaactttataaagacatctttaatcattcc

SEQ ID NO: 34059 - DNA, 1332 bp, Homo sapiens
  source 1..1332: mol_type = unassigned DNA
gtctggagcccagcggcgggtgtgagagtccgtaaggagcagcttccaggatcctgagatccggagcagccggggtcggagcggctcctcaagagttactgatctatgaaatggcagagaatggaaaaaattgtgaccagagacgtgtagcaatgaacaaggaacatcataatggaaatttcacagacccctcttcagtgaatgaaaagaagaggagggagcgggaagaaaggcagaatattgtcctgtggagacagccgctcattaccttgcagtatttttctctggaaatccttgtaatcttgaaggaatggacctcaaatatgtgcaacgtatagagaaacagtttcttttgtatgcctactggataggcttaggaattttgtcttctgttgggcttggaacagggctgcacacctttctgctttatctgggtccacatatagcctcagttacattagctgcttatgaatgcaattcagttaattttcccgaaccaccctatcctgatcagattatttgtccagatgaagagggcactgaaggaaccatttctttgtggagtatcatctcaaaagttaggattgaagcctgcatgtggggtatcggtacagcaatcggagagctgcctccatatttcatggccagagcagctcgcctctcaggtgctgaaccagatgatgaagagtatcaggaatttgaagagatgctggaacatgcagagtctgcacaagactttgcctcccgggccaaactggcagttcaaaaactagtacagaaagttggattttttggaattttggcctgtgcttcaattccaaatcctttatttgatctggctggaataacgtgtggacactttctggtacctttttggaccttctttggtgcaaccctaattggaaaagcaataataaaaatgcatatccagaaaatttttgttataataacattcagcaagcacatagtggagcaaatggtggctttcattggtgctgtccccggcataggtccatctctgcagaagccatttcaggagtacctggaggctcaacggcagaagcttcaccacaaaagcgaaatgggcacaccacagggagaaaactggttgtcctggatgtttgaaaagttggtcgttgtcatggtgtgttacttcatcctatctatcattaactccatggcacaaagttatgccaaacgaatccagcagcggttgaactcagaggagaaaactaaataagtagagaaagttttaaactgcagaaattggagtggatgggttctgccttaaattgggaggactccaagccgggaaggaaaattcccttttcc

SEQ ID NO: 34060 - DNA, 1406 bp, Homo sapiens
  source 1..1406: mol_type = unassigned DNA
gtgagcgggttccggttgtctggagcccagcggcgggtgtgagagtccgtaaggagcagcttccaggatcctgagatccggagcagccggggtcggagcggctcctcaagagttactgatctatgaaatggcagagaatggaaaaaattgtgaccagagacgtgtagcaatgaacaaggaacatcataatggaaatttcacagacccctcttcagtgaatgaaaagaagaggagggagcgggaagaaaggcagaatattgtcctgtggagacagccgctcattaccttgcagtatttttctctggaaatccttgtaatcttgaaggaatggacctcaaaggtccacatatagcctcagttacattagctgcttatgaatgcaattcagttaattttcccgaaccaccctatcctgatcagattatttgtccagatgaagagggcactgaaggaaccatttctttgtggagtatcatctcaaaagttaggattgaagcctgcatgtggggtatcggtacagcaatcggagagctgcctccatatttcatggccagagcagctcgcctctcaggtgctgaaccagatgatgaagagtatcaggaatttgaagagatgctggaacatgcagagtctgcacaagactttgcctcccgggccaaactggcagttcaaaaactagtacagaaagttggattttttggaattttggcctgtgcttcaattccaaatcctttatttgatctggctggaataacgtgtggacactttctggtacctttttggaccttctttggtgcaaccctaattggaaaagcaataataaaaatgcatatccagaaaatttttgttataataacattcagcaagcacatagtggagcaaatggtggctttcattggtgctgtccccggcataggtccatctctgcagaagccatttcaggagtacctggaggctcaacggcagaagcttcaccacaaaagcgaaatgggcacaccacagggagaaaactggttgtcctggatgtttgaaaagttggtcgttgtcatggtgtgttacttcatcctatctatcattaactccatggcacaaagttatgccaaacgaatccagcagcggttgaactcagaggagaaaactaaataagtagagaaagttttaaactgcagaaattggagtggatgggttctgccttaaattgggaggactccaagccgggaaggaaaattcccttttccaacctgtatcaatttttacaacttttttcctgaaagcagtttagtccatactttgcactgacatactttttccttctgtgctaaggtaaggtatccaccctcgatgcaatccaccttgtgttttcttagggtggaatgtgatgttcagcagcaaacttgcaacagact

SEQ ID NO: 34061 - DNA, 1430 bp, Homo sapiens
  source 1..1430: mol_type = unassigned DNA
gagcgggttccggttgtctggagcccagcggcgggtgtgagagtccgtaaggagcagcttccaggatcctgagatccggagcagccggggtcggagcggctcctcaagagttactgatctatgaaatggcagagaatggaaaaaattgtgaccagagacgtgtagcaatgaacaaggaacatcataatggaaatttcacagattatggcatcgtcaaagcattgtggtgtcttttttactgctgcttgctgtgcttatagctacgtattatgttgaaggagtgcatcaacagtatgtgcaacgtatagagaaacagtttcttttgtatgcctactggataggcttaggaattttgtcttctgttgggcttggaacagggctgcacacctttctgctttatctgggtccacatatagcctcagttacattagctgcttatgaatgcaattcagttaattttcccgaaccaccctatcctgatcagattatttgtccagatgaagagggcactgaaggaaccatttctttgtggagtatcatctcaaaagttaggattgaagcctgcatgtggggtatcggtacagcaatcggagagctgcctccatatttcatggccagagcagctcgcctctcaggtgctgaaccagatgatgaagagtatcaggaatttgaagagatgctggaacatgcagagtctgcacaagactttgcctcccgggccaaactggcagttcaaaaactagtacagaaagttggattttttggaattttggcctgtgcttcaattccaaatcctttatttgatctggctggaataacgtgtggacactttctggtacctttttggaccttctttggtgcaaccctaattggaaaagcaataataaaaatgcatatccagaaaatttttgttataataacattcagcaagcacatagtggagcaaatggtggctttcattggtgctgtccccggcataggtccatctctgcagaagccatttcaggagtacctggaggctcaacggcagaagcttcaccacaaaagcgaaatgggcacaccacagggagaaaactggttgtcctggatgtttgaaaagttggtcgttgtcatggtgtgttacttcatcctatctatcattaactccatggcacaaagttatgccaaacgaatccagcagcggttgaactcagaggagaaaactaaataagtagagaaagttttaaactgcagaaattggagtggatgggttctgccttaaattgggaggactccaagccgggaaggaaaattcccttttccaacctgtatcaatttttacaacttttttcctgaaagcagtttagtccatactttgcactgacatactttttccttctgtgctaaggtaaggtatccaccctcgatgcaatccaccttgtgttttctta

SEQ ID NO: 34062 - DNA, 1358 bp, Homo sapiens
  source 1..1358: mol_type = unassigned DNA
gatccggagcagccggggtcggagcggctcctcaagagttactgatctatgaaatggcagagaatggaaaaaattgtgaccagagacgtgtagcaatgaacaaggaacatcataatggaaatttcacagacccctcttcagtgaatgaaaagaagaggagggagcgggaagaaaggcagaatattgtcctgtggagacagccgctcattaccttgcagtatttttctctggaaatccttgtaatcttgaaggaatggacctcaaaattatggcatcgtcaaagcattgtggtgtcttttttactgctgcttgctgtgcttatagctacgtattatgttgaaggagtgcatcaacagtatgtgcaacgtatagagaaacagtttcttttgtatgcctactggataggcttaggaattttgtcttctgttgggcttggaacagggctgcacacctttctgctttatctgggtatcggtacagcaatcggagagctgcctccatatttcatggccagagcagctcgcctctcaggtgctgaaccagatgatgaagagtatcaggaatttgaagagatgctggaacatgcagagtctgcacaagactttgcctcccgggccaaactggcagttcaaaaactagtacagaaagttggattttttggaattttggcctgtgcttcaattccaaatcctttatttgatctggctggaataacgtgtggacactttctggtacctttttggaccttctttggtgcaaccctaattggaaaagcaataataaaaatgcatatccagaaaatttttgttataataacattcagcaagcacatagtggagcaaatggtggctttcattggtgctgtccccggcataggtccatctctgcagaagccatttcaggagtacctggaggctcaacggcagaagcttcaccacaaaagcgaaatgggcacaccacagggagaaaactggttgtcctggatgtttgaaaagttggtcgttgtcatggtgtgttacttcatcctatctatcattaactccatggcacaaagttatgccaaacgaatccagcagcggttgaactcagaggagaaaactaaataagtagagaaagttttaaactgcagaaattggagtggatgggttctgccttaaattgggaggactccaagccgggaaggaaaattcccttttccaacctgtatcaatttttacaacttttttcctgaaagcagtttagtccatactttgcactgacatactttttccttctgtgctaaggtaaggtatccaccctcgatgcaatccaccttgtgttttcttagggtggaatgtgatgttcagcagcaaacttgc

SEQ ID NO: 34063 - DNA, 3913 bp, Homo sapiens
  source 1..3913: mol_type = unassigned DNA
aagaatatgtgcttatggtaaaggcaggcggcaggtacggaggctgtgggaagtcggggtccctccgcccccacaggcagccctgtgctggcctggtgtatacgtttctgtgcagacgtacaccaccctgtgtgagcacagatgtatttttacacatggctctggacagctgtctgactctgtcagcagcaggccttggaggggctcaggcccgtgtgggggtggggggacatccagaggtctttgagtccagccctctgcctccaggccacgcccactcagtgtcgtcagagccccctgtgcctgaggcgtgcgcggctcggagccctgccctcggagtcctgcggtgccttcctcgagtctggcctgctttccatcctgctaagtacttggggcatttccctctttgggtaaggtgtggtcttccctgtcctggcattagacacaaggcagtgggccttcctgccattctaagtgtagcttaagacaatcagtgcaaagcaaccctttgtgggtgtccagcccttgcctcgggaggccagaaaggtggcctggggggagagcgtctaagctggctgtggaaagacccatgttgggatccattccacagaggtcgtcaggggtctctgcctggcctggaggtcccagagaggaccctcctcccctcaggaaggcccatctggaagggtagcagaggactgctcacaggaagagcatgcgaagtgctctttctggggatgcctgtagttggtgatgtgggaactgggttttgagggatgcctaggagttcatccatcagaggggaaatgaggaagccatgcaggatcaatggataaagtgtgctcaggtgagggttggctggtgggccgctgcagggcgggggcctgtccagtgctcccccacttacttgctgcctcccgactgctgtaattatgggtctgtaaccaccctggactgggtgctcctcactgacggacttgtctgaacctctctttgtctccagcgcccagcactgggcctggcaaaacctgagacgcccggtacatgttggccaaatgaatgaaccagattcagaccggcaggggcgctgtggtttaggaggggcctggggtttctcccaggaggtttttgggcttgcgctggagggctctggactcccgtttgcgccagtggcctgcatcctggtcctgtcttcctcatgtttgaatttctttgctttcctagtctggggagcagggaggagccctgtgccctgtcccaggatccatgggtaggaacaccatggacagggagagcaaacggggccatctgtcaccaggggcttagggaaggccgagccagcctgggtcaaagaagtcaaaggggctgcctggaggaggcagcctgtcagctggtgcatcagaggctgtggccaggccagctgggctcggggagcgccagcctgagaggagcgcgtgagcgtcgcgggagcctcgggcaccatgagcgacgtggctattgtgaaggagggttggctgcacaaacgaggggagtacatcaagacctggcggccacgctacttcctcctcaagaatgatggcaccttcattggctacaaggagcggccgcaggatgtggaccaacgtgaggctcccctcaacaacttctctgtggcgcagtgccagctgatgaagacggagcggccccggcccaacaccttcatcatccgctgcctgcagtggaccactgtcatcgaacgcaccttccatgtggagactcctgaggagcgggaggagtggacaaccgccatccagactgtggctgacggcctcaagaagcaggaggaggaggagatggacttccggtcgggctcacccagtgacaactcaggggctgaagagatggaggtgtccctggccaagcccaagcaccgcgtgaccatgaacgagtttgagtacctgaagctgctgggcaagggcactttcggcaaggtgatcctggtgaaggagaaggccacaggccgctactacgccatgaagatcctcaagaaggaagtcatcgtggccaaggacgaggtggcccacacactcaccgagaaccgcgtcctgcagaactccaggcaccccttcctcacagccctgaagtactctttccagacccacgaccgcctctgctttgtcatggagtacgccaacgggggcgagctgttcttccacctgtcccgggagcgtgtgttctccgaggaccgggcccgcttctatggcgctgagattgtgtcagccctggactacctgcactcggagaagaacgtggtgtaccgggacctcaagctggagaacctcatgctggacaaggacgggcacattaagatcacagacttcgggctgtgcaaggaggggatcaaggacggtgccaccatgaagaccttttgcggcacacctgagtacctggcccccgaggtgctggaggacaatgactacggccgtgcagtggactggtgggggctgggcgtggtcatgtacgagatgatgtgcggtcgcctgcccttctacaaccaggaccatgagaagctttttgagctcatcctcatggaggagatccgcttcccgcgcacgcttggtcccgaggccaagtccttgctttcagggctgctcaagaaggaccccaagcagaggcttggcgggggctccgaggacgccaaggagatcatgcagcatcgcttctttgccggtatcgtgtggcagcacgtgtacgagaagaagctcagcccacccttcaagccccaggtcacgtcggagactgacaccaggtattttgatgaggagttcacggcccagatgatcaccatcacaccacctgaccaagatgacagcatggagtgtgtggacagcgagcgcaggccccacttcccccagttctcctactcggccagcggcacggcctgaggcggcggtggactgcgctggacgatagcttggagggatggagaggcggcctcgtgccatgatctgtatttaatggtttttatttctcgggtgcatttgagagaagccacgctgtcctctcgagcccagatggaaagacgtttttgtgctgtgggcagcaccctcccccgcagcggggtagggaagaaaactatcctgcgggttttaatttatttcatccagtttgttctccgggtgtggcctcagccctcagaacaatccgattcacgtagggaaatgttaaggacttctgcagctatgcgcaatgtggcattggggggccgggcaggtcctgcccatgtgtcccctcactctgtcagccagccgccctgggctgtctgtcaccagctatctgtcatctctctggggccctgggcctcagttcaacctggtggcaccagatgcaacctcactatggtatgctggccagcaccctctcctgggggtggcaggcacacagcagccccccagcactaaggccgtgtctctgaggacgtcatcggaggctgggcccctgggatgggaccagggatgggggatgggccagggtttacccagtgggacagaggagcaaggtttaaatttgttattgtgtattatgttgttcaaatgcattttgggggtttttaatctttgtgacaggaaagccctcccccttccccttctgtgtcacagttcttggtgactgtcccaccgggagcctccccctcagatgatctctccacggtagcacttgaccttttcgacgcttaacctttccgctgtcgccccaggccctccctgactccctgtgggggtggccatccctgggcccctccacgcctcctggccagacgctgccgctgccgctgcaccacggcgtttttttacaacattcaactttagtatttttactattataatataatatggaaccttccctccaaattcttcaataaaagttgcttttc

SEQ ID NO: 34064 - DNA, 2710 bp, Homo sapiens
  source 1..2710: mol_type = unassigned DNA
ggcggccgagcaccgagcgctgggcaccgggcaccgagcggcggcggcacgcgaggcccggccccgagcagcgcccccgcccgccgcggcctccagcccggccccgcccagcgccggcccgcggggatgcggagcggcgggcgccggaggccgcggcccggctaggcccgcgctcgcgcccggacgcggcggcccgaggctgtggccaggccagctgggctcggggagcgccagcctgagaggagcgcgtgagcgtcgcgggagcctcgggcaccatgagcgacgtggctattgtgaaggagggttggctgcacaaacgaggggagtacatcaagacctggcggccacgctacttcctcctcaagaatgatggcaccttcattggctacaaggagcggccgcaggatgtggaccaacgtgaggctcccctcaacaacttctctgtggcgcagtgccagctgatgaagacggagcggccccggcccaacaccttcatcatccgctgcctgcagtggaccactgtcatcgaacgcaccttccatgtggagactcctgaggagcgggaggagtggacaaccgccatccagactgtggctgacggcctcaagaagcaggaggaggaggagatggacttccggtcgggctcacccagtgacaactcaggggctgaagagatggaggtgtccctggccaagcccaagcaccgcgtgaccatgaacgagtttgagtacctgaagctgctgggcaagggcactttcggcaaggtgatcctggtgaaggagaaggccacaggccgctactacgccatgaagatcctcaagaaggaagtcatcgtggccaaggacgaggtggcccacacactcaccgagaaccgcgtcctgcagaactccaggcaccccttcctcacagccctgaagtactctttccagacccacgaccgcctctgctttgtcatggagtacgccaacgggggcgagctgttcttccacctgtcccgggagcgtgtgttctccgaggaccgggcccgcttctatggcgctgagattgtgtcagccctggactacctgcactcggagaagaacgtggtgtaccgggacctcaagctggagaacctcatgctggacaaggacgggcacattaagatcacagacttcgggctgtgcaaggaggggatcaaggacggtgccaccatgaagaccttttgcggcacacctgagtacctggcccccgaggtgctggaggacaatgactacggccgtgcagtggactggtgggggctgggcgtggtcatgtacgagatgatgtgcggtcgcctgcccttctacaaccaggaccatgagaagctttttgagctcatcctcatggaggagatccgcttcccgcgcacgcttggtcccgaggccaagtccttgctttcagggctgctcaagaaggaccccaagcagaggcttggcgggggctccgaggacgccaaggagatcatgcagcatcgcttctttgccggtatcgtgtggcagcacgtgtacgagaagaagctcagcccacccttcaagccccaggtcacgtcggagactgacaccaggtattttgatgaggagttcacggcccagatgatcaccatcacaccacctgaccaagatgacagcatggagtgtgtggacagcgagcgcaggccccacttcccccagttctcctactcggccagcggcacggcctgaggcggcggtggactgcgctggacgatagcttggagggatggagaggcggcctcgtgccatgatctgtatttaatggtttttatttctcgggtgcatttgagagaagccacgctgtcctctcgagcccagatggaaagacgtttttgtgctgtgggcagcaccctcccccgcagcggggtagggaagaaaactatcctgcgggttttaatttatttcatccagtttgttctccgggtgtggcctcagccctcagaacaatccgattcacgtagggaaatgttaaggacttctgcagctatgcgcaatgtggcattggggggccgggcaggtcctgcccatgtgtcccctcactctgtcagccagccgccctgggctgtctgtcaccagctatctgtcatctctctggggccctgggcctcagttcaacctggtggcaccagatgcaacctcactatggtatgctggccagcaccctctcctgggggtggcaggcacacagcagccccccagcactaaggccgtgtctctgaggacgtcatcggaggctgggcccctgggatgggaccagggatgggggatgggccagggtttacccagtgggacagaggagcaaggtttaaatttgttattgtgtattatgttgttcaaatgcattttgggggtttttaatctttgtgacaggaaagccctcccccttccccttctgtgtcacagttcttggtgactgtcccaccgggagcctccccctcagatgatctctccacggtagcacttgaccttttcgacgcttaacctttccgctgtcgccccaggccctccctgactccctgtgggggtggccatccctgggcccctccacgcctcctggccagacgctgccgctgccgctgcaccacggcgtttttttacaacattcaactttagtatttttactattataatataatatggaaccttccctccaaattcttcaataaaagttgcttttcaaa

SEQ ID NO: 34065 - DNA, 1564 bp, Homo sapiens
  source 1..1564: mol_type = unassigned DNA
ctgccacggagccccagcggctacacactccactcactcacacctctcagggccccgcacgttcccacagccctcagggtgtacgtgctgtaggtgtggctgtgccccagagtgccagctgatgaagacggagcggccccggcccaacaccttcatcatccgctgcctgcagtggaccactgtcatcgaacgcaccttccatgtggagactcctgaggagcgggaggagtggacaaccgccatccagactgtggctgacggcctcaagaagcaggaggaggaggagatggacttccggtcgggctcacccagtgacaactcaggggctgaagagatggaggtgtccctggccaagcccaagcaccgcgtgaccatgaacgagtttgagtacctgaagctgctgggcaagggcactttcggcaaggtgatcctggtgaaggagaaggccacaggccgctactacgccatgaagatcctcaagaaggaagtcatcgtggccaaggacgaggtggcccacacactcaccgagaaccgcgtcctgcagaactccaggcaccccttcctcacagccctgaagtactctttccagacccacgaccgcctctgctttgtcatggagtacgccaacgggggcgagctgttcttccacctgtcccgggagcgtgtgttctccgaggaccgggcccgcttctatggcgctgagattgtgtcagccctggactacctgcactcggagaagaacgtggtgtaccgggacctcaagctggagaacctcatgctggacaaggacgggcacattaagatcacagacttcgggctgtgcaaggaggggatcaaggacggtgccaccatgaagaccttttgcggcacacctgagtacctggcccccgaggtgctggaggacaatgactacggccgtgcagtggactggtgggggctgggcgtggtcatgtacgagatgatgtgcggtcgcctgcccttctacaaccaggaccatgagaagctttttgagctcatcctcatggaggagatccgcttcccgcgcacgcttggtcccgaggccaagtccttgctttcagggctgctcaagaaggaccccaagcagaggcttggcgggggctccgaggacgccaaggagatcatgcagcatcgcttctttgccggtatcgtgtggcagcacgtgtacgagaagaagctcagcccacccttcaagccccaggtcacgtcggagactgacaccaggtattttgatgaggagttcacggcccagatgatcaccatcacaccacctgaccaagatgacagcatggagtgtgtggacagcgagcgcaggccccacttcccccagttctcctactcggccagcggcacggcctgaggcggcggtggactgcgctggacgatagcttggagggatggagaggcggcctcgtgccatgatctgtatttaatggtttttatttctcgggtgcatttgagagaagccacgctgtcctctcgagcccagatggaaagacgtttttgtgctgtgggcagcaccctcccccgcagcggggtagggaag

SEQ ID NO: 34066 - DNA, 3916 bp, Homo sapiens
  source 1..3916: mol_type = unassigned DNA
ctttgggtaaggtgtggtcttccctgtcctggcattagacacaaggcagtgggccttcctgccattctaagtgtagcttaagacaatcagtgcaaagcaaccctttgtgggtgtccagcccttgcctcgggaggccagaaaggtggcctggggggagagcgtctaagctggctgtggaaagacccatgttgggatccattccacagaggtcgtcaggggtctctgcctggcctggaggtcccagagaggaccctcctcccctcaggaaggcccatctggaagggtagcagaggactgctcacaggaagagcatgcgaagtgctctttctggggatgcctgtagttggtgatgtgggaactgggttttgagggatgcctaggagttcatccatcagaggggaaatgaggaagccatgcaggatcaatggataaagtgtgctcaggtgagggttggctggtgggccgctgcagggcgggggcctgtccagtgctcccccacttacttgctgcctcccgactgctgtaattatgggtctgtaaccaccctggactgggtgctcctcactgacggacttgtctgaacctctctttgtctccagcgcccagcactgggcctggcaaaacctgagacgcccggtacatgttggccaaatgaatgaaccagattcagaccggcaggggcgctgtggtttaggaggggcctggggtttctcccaggaggtttttgggcttgcgctggagggctctggactcccgtttgcgccagtggcctgcatcctggtcctgtcttcctcatgtttgaatttctttgctttcctagtctggggagcagggaggagccctgtgccctgtcccaggatccatgggtaggaacaccatggacagggagagcaaacggggccatctgtcaccaggggcttagggaaggccgagccagcctgggtcaaagaagtcaaaggggctgcctggaggaggcagcctgtcagctggtgcatcaggttagggaggctgggaaggccttttggggatgggggtgatttgtccaacggctgggggaggtgggaatggggaggtgagcaaggcagcagctctcagggcctggctgttgcgggtggtggtggcaggggctggaggctctaagcctagaataaggagaggcccaggtccagggaactgtgttcaattacatggatttgacacttggcagccctgagtgttttggggagagggaaggcaggcgggcagatgggggtcagagagcttagagggatggcagcccacctgggaaggcaggtgcgggtggagcccccaggcacgtgcagtgggtctctggctcacccagggcgaggagctgcccttagccaggcgtggcctcacattcagcttcctttgcttctcccagaggctgtggccaggccagctgggctcggggagcgccagcctgagaggagcgcgtgagcgtcgcgggagcctcgggcaccatgagcgacgtggctattgtgaaggagggttggctgcacaaacgaggggagtacatcaagacctggcggccacgctacttcctcctcaagaatgatggcaccttcattggctacaaggagcggccgcaggatgtggaccaacgtgaggctcccctcaacaacttctctgtggcgcagtgccagctgatgaagacggagcggccccggcccaacaccttcatcatccgctgcctgcagtggaccactgtcatcgaacgcaccttccatgtggagactcctgaggagcgggaggagtggacaaccgccatccagactgtggctgacggcctcaagaagcaggaggaggaggagatggacttccggtcgggctcacccagtgacaactcaggggctgaagagatggaggtgtccctggccaagcccaagcaccgcgtgaccatgaacgagtttgagtacctgaagctgctgggcaagggcactttcggcaaggtgatcctggtgaaggagaaggccacaggccgctactacgccatgaagatcctcaagaaggaagtcatcgtggccaaggacgaggtggcccacacactcaccgagaaccgcgtcctgcagaactccaggcaccccttcctcacagccctgaagtactctttccagacccacgaccgcctctgctttgtcatggagtacgccaacgggggcgagctgttcttccacctgtcccgggagcgtgtgttctccgaggaccgggcccgcttctatggcgctgagattgtgtcagccctggactacctgcactcggagaagaacgtggtgtaccgggacctcaagctggagaacctcatgctggacaaggacgggcacattaagatcacagacttcgggctgtgcaaggaggggatcaaggacggtgccaccatgaagaccttttgcggcacacctgagtacctggcccccgaggtgctggaggacaatgactacggccgtgcagtggactggtgggggctgggcgtggtcatgtacgagatgatgtgcggtcgcctgcccttctacaaccaggaccatgagaagctttttgagctcatcctcatggaggagatccgcttcccgcgcacgcttggtcccgaggccaagtccttgctttcagggctgctcaagaaggaccccaagcagaggcttggcgggggctccgaggacgccaaggagatcatgcagcatcgcttctttgccggtatcgtgtggcagcacgtgtacgagaagaagctcagcccacccttcaagccccaggtcacgtcggagactgacaccaggtattttgatgaggagttcacggcccagatgatcaccatcacaccacctgaccaagatgacagcatggagtgtgtggacagcgagcgcaggccccacttcccccagttctcctactcggccagcggcacggcctgaggcggcggtggactgcgctggacgatagcttggagggatggagaggcggcctcgtgccatgatctgtatttaatggtttttatttctcgggtgcatttgagagaagccacgctgtcctctcgagcccagatggaaagacgtttttgtgctgtgggcagcaccctcccccgcagcggggtagggaagaaaactatcctgcgggttttaatttatttcatccagtttgttctccgggtgtggcctcagccctcagaacaatccgattcacgtagggaaatgttaaggacttctgcagctatgcgcaatgtggcattggggggccgggcaggtcctgcccatgtgtcccctcactctgtcagccagccgccctgggctgtctgtcaccagctatctgtcatctctctggggccctgggcctcagttcaacctggtggcaccagatgcaacctcactatggtatgctggccagcaccctctcctgggggtggcaggcacacagcagccccccagcactaaggccgtgtctctgaggacgtcatcggaggctgggcccctgggatgggaccagggatgggggatgggccagggtttacccagtgggacagaggagcaaggtttaaatttgttattgtgtattatgttgttcaaatgcattttgggggtttttaatctttgtgacaggaaagccctcccccttccccttctgtgtcacagttcttggtgactgtcccaccgggagcctccccctcagatgatctctccacggtagcacttgaccttttcgacgcttaacctttccgctgtcgccccaggccctccctgactccctgtgggggtggccatccctgggcccctccacgcctcctggccagacgctgccgctgccgctgcaccacggcgtttttttacaacattcaactttagtatttttactattataatataatatggaaccttccctccaaattcttcaataaaagttgcttttcaaa

SEQ ID NO: 34067 - DNA, 1595 bp, Homo sapiens
  source 1..1595: mol_type = unassigned DNA
agtcctgcggtgccttcctcgagtctggcctgctttccatcctgctaagtacttggggcatttccctctttggaggctgtggccaggccagctgggctcggggagcgccagcctgagaggagcgcgtgagcgtcgcgggagcctcgggcaccatgagcgacgtggctattgtgaaggagggttggctgcacaaacgaggggagtacatcaagacctggcggccacgctacttcctcctcaagaatgatggcaccttcattggctacaaggagcggccgcaggatgtggaccaacgtgaggctcccctcaacaacttctctgtggcgcagtgccagctgatgaagacggagcggccccggcccaacaccttcatcatccgctgcctgcagtggaccactgtcatcgaacgcaccttccatgtggagactcctgaggagcgggaggagtggacaaccgccatccagactgtggctgacggcctcaagaagcaggaggaggaggagatggacttccggtcgggctcacccagtgacaactcaggggctgaagagatggaggtgtccctggccaagcccaagcaccgcgtgaccatgaacgagtttgagtacctgaagctgctgggcaagggcactttcggcaaggtgatcctggtgaaggagaaggccacaggccgctactacgccatgaagatcctcaagaaggaagtcatcgtggccaaggacgaggtggcccacacactcaccgagaaccgcgtcctgcagaactccaggcaccccttcctcacagccctgaagtactctttccagacccacgaccgcctctgctttgtcatggagtacgccaacgggggcgagctgttcttccacctgtcccgggagcgtgtgttctccgaggaccgggcccgcttctatggcgctgagattgtgtcagccctggactacctgcactcggagaagaacgtggtgtaccgggacctcaagctggagaacctcatgctggacaaggacgggcacattaagatcacagacttcgggctgtgcaaggaggggatcaaggacggtgccaccatgaagaccttttgcggcacacctgagtacctggcccccgaggtgctggaggacaatgactacggccgtgcagtggactggtgggggctgggcgtggtcatgtacgagatgatgtgcggtcgcctgcccttctacaaccaggaccatgagaagctttttgagctcatcctcatggaggagatccgcttcccgcgcacgcttggtcccgaggccaagtccttgctttcagggctgctcaagaaggaccccaagcagaggcttggcgggggctccgaggacgccaaggagatcatgcagcatcgcttctttgccggtatcgtgtggcagcacgtgtacgagaagaagctcagcccacccttcaagccccaggtcacgtcggagactgacaccaggtattttgatgaggagttcacggcccagatgatcaccatcacaccacctgaccaagatgacagcatggagtgtgtggacagcgagcgcaggccccacttcccccagttctcctactcggccagcggcacggcctga

SEQ ID NO: 34068 - DNA, 3066 bp, Homo sapiens
  source 1..3066: mol_type = unassigned DNA
atggataaagtgtgctcaggtgagggttggctggtgggccgctgcagggcgggggcctgtccagtgctcccccacttacttgctgcctcccgactgctgtaattatgggtctgtaaccaccctggactgggtgctcctcactgacggacttgtctgaacctctctttgtctccagcgcccagcactgggcctggcaaaacctgagacgcccggtacatgttggccaaatgaatgaaccagattcagaccggcaggggcgctgtggtttaggaggggcctggggtttctcccaggaggtttttgggcttgcgctggagggctctggactcccgtttgcgccagtggcctgcatcctggtcctgtcttcctcatgtttgaatttctttgctttcctagtctggggagcagggaggagccctgtgccctgtcccaggatccatgggtaggaacaccatggacagggagagcaaacggggccatctgtcaccaggggcttagggaaggccgagccagcctgggtcaaagaagtcaaaggggctgcctggaggaggcagcctgtcagctggtgcatcagaggctgtggccaggccagctgggctcggggagcgccagcctgagaggagcgcgtgagcgtcgcgggagcctcgggcaccatgagcgacgtggctattgtgaaggagggttggctgcacaaacgaggggagtacatcaagacctggcggccacgctacttcctcctcaagaatgatggcaccttcattggctacaaggagcggccgcaggatgtggaccaacgtgaggctcccctcaacaacttctctgtggcgcagtgccagctgatgaagacggagcggccccggcccaacaccttcatcatccgctgcctgcagtggaccactgtcatcgaacgcaccttccatgtggagactcctgaggagcgggaggagtggacaaccgccatccagactgtggctgacggcctcaagaagcaggaggaggaggagatggacttccggtcgggctcacccagtgacaactcaggggctgaagagatggaggtgtccctggccaagcccaagcaccgcgtgaccatgaacgagtttgagtacctgaagctgctgggcaagggcactttcggcaaggtgatcctggtgaaggagaaggccacaggccgctactacgccatgaagatcctcaagaaggaagtcatcgtggccaaggacgaggtggcccacacactcaccgagaaccgcgtcctgcagaactccaggcaccccttcctcacagccctgaagtactctttccagacccacgaccgcctctgctttgtcatggagtacgccaacgggggcgagctgttcttccacctgtcccgggagcgtgtgttctccgaggaccgggcccgcttctatggcgctgagattgtgtcagccctggactacctgcactcggagaagaacgtggtgtaccgggacctcaagctggagaacctcatgctggacaaggacgggcacattaagatcacagacttcgggctgtgcaaggaggggatcaaggacggtgccaccatgaagaccttttgcggcacacctgagtacctggcccccgaggtgctggaggacaatgactacggccgtgcagtggactggtgggggctgggcgtggtcatgtacgagatgatgtgcggtcgcctgcccttctacaaccaggaccatgagaagctttttgagctcatcctcatggaggagatccgcttcccgcgcacgcttggtcccgaggccaagtccttgctttcagggctgctcaagaaggaccccaagcagaggcttggcgggggctccgaggacgccaaggagatcatgcagcatcgcttctttgccggtatcgtgtggcagcacgtgtacgagaagaagctcagcccacccttcaagccccaggtcacgtcggagactgacaccaggtattttgatgaggagttcacggcccagatgatcaccatcacaccacctgaccaagatgacagcatggagtgtgtggacagcgagcgcaggccccacttcccccagttctcctactcggccagcggcacggcctgaggcggcggtggactgcgctggacgatagcttggagggatggagaggcggcctcgtgccatgatctgtatttaatggtttttatttctcgggtgcatttgagagaagccacgctgtcctctcgagcccagatggaaagacgtttttgtgctgtgggcagcaccctcccccgcagcggggtagggaagaaaactatcctgcgggttttaatttatttcatccagtttgttctccgggtgtggcctcagccctcagaacaatccgattcacgtagggaaatgttaaggacttctgcagctatgcgcaatgtggcattggggggccgggcaggtcctgcccatgtgtcccctcactctgtcagccagccgccctgggctgtctgtcaccagctatctgtcatctctctggggccctgggcctcagttcaacctggtggcaccagatgcaacctcactatggtatgctggccagcaccctctcctgggggtggcaggcacacagcagccccccagcactaaggccgtgtctctgaggacgtcatcggaggctgggcccctgggatgggaccagggatgggggatgggccagggtttacccagtgggacagaggagcaaggtttaaatttgttattgtgtattatgttgttcaaatgcattttgggggtttttaatctttgtgacaggaaagccctcccccttccccttctgtgtcacagttcttggtgactgtcccaccgggagcctccccctcagatgatctctccacggtagcacttgaccttttcgacgcttaacctttccgctgtcgccccaggccctccctgactccctgtgggggtggccatccctgggcccctccacgcctcctggccagacgctgccgctgccgctgcaccacggcgtttttttacaacattcaactttagtatttttactattataatataatatggaaccttccctccaaattct

SEQ ID NO: 34069 - DNA, 553 bp, Homo sapiens
  source 1..553: mol_type = unassigned DNA
gcgcccggacgcggcggcccgtctggggagcagggaggagccctgtgccctgtcccaggatccatgggtaggaacaccatggacagggagagcaaacggggccatctgtcaccaggggcttagggaaggccgagccagcctgggtcaaagaagtcaaaggggctgcctggaggaggcagcctgtcagctggtgcatcagaggctgtggccaggccagctgggctcggggagcgccagcctgagaggagcgcgtgagcgtcgcgggagcctcgggcaccatgagcgacgtggctattgtgaaggagggttggctgcacaaacgaggggagtacatcaagacctggcggccacgctacttcctcctcaagaatgatggcaccttcattggctacaaggagcggccgcaggatgtggaccaacgtgaggctcccctcaacaacttctctgtggcgcagtgccagctgatgaagacggagcggccccggcccaacaccttcatcatccgctgcctgcagtggaccactgtcatcgaacgcaccttccatgtggagac

SEQ ID NO: 34070 - DNA, 4370 bp, Homo sapiens
  source 1..4370: mol_type = unassigned DNA
taatgacgggaggaagaaaggcacaagcgctgagaaactgcaaaggctgtgggattggggttaccagagggtgcagtgacaatggggtaggagtggggtgctagtcagaaagttcagagtaggggtggttggaggcagcgttgagaaggagcaagaagtgtcagggtggtgatggcgtcttagaagatctccaggttttgggagaagatgggtgtatgggttaccacaataggactagactaatacaagggttcagtctattgtgccacgttcttccaggaggataaactccggagccaatgaactggagccaagtgggagagtccgcctctaagggattaaagggtctcctttcactaatcgatctcgccctattcctttcgttgattggctgagaattccaatccgtcgaggaagcgtagcgttgcggccaattgacgtggcgttactaggcgtgtcgcatcactgaggcgggagccaggccgcaagcgaatttcctgattggctgtgatctgcgggttgctggggagaggcgcggagaggcgggcgagagtccgcagggcaggcgctgattggctgaggtgggagcagcttcccttccgatgattcggctcttctcggctcagtctcagcgaagcgtctgcgaccgtcgtttgagtcgtcgctgccgctgccgctgccactgccactgccacctcgcggatcaggagccagcgttgttcgcccgacgcctcgctgccggtgggaggaagcgagagggaagccgcttgcgggtttgtcgccgctgctcgcccaccgcctggaagagccgagccccggcccagtcggtcgcttgccaccgctcgtagccgttacccgcgggccgccacagccgccggccgggagaggcgcgcgccatggcttctggagccgattcaaaaggtgatgacctatcaacagccattctcaaacagaagaaccgtcccaatcggttaattgttgatgaagccatcaatgaggacaacagtgtggtgtccttgtcccagcccaagatggatgaattgcagttgttccgaggtgacacagtgttgctgaaaggaaagaagagacgagaagctgtttgcatcgtcctttctgatgatacttgttctgatgagaagattcggatgaatagagttgttcggaataaccttcgtgtacgcctaggggatgtcatcagcatccagccatgccctgatgtgaagtacggcaaacgtatccatgtgctgcccattgatgacacagtggaaggcattactggtaatctcttcgaggtataccttaagccgtacttcctggaagcgtatcgacccatccggaaaggagacatttttcttgtccgtggtgggatgcgtgctgtggagttcaaagtggtggaaacagatcctagcccttattgcattgttgctccagacacagtgatccactgcgaaggggagcctatcaaacgagaggatgaggaagagtccttgaatgaagtagggtatgatgacattggtggctgcaggaagcagctagctcagataaaggagatggtggaactgcccctgagacatcctgccctctttaaggcaattggtgtgaagcctcctagaggaatcctgctttacggacctcctggaacaggaaagaccctgattgctcgagctgtagcaaatgagactggagccttcttcttcttgatcaatggtcctgagatcatgagcaaattggctggtgagtctgagagcaaccttcgtaaagcctttgaggaggctgagaagaatgctcctgccatcatcttcattgatgagctagatgccatcgctcccaaaagagagaaaactcatggcgaggtggagcggcgcattgtatcacagttgttgaccctcatggatggcctaaagcagagggcacatgtgattgttatggcagcaaccaacagacccaacagcattgacccagctctacggcgatttggtcgctttgacagggaggtagatattggaattcctgatgctacaggacgcttagagattcttcagatccataccaagaacatgaagctggcagatgatgtggacctggaacaggtagccaatgagactcacgggcatgtgggtgctgacttagcagccctgtgctcagaggctgctctgcaagccatccgcaagaagatggatctcattgacctagaggatgagaccattgatgccgaggtcatgaactctctagcagttactatggatgacttccggtgggccttgagccagagtaacccatcagcactgcgggaaaccgtggtagaggtgccacaggtaacctgggaagacatcgggggcctagaggatgtcaaacgtgagctacaggagctggtccagtatcctgtggagcacccagacaaattcctgaagtttggcatgacaccttccaagggagttctgttctatggacctcctggctgtgggaaaactttgttggccaaagccattgctaatgaatgccaggccaacttcatctccatcaagggtcctgagctgctcaccatgtggtttggggagtctgaggccaatgtcagagaaatctttgacaaggcccgccaagctgccccctgtgtgctattctttgatgagctggattcgattgccaaggctcgtggaggtaacattggagatggtggtggggctgctgaccgagtcatcaaccagatcctgacagaaatggatggcatgtccacaaaaaaaaatgtgttcatcattggcgctaccaaccggcctgacatcattgatcctgccatcctcagacctggccgtcttgatcagctcatctacatcccacttcctgatgagaagtcccgtgttgccatcctcaaggctaacctgcgcaagtccccagttgccaaggatgtggacttggagttcctggctaaaatgactaatggcttctctggagctgacctgacagagatttgccagcgtgcttgcaagctggccatccgtgaatccatcgagagtgagattaggcgagaacgagagaggcagacaaacccatcagccatggaggtagaagaggatgatccagtgcctgagatccgtcgagatcactttgaagaagccatgcgctttgcgcgccgttctgtcagtgacaatgacattcggaagtatgagatgtttgcccagacccttcagcagagtcggggctttggcagcttcagattcccttcagggaaccagggtggagctggccccagtcagggcagtggaggcggcacaggtggcagtgtatacacagaagacaatgatgatgacctgtatggctaagtggtggtggccagcgtgcagtgagctggcctgcctggaccttgttccctgggggtgggggcgcttgcccaggagagggaccaggggtgcgcccacagcctgctccattctccagtctgaacagttcagctacagtctgactctggacagggggtttctgttgcaaaaatacaaaacaaaagcgataaaataaaagcgattttcatttggtaggcggagagtgaattaccaacagggaattgggccttgggcctatgccatttctgttgtagtttggggcagtgcaggggacctgtgtggggtgtgaaccaaggcactactgccacctgccacagtaaagcatctgcacttgactcaatgctgcccgagccctcccttccccctatccaacctgggtaggtgggtaggggccacagttgctggatgtttatatagagagtaggttgatttattttacatgcttttgagttaatgttggaaaactaatcacaagcagtttctaaaccaaaaaatgacatgttgtaaaaggacaataaacgttgggtcaaaatggagcctgagtcctgggccctgtgcctgcttcttttcctgggaacagccttgggctacccaccactcccaaggcattcttccaaatgtgaaatcctggaagtaagattgcaccttcttcctctcctgatcaacatcggtatgatgtctcctgttgcctcaccctttgtctgcagtatcactggataggactggtggaaagggagcagcctgacagagctccaaatgtggagaatatggcatccctccacctatatttgatgtggacggtaaggctaggcctgcaggatcccttatcctgaccaaagactgtgttggggtgccatttgaaaatcgcagggttgcaaaagaatacaatcttacttgcaggtggatattctctatactctcttttaatgcatctaaaaatcccaaacatcccctggttggtgatcacttacagttgtgtccacctttattttatgtactttgattaaaaaaaaaaaactttttgttaatataaaa

SEQ ID NO: 34071 - DNA, 9942 bp, Homo sapiens
  source 1..9942: mol_type = unassigned DNA
gagagcgagagtgagtgagtgtgagtgcggggtggggtggtggccgttacgttcggggcaacggctacggcagtggagaagtaagaagagaaacaacgtccggcgcttccgccttcgcttaggaggaggaagagctggtagggaaaggaaagtgcttcgccctgggcctggactggaccgagtcgggttggtgggggtctgggctatgagcttttgagggtcgcctgggacgcggagcgagacacgagagccaggagctatgtctcagccgccgccgccgccgcctccgttgccgccgccacctcctccccctgaggctccacagactccgtcgtccttggcgtcggcggctgcttcgggggggcttttgaagcggagagaccggagaatcctttccgggagctgcccggatccgaagtgtcaggcgcgtctatttttcccggcctccggttctgtcagcatcgagtgtaccgagtgcggccagcggcacgagcagcaacagctgctgggggttgaggaggtgaccgacccggacgtagtgctacacaacctgctgcggaacgcgctgctcggggttacgggggcacccaagaagaacacggaactggtaaaggtgatgggcctttccaactatcactgcaaattgttgtcgcccatattagctcgctatggaatggacaaacagacaggccgggccaagcttctccgggacatgaaccagggcgaactgttcgattgcgccttactgggtgaccgcgccttcctcatagaaccagagcatgttaacactgtgggctatggcaaggaccgctccggaagcctcctgtatttgcatgacactctggaggacattaagcgggccaataaaagccaggaatgtctcattccagtgcatgtggacggggatggacactgcttggtgcatgctgtgtctcgggctctagtaggccgagagctcttctggcatgccttaagagagaatcttaaacagcactttcagcagcacctggcccgatatcaagctctgttccatgacttcattgatgctgctgagtgggaggacattatcaatgagtgtgaccctctgtttgtaccacctgagggtgttcccttgggcctgaggaatatccacatatttggtcttgccaatgtgctacatcgtcctattattctgttagattccctcagtggcatgagaagctctggtgattattcagccacctttctacctgggctcatccctgcagagaagtgcactgggaaagatggtcatttgaacaaaccaatctgtattgcatggagcagctccggtagaaaccattatatccccttggtaggcataaaaggggctgctttgcccaaactgcctatgaatttgcttcctaaagcatggggtgtgcctcaggaccttattaaaaagtacataaaacttgaagaggatggtggttgtgttattggaggtgacagaagtttgcaagataaatacttacttaggcttgttgctgctatggaagaagtctttatggacaaacatggtatccatcctagtttggttgctgatgtccatcagtatttctacagaaggactggagtgataggagttcagcctgaggaagtcacagcagctgctaaaaaagcagtaatggataatcgccttcacaaatgtttgctctgtggtgccctttctgaacttcatgttcctccagagtggttggctcctggagggaaattgtataacctggcaaaaagtactcatggacagctgaggactgacaaaaattacagctttcccttgaacaatttggtttgctcatatgattcagtgaaagatgttctggtaccagactatggaatgagtaacctaacagcttgtaattggtgccatggcacatctgtgcgaaaggtcagaggagatgggtctattgtgtatttggatggagacagaactaattctaggtccactggtggcaaatgtggttgtggattcaaacacttttgggatggtaaggagtatgacaatctaccagaagctttccctattactttagaatggggtggaagagtggtcagagaaacagtatattggttccagtatgaaagtgattcatctttgaatagtaatgtttacgatgttgcaatgaaacttgttaccaagcactttccaggtgaatttgggagtgaaatcctagttcagaaagttgtccacactatattgcatcagactgccaaaaagaatcccgatgattatactcctgtaaatatagatggtgctcacgcccaaagagttggagatgttcaaggacaagaatcagagtctcagctcccaactaaaattattcttactggacagaaaacaaaaactttgcacaaggaggagttaaacatgagtaaaactgaaagaactattcaacagaatattacggaacaggcttctgtaatgcagaaacggaaaacagagaagttaaaacaagaacaaaaagggcaacccaggactgtttctcccagtaccattcgtgatggtccatcctctgcacctgctacacctaccaaggctccctattcaccgacaacttctaaggagaagaagatccgaatcacaactaatgatggacgacagtccatggttacccttaagtcttcaacaaccttttttgaacttcaggaaagtatagccagagaattcaacattcctccatatttacagtgtattcgatacgggtttcctcctaaagagttaatgccaccacaggcaggaatggaaaaggaaccagttcctttacagcatggcgacagaattacaatagaaattctaaaaagtaaagctgaaggtggtcagtctgctgcagcacactcagcccacactgtgaaacaagaagatattgctgttactggtaaactgtcatctaaggaacttcaggagcaagctgaaaaagaaatgtactccttgtgtcttttagcaacattaatgggagaagatgtatggtcttatgcaaagggacttcctcacatgtttcagcagggtggtgtattctacagtattatgaagaaaaccatgggtatggctgatggcaagcattgtacttttccacatctgcctggcaaaacctttgtctataatgcttctgaagatagactggaattgtgtgtggatgctgcaggacatttccccattggtcctgatgttgaagatttagttaaagaggctgtaagtcaggttcgagcagaggctactacaagaagtagggaatcaagtccctcacatgggctattaaaactaggtagtggtggagtagtgaaaaagaaatctgagcaacttcataacgtaactgcctttcagggaaaagggcattctttaggaactgcatctggtaacccacaccttgatccaagagctagggaaacttcagttgtaagaaagcataatacagggacagactttagtaatagttccactaaaacagagccttctgtattcacagcttcttctagtaatagtgagcttattcgaatagctcctggagtagtaacaatgagagacggcaggcagcttgatcctgatttggttgaggcccagcgaaaaaaattgcaggaaatggtttcttctattcaggcttcaatggacaggcaccttcgggatcaaagtacagagcagtcaccatctgatcttcctcaaaggaaaacagaagttgtgagttcttctgcaaagtctgggagtcttcagactggtttgcctgaatcttttcctttaactggtggtactgaaaatttgaatacagaaacaactgatggctgtgtagcagatgcactgggagcagcctttgccacaaggtcaaaagcacaaaggggaaattccgtggaggagcttgaagagatggatagtcaagatgctgagatgactaacacaactgagccaatggatcactcttgatttaattagaggctaataaaggcagaatgtttattgtgaatatgtaatatttgttggctgggccacgtaacttgattagtcattaaaaatcttgtacgtatataattcaaagattatatcttgttattcagtgcatgatagcaagtgtgtgattggccatagcttttaatatactgctgcccaggctggctctgaatttctataaattagctgttagatctgctgagatgactttcttccatatatgtggttcattggaagttctttgtaattttaattccatgaaagtcttaatgtttccaacatgaaaattctcttacttaaatacgtttgatttctgaaaagcctacaaatggaggggaaatgagattgtgctaatgttgatgtcatcaaggtaaccatctcatatactagtgtcaaaaggtttatgtaaacttgaattttatctgaactaaattgtatcttaaaattcatacaattatttattagacagtggaatgcaaatgtttctatgaacgtaaacacattcatagagatttcttggcgaaaatatcttgagaatagaatgtaacgatataacattttgctgatttgtgcaagattggggaaaaatttcttctagattgatgaggtcaatgtgattcagttgtgttgctgtctgagccacagccaattgtgtgtgctctattaatatgttaccattatttttgattcctggcttggtcaagaacaacctgatttttttttttttaatcttgcagaaaagttgattgcaaagtgtggtagaaaaagaaataatggtagcagtagagaatttataaataagagtttatctttatgaatgagttaattgttctacaattttgatcagtggtatttaagcctgtatatgctaagtgtatttatgcccctttgagccaaaatttttttttttttttcagaatccataagagtttatttgttggcttcacttgggtttagatgcaaattttactgcatcacaccctgatcagctgggtatttgcttagtgtattcatcaaatcttcagtgccagtttccttgagaagcagctttcatgcttattccttaaaaacaacagaagagtgtttatcctgagattggtattgcactattttattttattctgcaaatctgtatcctgaagtgtacatttcaacccatattcttctctgttcactgaaattaagttgaatttgaatggctgaaagacaaaatatatgttaatacaatctcttacctagagcattcaaagcctggctgtctctgtttgcacatgtaacagatgcagaactgtgtttgtaattctaagaaaatgtatgtcagaaagtattttatcagatgtttaaaaatctctgcctgttgattcataagggatatagacagtactttaacttgtgtttccagataaggcagattttggtcatctttctgtgaaagtatctctaactgaatccacttcttaaacaaactactctattttaaataaggaaagaatggagaatctagacattttacaggtgtatctgagcaaaatatatatttgggttagtttttatcacattatcacgtttgtctttatattttatcttcatcctaaattttctccctatcaaaacagcaggaaatttttaaacttttatattgtacactatttttgcataaaataagagctgtagctaccaaatactatttactacttagtaaaggtggcttctgtgtattaaactacgaattacaaatatcacttcactaaccactataattatttttggctttttcagccactggaactttttttggggggatttaaatacaggaaaactgtttaagcaaaaaatgcactgctttcatgtaaaatgatataatcttctttaacaaatattttcttcattgataactgacagatatctcatagcattaacataaaataccagaaacaaactttatctccctattcttacatttagtgcaaattggaatgcgtatgtgaatgttagaagatggacttaatctctgacaactttattaatttctctagctacagcaatgctatttaaaagccagttaggtatgaatagtacagtaatagtttgggttctcccttgataaatgaataaaaggctcaattctgataagtgatcaaatttcttgaaattctttcaaatcagctgaaaatttggttggggtgaattgatggtttttgagaagtaggccaggtatcctcacaaagaagttttagaatagggtttcttttaagtttttaaatatcatcctttgtctttccatatggttttcataaccaaatacatgactatagcatggttatttttctagtactgccatttgtgatatagccacatcttggcgtgcaagctagacatctcaggtaaatttgtttttttttttttttttagccctagaggtaacattataactaaaatgcattcctgcaattctgtttgcagtgcttcactaaacattgaaataaagttgtaaattttttcttcagtaatccattttatagttaatcataccaaatttaagttgatgacctaaagtccaggtagtgttgaagatagtatgtatctagaatactggtaatgagaaattgttgtaaattgaagaaaacaagatgctgccatatattaagatagaatataattaactccatgagaatggttactcaggaactagttaaagagcaaacccatttctcccgcttcactctgtttcagatatttttattggaaaatgttagggtagaggcctgagaaagttagcaaatgctattgactgatactggctctgtgtcttccagtgatttttagtttggtttttacagtcaagcctactgcttgcaattaagatatcaatctgaaatgcatctgtaattcctggccacaggtccttattgccattatttttaagtatcttcattggagatgaacactgacttttgcatatggtctcttacctcagggaagatcacttgctagcaactcatactactaatgacaggtttttgagaattgtactgacatcacatgttagctactaaatgcaaaatgtataaaagtattgttttatgtagttacctaccaatactatctgctactgaataactctctaaatatgtagacctcactaataactaacctttaggtaaaaaatttacttctgtcattaattacacttcaactggtcaatatagtggcagcataaagtgtttatttcagaatatcaatacagttttgtcttcatttttcaacagtaatttcaattggttcatacttaaaatactacacagattttgagttttatggttctcaaagcaaggtttccatcttaagatttttataaacacaaagcctttgcaaaattggattaaattccacctatcttaatgtgaattaaaaaccaccatttataataataatagcgccatattctaagttgagtaaatgcatcctaccattcaaggttatcatataatttaacaaaattgtacaaccttaaggctcttcacagtataaattaatttttcaaaccagagctgttcacatgaaaatattccttagtagaatgtatatttaagaaataaaacaacaaaggggaactatatcacccatgtaagttatagagttaattacaagttctaccattcttgataattctttgagatgctaagtgtttcagttcatatttaatgatacttaaatcgtgggaattttaatgtttgttccaaaatagcagaaattgtaaaaattatgaattattggagaaaatgccattacttgtatatctgacatttaattttttaattatggagactacatgcttttgtagtataatattaatgattattctcttgtaaaagaaaaggaaaaattagtaaagaaaaaagttttagttgatgttacctgcttgtgagtatcaattacttagtttttaaatttttaaggtattgcctacttttctttagaatgcagaaatctcgtcctgagcccttattatgcctgtggtagagcaatgcaagactgaaaaggttgccagtattttcaggcttatttgactaagaattagtgccaagaactggaaagtctactttttggagggaaatgatacttagaatttgtaaacataagcagtaatagtgtaaatatttagaaaaatagcaagtgctttaactgctcaataaaatagtatagatgttatttcacccttaaggcactggctgttgcccattattttccgatttcgtgattactgtatatattacatttgagtaatgaataattggtaatagtgtattatagtgttctacagcacaccttactgtacagtatttgaagttttcttttatatcaataataaaactataagttaatactgattttcccctgaaattctccacattagcttttaaaggtaattttatgttctttagtttcctggaattataatgcatgaacatatagttcagttttataaagaaattcttaaataataaagttttcttgttgaacttaagcgggttatcgtacaggaatagtgatttttccccttaatgtagatttcattgctagatgaaatggacccagtgaaaaaagagtgcgcaatttaaaaaaaaaccaaaacggtctcactctgctgcccatgctggattgccgtggcatgatcagggctcactgcagcctcaacctcctgggctcaagtgatcctcccacctcagcctcctgaatagctgggactacaggcatgtgccaccacacctggctaatttttgtattttttgtagagatagggttttgccatgttgcccaggccggtcttgaacccctgagctcaagtgatctgccctcctctgcctctttaagtgctgggattacaggcgtgagccaccgcaccctgccagcaaaatttctttagacatattacataattgggccataatgcttactgaatatttaaaaatgaaggcaaattctaacagagaacttgattttgtggtggtttaaaaaaatactggttagtgataaggaaatgaaaggaaatacagataatagtactaaataacgtttgtgtagcttagcagtcaacacgtttacttccaagttttattgtatatgcttaatatacattttattagatcatttaactcaataatttagagtatagccttagacaccagactgcctaggtctgactcctggtacgctgctttctgtgacctctctgtgcattcctctctgcgaggatgatgatcacatctgctcccagggtggctgtcttaaatgagttaacacgtatctgatgattagaagagtgcctgacacatagtaaacactcaaatatttgctatgttatatgttaatgtaatgtggtagagttcagttgccattaagtgggataaatcctcacagggcacacattatttaaataatttgttacattaaaacttattttacttgtacataattgactaaaaaatggggggttgtacattcaaacatttatgaccatgtgcaacactgagaatctcaaaccgacagtgtgctctgtgacccaaggcaagtcttggagcctttcaaggcctcaatttcttctgtaaccttgtggtttcacaattgtcaaccttttgttctgccgaccattgtcgtcatagtcttacttgcagagggcatagtgctgatgggacaagtgacatgggtatgagccccatgtaaactaaaacataattacctttcctttaggtgttggctacagttatcccaaacttggacttgaggtcttgtatatgcatgccattggtcacataccatcagaatagaattctcaaaaactctttagtaaataagataaacatcctacttataacagctcattatggattttatttttattgtctggctctttcagaccccagcaactgcaattctgacttaataatcaattgtttctaatcattaaaaatgtatatagaaaaactgaa

SEQ ID NO: 34072 - DNA, 4312 bp, Homo sapiens
  source 1..4312: mol_type = unassigned DNA
cacaaggtgcccgtggcggcgcctgacgggagcgtcgtgctcaggggtgtcctctcgtcctgcgtccgcgcccagcgccccgcgccccgcgctgttcctcgtgagaccggcgggcggcgagccgcgcggcccccggggcagtgtcggacacggcgggcgcgcactcgcaggcggggcacggccgcccccgccaggacccgcaggcccggaaacgctccctgtcacaaaggggggaacacgtgggcgccggctgccggggcggcgatcttagggaactagggtcacctggagagccgcccaccgtctctgcccgctcgactcctccgcccgggccgctcggccggtccagccgcggccggcgcctggctgtgaggtggattcccggcccagtctgaccatctccctccagtttttccacttcgttcggaccttctcataactatgtccaccctctacgtctcccctcacccagatgccttccccagcctccgagccctcatagccgctcgctatggggaggctggggagggtcccggatggggaggagcccacccccgcatctgtctccagccacccccgactagcaggactccctttcccccaccccgcctgccggccctggagcaggggcccggtgggctctgggtgtggggggccacggctgtggcccagctgctgtggccagcaggcctggggggcccagggggcagccgggcggctgtccttgtccaacagtgggtcagttacgccgacacggagttaataccagctgcctgtggagcaacgctgccggccctgggactccgaagctcggcccaggacccccaggctgtgctgggggccctgggcagggccctgagccccttggaggagtggcttcggctgcacacctacttggccggggaggcccccactctggctgacctggcggctgtcacagccttgctgctgcctttccgatacgtcctagacccacctgcccgccggatctggaataatgtgactcgctggtttgtcacgtgtgtccggcagccagaattccgagccgtgctaggagaagtggttctatactcaggagccaggcctctctctcatcagccaggccccgaggctcctgccctcccaaagacagctgctcagctcaagaaagaggcaaagaaacgggagaagctagagaaattccaacagaagcagaagatccaacagcagcagccacctccaggggagaagaaaccaaaaccagagaagagggagaaacgggatcctggggtcattacctatgacctcccaaccccacccggggaaaagaaagatgtcagtggccccatgcccgactcctacagccctcggtatgtggaggctgcctggtacccttggtgggagcagcagggcttcttcaagccagagtatgggcgtcctaatgtgtcagcagcaaatccccgaggtgtcttcatgatgtgcatcccaccccccaatgtgacaggctccctgcacctgggccatgcactcaccaacgccatccaggactccctgactcgatggcaccgcatgcgtggggagaccaccctgtggaaccctggctgtgaccatgcaggtattgccacccaggtggtggtggagaagaagctatggcgtgagcagggactgagccggcaccagctgggccgcgaggcctttctacaggaagtctggaagtggaaggaggagaaaggtgaccggatttaccaccagttgaagaagcttggcagctccttggactgggatcgagcctgtttcaccatggaccctaaactctcagcagctgtgacagaggcctttgtccggcttcacgaggaaggcatcatctatcgcagtacccgccttgttaactggtcctgcaccctcaactccgccatctctgacattgaggtggataagaaggagctgacaggtcgcaccctgctctccgtgcctggctacaaggagaaggtggagttcggggtcctcgtgtcctttgcctataaggtccaaggctcagatagcgacgaggaggtggtggtggcaacaactcggatcgagacaatgctgggagatgtggctgtagctgtgcaccccaaagataccagataccagcacctgaaggggaagaacgtgatccacccattcctgtctcggagccttcccattgtcttcgatgaatttgtggacatggactttggcacaggtgctgtgaagatcacccccgcacatgaccaaaatgactatgaagttgggcagcggcacgggctggaggccatcagcatcatggactcccggggggccctcatcaatgtgcctccgcctttcctgggcctgcccaggtttgaggccaggaaagcggtgctggtggcgctgaaggagcggggactgttccgtggcattgaggacaaccccatggtggtgccactttgcaaccggtcgaaggacgtggtagagcctctgctgcggccgcagtggtacgttcgctgcggggagatggcccaggctgccagcgccgctgtgactcggggtgacctccgcatcctgcctgaggcccatcagcgcacatggcatgcctggatggacaacatccgggagtggtgcatttccaggcagctgtggtggggccatcgcatcccagcctactttgtcactgtcagtgacccagcggtgccccctggggaggaccctgatgggcggtactgggtgagtggacgcaatgaggcggaggcccgggagaaggcagccaaggagttcggagtgtcccctgacaagatcagtctccagcaagatgaggatgtattggatacctggttctcctctggcctcttccccttatccattttgggctggcccaaccagtcagaagacctgagtgtgttctaccccgggacactgctggagaccggtcatgacatcctcttcttctgggtggcccggatggtcatgctgggcctgaagctcacgggcaggctgccctttagagaggtctacctccatgccatcgtgcgagatgctcacggccggaagatgagcaagtctctaggcaatgtcatcgatcccctggacgtcatctatggaatctccctgcagggcctccacaaccagctgctgaacagcaacctggatcccagcgaggtggagaaggccaaagaagggcagaaagctgacttcccagcggggattcctgaatgtggcaccgatgctctccggtttggattatgtgcctacatgtcccagggtcgtgacatcaacctggatgtgaaccggatactgggttaccgccacttctgcaacaagctctggaatgccaccaagtttgcccttcgtggccttgggaagggttttgtgccctcacccacctcccagcccggaggccatgagagcctggtggaccgctggatccgcagccgcctgacagaggctgtgaggctcagcaatcaaggcttccaggcctacgacttcccggccgtcaccactgcccagtacagcttctggctctatgagctctgtgatgtctacttggagtgcctgaaacctgtactgaatggggtggaccaggtggcagctgagtgtgcccgccagaccctgtacacttgcctggacgttggcctgcggctgctctcacccttcatgcccttcgtgacggaggagctgttccagaggctgccccggaggatgccgcaagctccccctagcctctgtgttaccccctacccggagccctcagagtgctcctggaaggaccccgaggcagaagccgcccttgagctggcgctaagcatcacgcgagccgtgcgctccctgcgggccgactacaacctcacccggatccggcctgactgtttcctggaagtggcggatgaggccacgggcgccctggcatcggcggtgtcgggctacgtgcaggccctggccagcgcaggtgtggtggctgttctggccctgggggctcccgccccccagggttgcgctgtggctctggcttctgatcgctgctccatccacctgcagcttcaggggctggtggaccctgcacgggagctgggcaagctgcaagccaagcgagttgaggcccagcggcaggcccagcgtctgcgggaacgccgtgctgcctcgggctatcctgtcaaggtgccgctcgaagtccaggaggcagatgaagccaagctccaacagacagaagcagagctcaggaaggtggatgaggccatcgccctattccagaagatgctgtgatccaccacccagcttcacccctcacccccagcggctcaccatggggatggcagcaataaaatattttcccacaaaa

SEQ ID NO: 34073 - DNA, 4312 bp, Homo sapiens; identical to SEQ ID NO: 34072
  source 1..4312: mol_type = unassigned DNA

SEQ ID NO: 34074 - DNA, 804 bp, Homo sapiens
  source 1..804: mol_type = unassigned DNA
ctcctgagagccttccacactccccgaagccccgcgatggtggatagttcctcttccccaggaactccccactgacactgcccctctgagagccaggtcctcggctcctgacagcctgcctggtcagaccctcagtcctatgggactcgggtgtctgcggcgaaggagctcccgtgagggtcccctctctactcaaacataggacccacctcgatcccgcagtcttcccctgtctctctttctccttaggtttttccacttcgttcggaccttctcataactatgtccaccctctacgtctcccctcacccagatgccttccccagcctccgagccctcatagccgctcgctatggggaggctggggagggtcccggatggggaggagcccacccccgcatctgtctccagccacccccgactagcaggactagctttcccccaccccgcctgccggccctggagcaggggcccggtgggctctgggtgtggggggccacggctgtggcccagctgctgtggccagcaggcctggggggcccagggggcagccgggcggctgtccttgtccaacagtgggtcagttacgccgacacggagttaataccagctgcctgtggagcaacgctgccggccctgggactccgaagctcggcccaggacccccaggctgtgctgggggccctgggcagggccctgagccccttggaggagtggcttcggctgcacacctacttggccggggaggcccccactctggctgacctggcggctgtcacagccttgctgctgcctttccgatac

SEQ ID NO: 34075 - DNA, 804 bp, Homo sapiens; identical to SEQ ID NO: 34074
  source 1..804: mol_type = unassigned DNA

SEQ ID NO: 34076 - DNA, 863 bp, Homo sapiens
  source 1..863: mol_type = unassigned DNA
gaaggagcggggactgttccgtggcattgaggacaaccccatggtggtgccactttgcaaccggtcgaaggacgtggtagagcctctgctgcggccgcagtgggagtggtgcatttccaggcagctgtggtggggccatcgcatcccagcctactttgtcactgtcagtgacccagcggtgccccctggggaggaccctgatgggcggtactgggtgagtggacgcaatgaggcggaggcccgggagaaggcagccaaggagttcggagtgtcccctgacaagatcagtctccagcaagatgaggatgtattggatacctggttctcctctggcctcttccccttatccattttgggctggcccaaccagtcagaagacctgagtgtgttctaccccgggacactgctggagaccggtcatgacatcctcttcttctgggtggcccggatggtcatgctgggcctgaagctcacgggcaggctgccctttagagaggtctacctccatgccatcgtgcgagatgctcacggccggaagatgagcaagtctctaggcaatgtcatcgatcccctggacgtcatctatggaatctccctgcagggcctccacaaccagctgctgaacagcaacctggatcccagcgaggtggagaaggccaaagaagggcagaaagctgacttcccagcggggattcctgaatgtggcaccgatgctctccggtttggattatgtgcctacatgtcccagggtcgtgacatcaacctggatgtgaaccggatactgggttaccgccacttctgcaacaagctctggaatgccaccaagtttgcccttcgtggccttgggaagggttttgtgccct

SEQ ID NO: 34077 - DNA, 4312 bp, Homo sapiens
  source 1..4312: mol_type = unassigned DNA
cacaaggtgcccgtggcggcgcctgacgggagcgtcgtgctcaggggtgtcctctcgtcctgcgtccgcgcccagcgccccgcgccccgcgctgttcctcgtgagaccggcgggcggcgagccgcgcggcccccggggcagtgtcggacacggcgggcgcgcactcgcaggcggggcacggccgcccccgccaggacccgcaggcccggaaacgctccctgtcacaaaggggggaacacgtgggcgccggctgccggggcggcgatcttagggaactagggtcacctggagagccgcccaccgtctctgcccgctcgactcctccgcccgggccgctcggccggtccagccgcggccggcgcctggctgtgaggtggattcccggcccagtctgaccatctccctccagtttttccacttcgttcggaccttctcataactatgtccaccctctacgtctcccctcacccagatgccttccccagcctccgagccctcatagccgctcgctatggggaggctggggagggtcccggatggggaggagcccacccccgcatctgtctccagccacccccgactagcaggactagctttcccccaccccgcctgccggccctggagcaggggcccggtgggctctgggtgtggggggccacggctgtggcccagctgctgtggccagcaggcctggggggcccagggggcagccgggcggctgtccttgtccaacagtgggtcagttacgccgacacggagttaataccagctgcctgtggagcaacgctgccggccctgggactccgaagctcggcccaggacccccaggctgtgctgggggccctgggcagggccctgagccccttggaggagtggcttcggctgcacacctacttggccggggaggcccccactctggctgacctggcggctgtcacagccttgctgctgcctttccgatacgtcctagacccacctgcccgccggatctggaataatgtgactcgctggtttgtcacgtgtgtccggcagccagaattccgagccgtgctaggagaagtggttctatactcaggagccaggcctctctctcatcagccaggccccgaggctcctgccctcccaaagacagctgctcagctcaagaaagaggcaaagaaacgggagaagctagagaaattccaacagaagcagaagatccaacagcagcagccacctccaggggagaagaaaccaaaaccagagaagagggagaaacgggatcctggggtcattacctatgacctcccaaccccacccggggaaaagaaagatgtcagtggccccatgcccgactcctacagccctcggtatgtggaggctgcctggtacccttggtgggagcagcagggcttcttcaagccagagtatgggcgtcctaatgtgtcagcagcaaatccccgaggtgtcttcatgatgtgcatcccaccccccaatgtgacaggctccctgcacctgggccatgcactcaccaacgccatccaggactccctgactcgatggcaccgcatgcgtggggagaccaccctgtggaaccctggctgtgaccatgcaggtattgccacccaggtggtggtggagaagaagctatggcgtgagcagggactgagccggcaccagctgggccgcgaggcctttctacaggaagtctggaagtggaaggaggagaaaggtgaccggatttaccaccagttgaagaagcttggcagctccttggactgggatcgagcctgtttcaccatggaccctaaactctcagcagctgtgacagaggcctttgtccggcttcacgaggaaggcatcatctatcgcagtacccgccttgttaactggtcctgcaccctcaactccgccatctctgacattgaggtggataagaaggagctgacaggtcgcaccctgctctccgtgcctggctacaaggagaaggtggagttcggggtcctcgtgtcctttgcctataaggtccaaggctcagatagcgacgaggaggtggtggtggcaacaactcggatcgagacaatgctgggagatgtggctgtagctgtgcaccccaaagataccagataccagcacctgaaggggaagaacgtgatccacccattcctgtctcggagccttcccattgtcttcgatgaatttgtggacatggactttggcacaggtgctgtgaagatcacccccgcacatgaccaaaatgactatgaagttgggcagcggcacgggctggaggccatcagcatcatggactcccggggggccctcatcaatgtgcctccgcctttcctgggcctgcccaggtttgaggccaggaaagcggtgctggtggcgctgaaggagcggggactgttccgtggcattgaggacaaccccatggtggtgccactttgcaaccggtcgaaggacgtggtagagcctctgctgcggccgcagtggtacgttcgctgcggggagatggcccaggctgccagcgccgctgtgactcggggtgacctccgcatcctgcctgaggcccatcagcgcacatggcatgcctggatggacaacatccgggagtggtgcatttccaggcagctgtggtggggccatcgcatcccagcctactttgtcactgtcagtgacccagcggtgccccctggggaggaccctgatgggcggtactgggtgagtggacgcaatgaggcggaggcccgggagaaggcagccaaggagttcggagtgtcccctgacaagatcagtctccagcaagatgaggatgtattggatacctggttctcctctggcctcttccccttatccattttgggctggcccaaccagtcagaagacctgagtgtgttctaccccgggacactgctggagaccggtcatgacatcctcttcttctgggtggcccggatggtcatgctgggcctgaagctcacgggcaggctgccctttagagaggtctacctccatgccatcgtgcgagatgctcacggccggaagatgagcaagtctctaggcaatgtcatcgatcccctggacgtcatctatggaatctccctgcagggcctccacaaccagctgctgaacagcaacctggatcccagcgaggtggagaaggccaaagaagggcagaaagctgacttcccagcggggattcctgaatgtggcaccgatgctctccggtttggattatgtgcctacatgtcccagggtcgtgacatcaacctggatgtgaaccggatactgggttaccgccacttctgcaacaagctctggaatgccaccaagtttgcccttcgtggccttgggaagggttttgtgccctcacccacctcccagcccggaggccatgagagcctggtggaccgctggatccgcagccgcctgacagaggctgtgaggctcagcaatcaaggcttccaggcctacgacttcccggccgtcaccactgcccagtacagcttctggctctatgagctctgtgatgtctacttggagtgcctgaaacctgtactgaatggggtggaccaggtggcagctgagtgtgcccgccagaccctgtacacttgcctggacgttggcctgcggctgctctcacccttcatgcccttcgtgacggaggagctgttccagaggctgccccggaggatgccgcaagctccccctagcctctgtgttaccccctacccggagccctcagagtgctcctggaaggaccccgaggcagaagccgcccttgagctggcgctaagcatcacgcgagccgtgcgctccctgcgggccgactacaacctcacccggatccggcctgactgtttcctggaagtggcggatgaggccacgggcgccctggcatcggcggtgtcgggctacgtgcaggccctggccagcgcaggtgtggtggctgttctggccctgggggctcccgccccccagggttgcgctgtggctctggcttctgatcgctgctccatccacctgcagcttcaggggctggtggaccctgcacgggagctgggcaagctgcaagccaagcgagttgaggcccagcggcaggcccagcgtctgcgggaacgccgtgctgcctcgggctatcctgtcaaggtgccgctcgaagtccaggaggcagatgaagccaagctccaacagacagaagcagagctcaggaaggtggatgaggccatcgccctattccagaagatgctgtgatccaccacccagcttcacccctcacccccagcggctcaccatggggatggcagcaataaaatattttcccacaaaa

SEQ ID NO: 34078 - DNA, 1541 bp, Homo sapiens
  source 1..1541: mol_type = unassigned DNA
cacaaggtgcccgtggcggcgcctgacgggagcgtcgtgctcaggggtgtcctctcgtcctgcgtccgcgcccagcgccccgcgccccgcgctgttcctcgtgagaccggcgggcggcgagccgcgcggcccccggggcagtgtcggacacggcgggcgcgcactcgcaggcggggcacggccgcccccgccaggacccgcaggcccggaaacgctccctgtcacaaaggggggaacacgtgggcgccggctgccggggcggcgatcttagggaactagggtcacctggagagccgcccaccgtctctgcccgctcgactcctccgcccgggccgctcggccggtccagccgcggccggcgcctggctgtgaggtggattcccggcccagtctgaccatctccctccagtttttccacttcgttcggaccttctcataactatgtccaccctctacgtctcccctcacccagatgccttccccagcctccgagccctcatagccgctcgctatggggaggctggggagggtcccggatggggaggagcccacccccgcatctgtctccagccacccccgactagcaggactccctttcccccaccccgcctgccggccctggagcaggggcccggtgggctctgggtgtggggggccacggctgtggcccagctgctgtggccagcaggcctggggggcccagggggcagccgggcggctgtccttgtccaacagtgggtcagttacgccgacacggagttaataccagctgcctgtggagcaacgctgccggccctgggactccgaagctcggcccaggacccccaggctgtgctgggggccctgggcagggccctgagccccttggaggagtggcttcggctgcacacctacttggccggggaggcccccactctggctgacctggcggctgtcacagccttgctgctgcctttccgatacgtcctagacccacctgcccgccggatctggaataatgtgactcgctggtttgtcacgtgtgtccggcagccagaattccgagccgtgctaggagaagtggttctatactcaggagccaggcctctctctcatcagccaggccccgaggctcctgccctcccaaagacagctgctcagctcaagaaagaggcaaagaaacgggagaagctagagaaattccaacagaagcagaagatccaacagcagcagccacctccaggggagaagaaaccaaaaccagagaagagggagaaacgggatcctggggtcattacctatgacctcccaaccccacccggggaaaagaaagatgtcagtggccccatgcccgactcctacagccctcggtatgtggaggctgcctggtacccttggtgggagcagcagggcttcttcaagccagagtatgggcgtcctaatgtgtcagcagcaaatccccgaggtgtcttcatgatgtgcatcccaccccccaatgtgacaggctccctgcacctgggccatgcactcaccaacgccatccaggactccctgactcgatg

SEQ ID NO: 34079 - DNA, 804 bp, Homo sapiens
  source 1..804: mol_type = unassigned DNA
ctcctgagagccttccacactccccgaagccccgcgatggtggatagttcctcttccccaggaactccccactgacactgcccctctgagagccaggtcctcggctcctgacagcctgcctggtcagaccctcagtcctatgggactcgggtgtctgcggcgaaggagctcccgtgagggtcccctctctactcaaacataggacccacctcgatcccgcagtcttcccctgtctctctttctccttaggtttttccacttcgttcggaccttctcataactatgtccaccctctacgtctcccctcacccagatgccttccccagcctccgagccctcatagccgctcgctatggggaggctggggagggtcccggatggggaggagcccacccccgcatctgtctccagccacccccgactagcaggactccctttcccccaccccgcctgccggccctggagcaggggcccggtgggctctgggtgtggggggccacggctgtggcccagctgctgtggccagcaggcctggggggcccagggggcagccgggcggctgtccttgtccaacagtgggtcagttacgccgacacggagttaataccagctgcctgtggagcaacgctgccggccctgggactccgaagctcggcccaggacccccaggctgtgctgggggccctgggcagggccctgagccccttggaggagtggcttcggctgcacacctacttggccggggaggcccccactctggctgacctggcggctgtcacagccttgctgctgcctttccgatac

SEQ ID NO: 34080 - DNA, 3627 bp, Homo sapiens
  source 1..3627: mol_type = unassigned DNA
caggcctggggggcccagggggcagccgggcggctgtccttgtccaacagtgggtcagttacgccgacacggagttaataccagctgcctgtggagcaacgctgccggccctgggactccgaagctcggcccaggacccccaggctgtgctgggggccctgggcagggccctgagccccttggaggagtggcttcggctgcacacctacttggccggggaggcccccactctggctgacctggcggctgtcacagccttgctgctgcctttccgatacgtcctagacccacctgcccgccggatctggaataatgtgactcgctggtttgtcacgtgtgtccggcagccagaattccgagccgtgctaggagaagtggttctatactcaggagccaggcctctctctcatcagccaggccccgaggctcctgccctcccaaagacagctgctcagctcaagaaagaggcaaagaaacgggagaagctagagaaattccaacagaagcagaagatccaacagcagcagccacctccaggggagaagaaaccaaaaccagagaagagggagaaacgggatcctggggtcattacctatgacctcccaaccccacccggggaaaagaaagatgtcagtggccccatgcccgactcctacagccctcggtatgtggaggctgcctggtacccttggtgggagcagcagggcttcttcaagccagagtatgggcgtcctaatgtgtcagcagcaaatccccgaggtgtcttcatgatgtgcatcccaccccccaatgtgacaggctccctgcacctgggccatgcactcaccaacgccatccaggactccctgactcgatggcaccgcatgcgtggggagaccaccctgtggaaccctggctgtgaccatgcaggtattgccacccaggtggtggtggagaagaagctatggcgtgagcagggactgagccggcaccagctgggccgcgaggcctttctacaggaagtctggaagtggaaggaggagaaaggtgaccggatttaccaccagttgaagaagcttggcagctccttggactgggatcgagcctgtttcaccatggaccctaaactctcagcagctgtgacagaggcctttgtccggcttcacgaggaaggcatcatctatcgcagtacccgccttgttaactggtcctgcaccctcaactccgccatctctgacattgaggtggataagaaggagctgacaggtcgcaccctgctctccgtgcctggctacaaggagaaggtggagttcggggtcctcgtgtcctttgcctataaggtccaaggctcagatagcgacgaggaggtggtggtggcaacaactcggatcgagacaatgctgggagatgtggctgtagctgtgcaccccaaagataccagataccagcacctgaaggggaagaacgtgatccacccattcctgtctcggagccttcccattgtcttcgatgaatttgtggacatggactttggcacaggtgctgtgaagatcacccccgcacatgaccaaaatgactatgaagttgggcagcggcacgggctggaggccatcagcatcatggactcccggggggccctcatcaatgtgcctccgcctttcctgggcctgcccaggtttgaggccaggaaagcggtgctggtggcgctgaaggagcggggactgttccgtggcattgaggacaaccccatggtggtgccactttgcaaccggtcgaaggacgtggtagagcctctgctgcggccgcagtggtacgttcgctgcggggagatggcccaggctgccagcgccgctgtgactcggggtgacctccgcatcctgcctgaggcccatcagcgcacatggcatgcctggatggacaacatccgggagtggtgcatttccaggcagctgtggtggggccatcgcatcccagcctactttgtcactgtcagtgacccagcggtgccccctggggaggaccctgatgggcggtactgggtgagtggacgcaatgaggcggaggcccgggagaaggcagccaaggagttcggagtgtcccctgacaagatcagtctccagcaagatgaggatgtattggatacctggttctcctctggcctcttccccttatccattttgggctggcccaaccagtcagaagacctgagtgtgttctaccccgggacactgctggagaccggtcatgacatcctcttcttctgggtggcccggatggtcatgctgggcctgaagctcacgggcaggctgccctttagagaggtctacctccatgccatcgtgcgagatgctcacggccggaagatgagcaagtctctaggcaatgtcatcgatcccctggacgtcatctatggaatctccctgcagggcctccacaaccagctgctgaacagcaacctggatcccagcgaggtggagaaggccaaagaagggcagaaagctgacttcccagcggggattcctgaatgtggcaccgatgctctccggtttggattatgtgcctacatgtcccagggtcgtgacatcaacctggatgtgaaccggatactgggttaccgccacttctgcaacaagctctggaatgccaccaagtttgcccttcgtggccttgggaagggttttgtgccctcacccacctcccagcccggaggccatgagagcctggtggaccgctggatccgcagccgcctgacagaggctgtgaggctcagcaatcaaggcttccaggcctacgacttcccggccgtcaccactgcccagtacagcttctggctctatgagctctgtgatgtctacttggagtgcctgaaacctgtactgaatggggtggaccaggtggcagctgagtgtgcccgccagaccctgtacacttgcctggacgttggcctgcggctgctctcacccttcatgcccttcgtgacggaggagctgttccagaggctgccccggaggatgccgcaagctccccctagcctctgtgttaccccctacccggagccctcagagtgctcctggaaggaccccgaggcagaagccgcccttgagctggcgctaagcatcacgcgagccgtgcgctccctgcgggccgactacaacctcacccggatccggcctgactgtttcctggaagtggcggatgaggccacgggcgccctggcatcggcggtgtcgggctacgtgcaggccctggccagcgcaggtgtggtggctgttctggccctgggggctcccgccccccagggttgcgctgtggctctggcttctgatcgctgctccatccacctgcagcttcaggggctggtggaccctgcacgggagctgggcaagctgcaagccaagcgagttgaggcccagcggcaggcccagcgtctgcgggaacgccgtgctgcctcgggctatcctgtcaaggtgccgctcgaagtccaggaggcagatgaagccaagctccaacagacagaagcagagctcaggaaggtggatgaggccatcgccctattccagaagatgctgtgatccaccacccagcttcacccctcacccccagcggctcaccatggggatggcagcaataaaatattttcccacaaaa

SEQ ID NO: 34081 - DNA, 804 bp, Homo sapiens; identical to SEQ ID NO: 34079
  source 1..804: mol_type = unassigned DNA

SEQ ID NO: 34082 - DNA, 863 bp, Homo sapiens; identical to SEQ ID NO: 34076
  source 1..863: mol_type = unassigned DNA

SEQ ID NO: 34083 - DNA, 804 bp, Homo sapiens; identical to SEQ ID NO: 34079
  source 1..804: mol_type = unassigned DNA

SEQ ID NO: 34084 - DNA, 863 bp, Homo sapiens; identical to SEQ ID NO: 34076
  source 1..863: mol_type = unassigned DNA

SEQ ID NO: 34085 - DNA, 863 bp, Homo sapiens; identical to SEQ ID NO: 34076
  source 1..863: mol_type = unassigned DNA

SEQ ID NO: 34086 - DNA, 4312 bp, Homo sapiens; identical to SEQ ID NO: 34077
  source 1..4312: mol_type = unassigned DNA

SEQ ID NO: 34087 - DNA, 804 bp, Homo sapiens; identical to SEQ ID NO: 34079
  source 1..804: mol_type = unassigned DNA

SEQ ID NO: 34088 - DNA, 1855 bp, Homo sapiens
  source 1..1855: mol_type = unassigned DNA
agagccgcccaccgtctctgcccgctcgactcctccgcccgggccgctcggccggtccagccgcggccggcgcctggctgtgaggtggattcccggcccagtctgaccatctccctccaccttgctgctgcctttccgatacgtcctagacccacctgcccgccggatctggaataatgtgactcgctggtttgtcacgtgtgtccggcagccagaattccgagccgtgctaggagaagtggttctatactcaggagccaggcctctctctcatcagccaggccccgaggctcctgccctcccaaagacagctgctcagctcaagaaagaggcaaagaaacgggagaagctagagaaattccaacagaagcagaagatccaacagcagcagccacctccaggggagaagaaaccaaaaccagagaagagggagaaacgggatcctggggtcattacctatgacctcccaaccccacccggggaaaagaaagatgtcagtggccccatgcccgactcctacagccctcggtatgtggaggctgcctggtacccttggtgggagcagcagggcttcttcaagccagagtatgggcgtcctaatgtgtcagcagcaaatccccgaggtgtcttcatgatgtgcatcccaccccccaatgtgacaggctccctgcacctgggccatgcactcaccaacgccatccaggactccctgactcgatggcaccgcatgcgtggggagaccaccctgtggaaccctggctgtgaccatgcaggtattgccacccaggtggtggtggagaagaagctatggcgtgagcagggactgagccggcaccagctgggccgcgaggcctttctacaggaagtctggaagtggaaggaggagaaaggtgaccggatttaccaccagttgaagaagcttggcagctccttggactgggatcgagcctgtttcaccatggaccctaaactctcagcagctgtgacagaggcctttgtccggcttcacgaggaaggcatcatctatcgcagtacccgccttgttaactggtcctgcaccctcaactccgccatctctgacattgaggtggataagaaggagctgacaggtcgcaccctgctctccgtgcctggctacaaggagaaggtggagttcggggtcctcgtgtcctttgcctataaggtccaaggctcagatagcgacgaggaggtggtggtggcaacaactcggatcgagacaatgctgggagatgtggctgtagctgtgcaccccaaagataccagataccagcacctgaaggggaagaacgtgatccacccattcctgtctcggagccttcccattgtcttcgatgaatttgtggacatggactttggcacagggcctgcccaggtttgaggccaggaaagcggtgctggtggcgctgaaggagcggggactgttccgtggcattgaggacaaccccatggtggtgccactttgcaaccggtcgaaggacgtggtagagcctctgctgcggccgcagtggtacgttcgctgcggggagatggcccaggctgccagcgccgctgtgactcggggtgacctccgcatcctgcctgaggcccatcagcgcacatggcatgcctggatggacaacatccgggagtggtgcatttccaggcagctgtggtggggccatcgcatcccagcctactttgtcactgtcagtgacccagcggtgccccctggggaggaccctgatgggcggtactgggtgagtggacgcaatgaggcggaggcccgggagaaggcagccaaggagttcggagtgtcccctgacaagatcagtctccagcaagatgaggatgtatt

SEQ ID NO: 34089 - DNA, 863 bp, Homo sapiens; identical to SEQ ID NO: 34076
  source 1..863: mol_type = unassigned DNA

SEQ ID NO: 34090 - DNA, 863 bp, Homo sapiens; identical to SEQ ID NO: 34076
  source 1..863: mol_type = unassigned DNA

SEQ ID NO: 34091 - DNA, 284 bp, Homo sapiens
  source 1..284: mol_type = unassigned DNA
ggccagcaggcctggggggcccagggggcagccgggcggctgtccttgtccaacagtgggtcagttacgccgacacggagttaataccagctgcctgtggagcaacgctgccggccctgggactccgaagctcggcccaggacccccaggctgtgctgggggccctgggcagggccctgagccccttggaggagtggcttcggctgcacacctacttggccggggaggcccccactctggctgacctggcggctgtcacagccttgctgctgcctttccgatac

SEQ ID NO: 34092 - DNA, 4312 bp, Homo sapiens; identical to SEQ ID NO: 34072
  source 1..4312: mol_type = unassigned DNA

SEQ ID NO: 34093 - DNA, 2336 bp, Homo sapiens
  source 1..2336: mol_type = unassigned DNA
gaaacgctccctgtcacaaaggggggaacacgtgggcgccggctgccggggcggcgatcttagggaactagggtcacctggagagccgcccaccgtctctgcccgctcgactcctccgcccgggccgctcggccggtccagccgcggccggcgcctggctgtgaggtggattcccggcccagtctgaccatctccctccagtttttccacttcgttcggaccttctcataactatgtccaccctctacgtctcccctcacccagatgccttccccagcctccgagccctcatagccgctcgctatggggaggctggggagggtcccggatggggaggagcccacccccgcatctgtcgcctgcccaggtttgaggccaggaaagcggtgctggtggcgctgaaggagcggggactgttccgtggcattgaggacaaccccatggtggtgccactttgcaaccggtcgaaggacgtggtagagcctctgctgcggccgcagtggtacgttcgctgcggggagatggcccaggctgccagcgccgctgtgactcggggtgacctccgcatcctgcctgaggcccatcagcgcacatggcatgcctggatggacaacatccgggagtggtgcatttccaggcagctgtggtggggccatcgcatcccagcctactttgtcactgtcagtgacccagcggtgccccctggggaggaccctgatgggcggtactgggtgagtggacgcaatgaggcggaggcccgggagaaggcagccaaggagttcggagtgtcccctgacaagatcagtctccagcaagatgaggatgtattggatacctggttctcctctggcctcttccccttatccattttgggctggcccaaccagtcagaagacctgagtgtgttctaccccgggacactgctggagaccggtcatgacatcctcttcttctgggtggcccggatggtcatgctgggcctgaagctcacgggcaggctgccctttagagaggtctacctccatgccatcgtgcgagatgctcacggccggaagatgagcaagtctctaggcaatgtcatcgatcccctggacgtcatctatggaatctccctgcagggcctccacaaccagctgctgaacagcaacctggatcccagcgaggtggagaaggccaaagaagggcagaaagctgacttcccagcggggattcctgaatgtggcaccgatgctctccggtttggattatgtgcctacatgtcccagggtcgtgacatcaacctggatgtgaaccggatactgggttaccgccacttctgcaacaagctctggaatgccaccaagtttgcccttcgtggccttgggaagggttttgtgccctcacccacctcccagcccggaggccatgagagcctggtggaccgctggatccgcagccgcctgacagaggctgtgaggctcagcaatcaaggcttccaggcctacgacttcccggccgtcaccactgcccagtacagcttctggctctatgagctctgtgatgtctacttggagtgcctgaaacctgtactgaatggggtggaccaggtggcagctgagtgtgcccgccagaccctgtacacttgcctggacgttggcctgcggctgctctcacccttcatgcccttcgtgacggaggagctgttccagaggctgccccggaggatgccgcaagctccccctagcctctgtgttaccccctacccggagccctcagagtgctcctggaaggaccccgaggcagaagccgcccttgagctggcgctaagcatcacgcgagccgtgcgctccctgcgggccgactacaacctcacccggatccggcctgactgtttcctggaagtggcggatgaggccacgggcgccctggcatcggcggtgtcgggctacgtgcaggccctggccagcgcaggtgtggtggctgttctggccctgggggctcccgccccccagggttgcgctgtggctctggcttctgatcgctgctccatccacctgcagcttcaggggctggtggaccctgcacgggagctgggcaagctgcaagccaagcgagttgaggcccagcggcaggcccagcgtctgcgggaacgccgtgctgcctcgggctatcctgtcaaggtgccgctcgaagtccaggaggcagatgaagccaagctccaacagacagaagcagagctcaggaaggtggatgaggccatcgccctattccagaagatgctgtgatccaccacccagcttcacccctcacccccagcggctcaccatggggatggcagcaataaaatattttcccac

SEQ ID NO: 34094 - DNA, 2336 bp, Homo sapiens; identical to SEQ ID NO: 34093
  source 1..2336: mol_type = unassigned DNA

SEQ ID NO: 34095 - DNA, 1855 bp, Homo sapiens; identical to SEQ ID NO: 34088
  source 1..1855: mol_type = unassigned DNA

SEQ ID NO: 34096 - DNA, 1855 bp, Homo sapiens; identical to SEQ ID NO: 34088
  source 1..1855: mol_type = unassigned DNA

SEQ ID NO: 34097 - DNA, 1855 bp, Homo sapiens; identical to SEQ ID NO: 34088
  source 1..1855: mol_type = unassigned DNA

SEQ ID NO: 34098 - DNA, 2336 bp, Homo sapiens; identical to SEQ ID NO: 34093
  source 1..2336: mol_type = unassigned DNA

SEQ ID NO: 34099 - DNA, 2336 bp, Homo sapiens; identical to SEQ ID NO: 34093
  source 1..2336: mol_type = unassigned DNA

SEQ ID NO: 34100 - DNA, 1855 bp, Homo sapiens; identical to SEQ ID NO: 34088
  source 1..1855: mol_type = unassigned DNA

SEQ ID NO: 34101 - DNA, 4073 bp, Homo sapiens
  source 1..4073: mol_type = unassigned DNA
gccagctgctgcgcatgcgccggccggggccccgcccccatgcgccgcgcggctccagggccacgttccagggtcgggtttggtggattcctcagtccctgccgccgcggggcgccctgggatagcggcggggcctcctggtgagcgcgcgccggggcggcctccgggaagtgggagacgctgcgggtcctgggcccaggccttgggatgggcgggaaggcttggccgcgccgggctgtgggcactgcaggaggcccctgtgcaggtggagatcgccgcggccctggcgggactccttgctggctcttgggcgcgctgatgcccatcatctccctgagtttctgagccctatctctcatgtgtcagtggtcaccgccgaatccagacactccggccctgttccggaagagccctgatatccgtggctccatggcgctgtctgtcgataccatgcactctagctctcaaggaggaaaggttttgtggaagggaatagagacttggaataacagacctgtgctaattagagacaggaaagatggaacaaggggagtgacccttctccacccccatatcctaatgtgctctctctctatccagaacagatctcggcccctttccaaacactcctgatgcctcatttgcctctcgcctcttttcgaccaccattttgggggctgaggcactcacggggcctccccaggtttcactccgtttctacacagtcggagccccatggatctcccatctcccggaggaaccgtgaagccaaacagaagcgcctgcgagagaagcaggcgactctggaggctgagatagcaggggagagcaagtcacctgcagaatccattaaggcctggaggcctaaggagttagtattgtatgaaatccctacgaaacccggtgaaaagaaagatgtctctgggcccctgcctcctgcatacagcccccgatatgttgaggctgcctggtacccgtggtgggtacgagagggcttcttcaaaccagaatatcaggcccggctgccccaagctacaggggagaccttttccatgtgtatcccacctcccaatgtcactggctccctgcacattggccacgcactcacggtggccatacaggatgccctcgtgcgctggcaccggatgcgtggggatcaagtgctgtgggtccctggttcagatcatgcaggaattgctacacaagctgtggtggagaaacaactgtggaaggaacggggagtgaggagacatgagctgagccgggaggccttccttagggaggtgtggcagtggaaggaggcgaaaggtggagagatctgtgagcagctgcgagctctgggtgcctccctggactgggatcgagagtgttttaccatggatgttggctcctcagtggctgtgactgaagcttttgtgcggctctacaaggcggggttgctgtaccggaaccatcagcttgtcaactggtcatgtgctttaagatcagccatctcggacattgaggtggagaaccggcccctgcctggccacacacagcttcgactgcctggctgccccacccccgtgtcttttggcctcctattttctgttgccttccccgtggatggagagcctgatgcagaggttgtggtaggaaccacaaggccagagacgctgcctggagatgtggctgtggccgttcatccagacgactcgcgatacacacatctacacgggcgacagcttcgtcaccccttgatggggcagcctcttcccctcatcacagactatgctgttcagccacatgtgggcacgggggcagtgaaggtgactccagctcacagtcctgccgatgctgagatgggggcccgacatggcttgagccccttgaatgtcattgcggaggatgggaccatgacctccctctgcggggactggctgcagggtcttcaccggtttgtggcccgggaaaagataatgtctgtgctgagtgaatggggcctgttccggggcctccagaaccaccccatggtactgcccatctgcagccgttctggggatgtgatagaatacctgctgaagaaccagtggtttgtccgctgccaggaaatgggggcccgagctgccaaggctgtggagtcgggggccctggagctcagtccctccttccaccagaagaactggcagcactggttttcccatattggggactggtgtgtctcccggcagctgtggtggggccatcagattccagcctacctggttgtagaggaccatgcgcagggagaagaggactgttgggtggttgggcggtcagaggctgaggccagagaggtagcagcggaactgacagggaggccaggggcagagctgaccctggagagggatcctgatgtcctagacacatggttttcttctgccctgttccccttttctgccctgggctggccccaagagaccccagaccttgctcgtttctaccccctgtcacttttggaaacgggcagcgaccttctgctgttctgggtgggccgcatggtcatgttggggacccagctcacagggcagctgcccttcagcaaggtgcttcttcatcccatggttcgggacaggcagggccggaagatgagcaagtccctggggaatgtgctggacccaagagacatcatcagtggggtggagatgcaggtgctgcaggaaaagctgagaagcggaaatttggaccctgcagagctggccattgtggctgcagcacagaaaaaggactttcctcacgggatccctgagtgtgggacagatgccctgagattcacactctgctcccatggagttcaggcgggcgacttgcacctgtcagtctctgaggtccagagctgccgacatttctgcaacaagatctggaatgctcttcgctttatcctcaatgctttaggggagaaatttgtgccacagcctgctgaggagctgtctccctcctccccgatggatgcctggatcctgagccgccttgccctggctgcccaggagtgtgagcggggcttcctcacccgagagctctcgctcgtcactcatgccctgcaccacttctggcttcacaacctctgtgacgtctacctggaggctgtgaagcccgtgctgtggcactcgccccgccccctggggccccctcaggtcctgttctcctgcgctgacctcggcctccgcctcctggccccactgatgcccttcctggctgaagagctctggcagaggctgccccccaggcctggttgcccccctgcccccagcatctcggttgccccctaccccagcgcctgcagcttggagcactggcgccagccagagctggagcggcgcttctcccgggtccaagaggtcgtgcaggtgctaagggctctccgagccacgtaccagctcaccaaagcccggccccgagtgctgctgcagagctcagagcctggggaccagggcctcttcgaggccttcttggagcccctgggcaccctgggctactgtggggctgtgggcctgttacccccaggcgcagcagctccctccggctgggcccaggctccactcagtgacacggctcaagtctacatggagctgcagggcctggtggacccgcagatccagctacctctgttagccgcccgaaggtacaagttgcagaagcagcttgacagcctcacagccaggaccccatcagaaggggaggcagggactcagaggcaacaaaagctttcttccctccagctggaattgtcaaaactggacaaggcagcctctcacctccggcagctgatggatgagcctccagccccagggagcccggagctctaactcatcatccccatcagttttcctccctctcagacctgtctttgaggacaaacagatttgtcagctgtcagggtgcagtgggacgtcagagactatgtggtccatcgccttcattgtgtaaatgaggacacagactggcttggtcgcagtgactgtggtgtccttgagatgctcacattactgcccggcctgcctcccacctggaagtctgggaatgaggagattgagataaacttttgaaatcccaaa

SEQ ID NO: 34102 - DNA, 1029 bp, Homo sapiens
  source 1..1029: mol_type = unassigned DNA
gttccagggtcgggtttggtggattcctcagtccctgccgccgcggggcgccctgggatagcggcggggcctcctgaacagatctcggcccctttccaaacactcctgatgcctcatttgcctctcgcctcttttcgaccaccattttgggggctgaggcactcacggggcctccccaggtttcactccgtttctacacagtcggagccccatggatctcccatctcccggaggaaccgtgaagccaaacagaagcgcctgcgagagaagcaggcgactctggaggctgagatagcaggggagagcaagtcacctgcagaatccattaaggcctggaggcctaaggagttagtattgtatgaaatccctacgaaacccggtgaaaagaaagatgtctctgggcccctgcctcctgcatacagcccccgatatgttgaggctgcctggtacccgtggtgggtacgagagggcttcttcaaaccagaatatcaggcccggctgccccaagctacaggggagaccttttccatgtgtatcccacctcccaatgtcactggctccctgcacattggccacgcactcacggtggccatacaggatgccctcgtgcgctggcaccggatgcgtggggatcaagtgctgtgggtccctggttcagatcatgcaggaattgctacacaagctgtggtggagaaacaactgtggaaggaacggggagtgaggagacatgagctgagccgggaggccttccttagggaggtgtggcagtggaaggaggcgaaaggtggagagatctgtgagcagctgcgagctctgggtgcctccctggactgggatcgagtgttttaccatggatgttggctcctcagtggctgtgactgaagcttttgtgcggctctacaaggcggggttgctgtaccggaaccatcagcttgtcaactggtcatgtgctttaagatcagccatctcggacattgaggtggagaaccggcccctgcctggccacacacagcttcgactgcctggctg

SEQ ID NO: 34103 - DNA, 3605 bp, Homo sapiens
  source 1..3605: mol_type = unassigned DNA
gccagctgctgcgcatgcgccggccggggccccgcccccatgcgccgcgcggctccagggccacgttccagggtcgggtttggtggattcctcagtccctgccgccgcggggcgccctgggatagcggcggggcctcctgatctcggcccctttccaaacactcctgatgcctcatttgcctctcgcctcttttcgaccaccattttgggggctgaggcactcacggggcctccccaggtttcactccgtttctacacagtcggagccccatggatctcccatctcccggaggaaccgtgaagccaaacagaagcgcctgcgagagaagcaggcgactctggaggctgagatagcaggggagagcaagtcacctgcagaatccattaaggcctggaggcctaaggagttagtattgtatgaaatccctacgaaacccggtgaaaagaaagatgtctctgggcccctgcctcctgcatacagcccccgatatgttgaggctgcctggtacccgtggtgggtacgagagggcttcttcaaaccagaatatcaggcccggctgccccaagctacaggggagaccttttccatgtgtatcccacctcccaatgtcactggctccctgcacattggccacgcactcacggtggccatacaggatgccctcgtgcgctggcaccggatgcgtggggatcaagtgctgtgggtccctggttcagatcatgcaggaattgctacacaagctgtggtggagaaacaactgtggaaggaacggggagtgaggagacatgagctgagccgggaggccttccttagggaggtgtggcagtggaaggaggcgaaaggtggagagatctgtgagcagctgcgagctctgggtgcctccctggactgggatcgagagtgttttaccatggatgttggctcctcagtggctgtgactgaagcttttgtgcggctctacaaggcggggttgctgtaccggaaccatcagcttgtcaactggtcatgtgctttaagatcagccatctcggacattgaggtggagaaccggcccctgcctggccacacacagcttcgactgcctggctgccccacccccgtgtcttttggcctcctattttctgttgccttccccgtggatggagagcctgatgcagaggttgtggtaggaaccacaaggccagagacgctgcctggagatgtggctgtggccgttcatccagacgactcgcgatacacacatctacacgggcgacagcttcgtcaccccttgatggggcagcctcttcccctcatcacagactatgctgttcagccacatgtgggcacgggggcagtgaaggtgactccagctcacagtcctgccgatgctgagatgggggcccgacatggcttgagccccttgaatgtcattgcggaggatgggaccatgacctccctctgcggggactggctgcagggtcttcaccggtttgtggcccgggaaaagataatgtctgtgctgagtgaatggggcctgttccggggcctccagaaccaccccatggtactgcccatctgcagccgttctggggatgtgatagaatacctgctgaagaaccagtggtttgtccgctgccaggaaatgggggcccgagctgccaaggctgtggagtcgggggccctggagctcagtccctccttccaccagaagaactggcagcactggttttcccatattggggactggtgtgtctcccggcagctgtggtggggccatcagattccagcctacctggttgtagaggaccatgcgcagggagaagaggactgttgggtggttgggcggtcagaggctgaggccagagaggtagcagcggaactgacagggaggccaggggcagagctgaccctggagagggatcctgatgtcctagacacatggttttcttctgccctgttccccttttctgccctgggctggccccaagagaccccagaccttgctcgtttctaccccctgtcacttttggaaacgggcagcgaccttctgctgttctgggtgggccgcatggtcatgttggggacccagctcacagggcagctgcccttcagcaaggtgcttcttcatcccatggttcgggacaggcagggccggaagatgagcaagtccctggggaatgtgctggacccaagagacatcatcagtggggtggagatgcaggtgctgcaggaaaagctgagaagcggaaatttggaccctgcagagctggccattgtggctgcagcacagaaaaaggactttcctcacgggatccctgagtgtgggacagatgccctgagattcacactctgctcccatggagttcaggcgggcgacttgcacctgtcagtctctgaggtccagagctgccgacatttctgcaacaagatctggaatgctcttcgctttatcctcaatgctttaggggagaaatttgtgccacagcctgctgaggagctgtctccctcctccccgatggatgcctggatcctgagccgccttgccctggctgcccaggagtgtgagcggggcttcctcacccgagagctctcgctcgtcactcatgccctgcaccacttctggcttcacaacctctgtgacgtctacctggaggctgtgaagcccgtgctgtggcactcgccccgccccctggggccccctcaggtcctgttctcctgcgctgacctcggcctccgcctcctggccccactgatgcccttcctggctgaagagctctggcagaggctgccccccaggcctggttgcccccctgcccccagcatctcggttgccccctaccccagcgcctgcagcttggagcactggcgccagccagagctggagcggcgcttctcccgggtccaagaggtcgtgcaggtgctaagggctctccgagccacgtaccagctcaccaaagcccggccccgagtgctgctgcagagctcagagcctggggaccagggcctcttcgaggccttcttggagcccctgggcaccctgggctactgtggggctgtgggcctgttacccccaggcgcagcagctccctccggctgggcccaggctccactcagtgacacggctcaagtctacatggagctgcagggcctggtggacccgcagatccagctacctctgttagccgcccgaaggtacaagttgcagaagcagcttgacagcctcacagccaggaccccatcagaaggggaggcagggactcagaggcaacaaaagctttcttccctccagctggaattgtcaaaactggacaaggcagcctctcacctccggcagctgatggatgagcctccagccccagggagcccggagctctaactcatcatccccatcagttttcctccctctcagacctgtctttgaggacaaacagatttgtcagctgtcagggtgcagtgggacgtcagagactatgtggtccatcgccttcattgtgtaaatgaggacacagactggcttggtcgcagtgactgtggtgtccttgagatgctcacattactgcccggcctgcctcccacctggaagtctgggaatgaggagattgagataaacttttgaaatccc

SEQ ID NO: 34104 - DNA, 460 bp, Homo sapiens
  source 1..460: mol_type = unassigned DNA
acgctgcgggtcctgggcccaggccttgggatgggcgggaaggcttggccgcgccgggctgtgggcactgcaggaggcccctgtgcagatctcggcccctttccaaacactcctgatgcctcatttgcctctcgcctcttttcgaccaccattttgggggctgaggcactcacggggcctccccaggtttcactccgtttctacacagtcggagccccatggatctcccatctcccggaggaaccgtgaagccaaacagaagcgcctgcgagagaagcaggcgactctggaggctgagatagcaggggagagcaagtcacctgcagaatccattaaggcctggaggcctaaggagttagtattgtatgaaatccctacgaaacccggtgaaaagaaagatgtctctgggcccctgcctcctgcatacagcccccgatatgttgaggctgcctggtacccg

SEQ ID NO: 34105 - DNA, 1103 bp, Homo sapiens
  source 1..1103: mol_type = unassigned DNA
cgcggctccagggccacgttccagggtcgggtttggtggattcctcagtccctgccgccgcggggcgccctgggatagcggcggggcctcctgaacagatctcggcccctttccaaacactcctgatgcctcatttgcctctcgcctcttttcgaccaccattttgggggctgaggcactcacggggcctccccaggtttcactccgtttctacacagtcggagccccatggatctcccatctcccggaggaaccgtgaagccaaacagaagcgcctgcgagagaagcaggcgactctggaggctgagatagcaggggagagcaagtcacctgcagaatccattaaggcctggaggcctaaggagttagtattgtatgaaatccctacgaaacccggtgaaaagaaagatgtctctgggcccctgcctcctgcatacagcccccgatatgttgaggctgcctggtacccgtggtgggtacgagagggcttcttcaaaccagaatatcaggcccggctgccccaagctacaggggagaccttttccatgtgtatcccacctcccaatgtcactggctccctgcacattggccacgcactcacggtggccatacaggatgccctcgtgcgctggcaccggatgcgtggggatcaagtgctgtgggtccctggttcagatcatgcaggaattgctacacaagctgtggtggagaaacaactgtggaaggaacggggagtgaggagacatgagctgagccgggaggccttccttagggaggtgtggcagtggaaggaggcgaaaggtggagagatctgtgagcagctgcgagctctgggtgcctccctggactgggatcgagagtgttttaccatggatgttggctcctcagtggctgtgactgaagcttttgtgcggctctacaaggcggggttgctgtaccggaaccatcagcttgtcaactggtcatgtgctttaagatcagccatctcggacattgaggtggagaaccggcccctgcctggccacacacagcttcgactgcctggctgccccacccccgtgtcttttggcctcctattttctgttgccttccccgtggatgga

SEQ ID NO: 34106 - DNA, 3609 bp, Homo sapiens
  source 1..3609: mol_type = unassigned DNA
ggcggggcctcctggtgagcgcgcgccggggcggcctccgggaagtgggagacgctgcgggtcctgggcccaggccttgggatgggcgggaaggcttggccgcgccgggctgtgggcactgcaggaggcccctgtgcagaacagatctcggcccctttccaaacactcctgatgcctcatttgcctctcgcctcttttcgaccaccattttgggggctgaggcactcacggggcctccccaggtttcactccgtttctacacagtcggagccccatggatctcccatctcccggaggaaccgtgaagccaaacagaagcgcctgcgagagaagcaggcgactctggaggctgagatagcaggggagagcaagtcacctgcagaatccattaaggcctggaggcctaaggagttagtattgtatgaaatccctacgaaacccggtgaaaagaaagatgtctctgggcccctgcctcctgcatacagcccccgatatgttgaggctgcctggtacccgtggtgggtacgagagggcttcttcaaaccagaatatcaggcccggctgccccaagctacaggggagaccttttccatgtgtatcccacctcccaatgtcactggctccctgcacattggccacgcactcacggtggccatacaggatgccctcgtgcgctggcaccggatgcgtggggatcaagtgctgtgggtccctggttcagatcatgcaggaattgctacacaagctgtggtggagaaacaactgtggaaggaacggggagtgaggagacatgagctgagccgggaggccttccttagggaggtgtggcagtggaaggaggcgaaaggtggagagatctgtgagcagctgcgagctctgggtgcctccctggactgggatcgagagtgttttaccatggatgttggctcctcagtggctgtgactgaagcttttgtgcggctctacaaggcggggttgctgtaccggaaccatcagcttgtcaactggtcatgtgctttaagatcagccatctcggacattgaggtggagaaccggcccctgcctggccacacacagcttcgactgcctggctgccccacccccgtgtcttttggcctcctattttctgttgccttccccgtggatggagagcctgatgcagaggttgtggtaggaaccacaaggccagagacgctgcctggagatgtggctgtggccgttcatccagacgactcgcgatacacacatctacacgggcgacagcttcgtcaccccttgatggggcagcctcttcccctcatcacagactatgctgttcagccacatgtgggcacgggggcagtgaaggtgactccagctcacagtcctgccgatgctgagatgggggcccgacatggcttgagccccttgaatgtcattgcggaggatgggaccatgacctccctctgcggggactggctgcagggtcttcaccggtttgtggcccgggaaaagataatgtctgtgctgagtgaatggggcctgttccggggcctccagaaccaccccatggtactgcccatctgcagccgttctggggatgtgatagaatacctgctgaagaaccagtggtttgtccgctgccaggaaatgggggcccgagctgccaaggctgtggagtcgggggccctggagctcagtccctccttccaccagaagaactggcagcactggttttcccatattggggactggtgtgtctcccggcagctgtggtggggccatcagattccagcctacctggttgtagaggaccatgcgcagggagaagaggactgttgggtggttgggcggtcagaggctgaggccagagaggtagcagcggaactgacagggaggccaggggcagagctgaccctggagagggatcctgatgtcctagacacatggttttcttctgccctgttccccttttctgccctgggctggccccaagagaccccagaccttgctcgtttctaccccctgtcacttttggaaacgggcagcgaccttctgctgttctgggtgggccgcatggtcatgttggggacccagctcacagggcagctgcccttcagcaaggtgcttcttcatcccatggttcgggacaggcagggccggaagatgagcaagtccctggggaatgtgctggacccaagagacatcatcagtggggtggagatgcaggtgctgcaggaaaagctgagaagcggaaatttggaccctgcagagctggccattgtggctgcagcacagaaaaaggactttcctcacgggatccctgagtgtgggacagatgccctgagattcacactctgctcccatggagttcaggcgggcgacttgcacctgtcagtctctgaggtccagagctgccgacatttctgcaacaagatctggaatgctcttcgctttatcctcaatgctttaggggagaaatttgtgccacagcctgctgaggagctgtctccctcctccccgatggatgcctggatcctgagccgccttgccctggctgcccaggagtgtgagcggggcttcctcacccgagagctctcgctcgtcactcatgccctgcaccacttctggcttcacaacctctgtgacgtctacctggaggctgtgaagcccgtgctgtggcactcgccccgccccctggggccccctcaggtcctgttctcctgcgctgacctcggcctccgcctcctggccccactgatgcccttcctggctgaagagctctggcagaggctgccccccaggcctggttgcccccctgcccccagcatctcggttgccccctaccccagcgcctgcagcttggagcactggcgccagccagagctggagcggcgcttctcccgggtccaagaggtcgtgcaggtgctaagggctctccgagccacgtaccagctcaccaaagcccggccccgagtgctgctgcagagctcagagcctggggaccagggcctcttcgaggccttcttggagcccctgggcaccctgggctactgtggggctgtgggcctgttacccccaggcgcagcagctccctccggctgggcccaggctccactcagtgacacggctcaagtctacatggagctgcagggcctggtggacccgcagatccagctacctctgttagccgcccgaaggtacaagttgcagaagcagcttgacagcctcacagccaggaccccatcagaaggggaggcagggactcagaggcaacaaaagctttcttccctccagctggaattgtcaaaactggacaaggcagcctctcacctccggcagctgatggatgagcctccagccccagggagcccggagctctaactcatcatccccatcagttttcctccctctcagacctgtctttgaggacaaacagatttgtcagctgtcagggtgcagtgggacgtcagagactatgtggtccatcgccttcattgtgtaaatgaggacacagactggcttggtcgcagtgactgtggtgtccttgagatgctcacattactgcccggcctgcctcccacctggaagtctgggaatgaggagattgagataaacttttgaaatccc

SEQ ID NO: 34107 - DNA, 3377 bp, Homo sapiens
  source 1..3377: mol_type = unassigned DNA
gccagctgctgcgcatgcgccggccggggccccgcccccatgcgccgcgcggctccagggccacgttccagggtcgggtttggtggattcctcagtccctgccgccgcggggcgccctgggatagcggcggggcctcctgtcacctgcagaatccattaaggcctggaggcctaaggagttagtattgtatgaaatccctacgaaacccggtgaaaagaaagatgtctctgggcccctgcctcctgcatacagcccccgatatgttgaggctgcctggtacccgtggtgggtacgagagggcttcttcaaaccagaatatcaggcccggctgccccaagctacaggggagaccttttccatgtgtatcccacctcccaatgtcactggctccctgcacattggccacgcactcacggtggccatacaggatgccctcgtgcgctggcaccggatgcgtggggatcaagtgctgtgggtccctggttcagatcatgcaggaattgctacacaagctgtggtggagaaacaactgtggaaggaacggggagtgaggagacatgagctgagccgggaggccttccttagggaggtgtggcagtggaaggaggcgaaaggtggagagatctgtgagcagctgcgagctctgggtgcctccctggactgggatcgagagtgttttaccatggatgttggctcctcagtggctgtgactgaagcttttgtgcggctctacaaggcggggttgctgtaccggaaccatcagcttgtcaactggtcatgtgctttaagatcagccatctcggacattgaggtggagaaccggcccctgcctggccacacacagcttcgactgcctggctgccccacccccgtgtcttttggcctcctattttctgttgccttccccgtggatggagagcctgatgcagaggttgtggtaggaaccacaaggccagagacgctgcctggagatgtggctgtggccgttcatccagacgactcgcgatacacacatctacacgggcgacagcttcgtcaccccttgatggggcagcctcttcccctcatcacagactatgctgttcagccacatgtgggcacgggggcagtgaaggtgactccagctcacagtcctgccgatgctgagatgggggcccgacatggcttgagccccttgaatgtcattgcggaggatgggaccatgacctccctctgcggggactggctgcagggtcttcaccggtttgtggcccgggaaaagataatgtctgtgctgagtgaatggggcctgttccggggcctccagaaccaccccatggtactgcccatctgcagccgttctggggatgtgatagaatacctgctgaagaaccagtggtttgtccgctgccaggaaatgggggcccgagctgccaaggctgtggagtcgggggccctggagctcagtccctccttccaccagaagaactggcagcactggttttcccatattggggactggtgtgtctcccggcagctgtggtggggccatcagattccagcctacctggttgtagaggaccatgcgcagggagaagaggactgttgggtggttgggcggtcagaggctgaggccagagaggtagcagcggaactgacagggaggccaggggcagagctgaccctggagagggatcctgatgtcctagacacatggttttcttctgccctgttccccttttctgccctgggctggccccaagagaccccagaccttgctcgtttctaccccctgtcacttttggaaacgggcagcgaccttctgctgttctgggtgggccgcatggtcatgttggggacccagctcacagggcagctgcccttcagcaaggtgcttcttcatcccatggttcgggacaggcagggccggaagatgagcaagtccctggggaatgtgctggacccaagagacatcatcagtggggtggagatgcaggtgctgcaggaaaagctgagaagcggaaatttggaccctgcagagctggccattgtggctgcagcacagaaaaaggactttcctcacgggatccctgagtgtgggacagatgccctgagattcacactctgctcccatggagttcaggcgggcgacttgcacctgtcagtctctgaggtccagagctgccgacatttctgcaacaagatctggaatgctcttcgctttatcctcaatgctttaggggagaaatttgtgccacagcctgctgaggagctgtctccctcctccccgatggatgcctggatcctgagccgccttgccctggctgcccaggagtgtgagcggggcttcctcacccgagagctctcgctcgtcactcatgccctgcaccacttctggcttcacaacctctgtgacgtctacctggaggctgtgaagcccgtgctgtggcactcgccccgccccctggggccccctcaggtcctgttctcctgcgctgacctcggcctccgcctcctggccccactgatgcccttcctggctgaagagctctggcagaggctgccccccaggcctggttgcccccctgcccccagcatctcggttgccccctaccccagcgcctgcagcttggagcactggcgccagccagagctggagcggcgcttctcccgggtccaagaggtcgtgcaggtgctaagggctctccgagccacgtaccagctcaccaaagcccggccccgagtgctgctgcagagctcagagcctggggaccagggcctcttcgaggccttcttggagcccctgggcaccctgggctactgtggggctgtgggcctgttacccccaggcgcagcagctccctccggctgggcccaggctccactcagtgacacggctcaagtctacatggagctgcagggcctggtggacccgcagatccagctacctctgttagccgcccgaaggtacaagttgcagaagcagcttgacagcctcacagccaggaccccatcagaaggggaggcagggactcagaggcaacaaaagctttcttccctccagctggaattgtcaaaactggacaaggcagcctctcacctccggcagctgatggatgagcctccagccccagggagcccggagctctaactcatcatccccatcagttttcctccctctcagacctgtctttgaggacaaacagatttgtcagctgtcagggtgcagtgggacgtcagagactatgtggtccatcgccttcattgtgtaaatgaggacacagactggcttggtcgcagtgactgtggtgtccttgagatgctcacattactgcccggcctgcctcccacctggaagtctgggaatgaggagattgagataaacttttgaaatccc

SEQ ID NO: 34108 - DNA, 1729 bp, Homo sapiens
  source 1..1729: mol_type = unassigned DNA
tcacgtgggtcgccgaggctcgcaagtgcgcgtggccgtggcggctggtgtggggttgagtcagttgtgggacccggagctgctgacccagcgggtggcccaccgaaccggtgacacagcggcaggcgttagggctcgggagccgcgagcctggcctcgtcctagagctcggccgagccgtcgccgccgtcgtcccccgcccccagtcagcaaaccgccgccgcgggcgcgcccccgctctgcgctgtctctccgatggcgtccgcctcaggggccatggcgaagcacgagcagatcctggtcctcgatccgcccacagacctcaaattcaaaggccccttcacagatgtagtcactacaaatcttaaattgcgaaatccatcggatagaaaagtgtgtttcaaagtgaagactacagcacctcgccggtactgtgtgaggcccaacagtggaattattgacccagggtcaactgtgactgtttcagtaatgctacagccctttgactatgatccgaatgaaaagagtaaacacaagtttatggtacagacaatttttgctccaccaaacacttcagatatggaagctgtgtggaaagaggcaaaacctgatgaattaatggattccaaattgagatgcgtatttgaaatgcccaatgaaaatgataaattgggtataactccaccagggaatgctccgactgtcacttcaatgagcagcatcaacaacacagttgcaacacctgccagttatcacacgaaggatgaccccaggggactcagtgtgttgaaacaggagaaacagaagaatgatatggaacctagcaaagctgttccactgaatgcatctaagcaagatggacctatgccaaaaccacacagtgtttcacttaatgataccgaaacaaggaaactaatggaagagtgtaaaagacttcagggagaaatgatgaagctatcagaagaaaatcggcacctgagagatgaaggtttaaggctcagaaaggtagcacattcggataaacctggatcaacctcaactgcatccttcagagataatgtcaccagtcctcttccttcacttcttgttgtaattgcagccattttcattggattctttctagggaaattcatcttgtagagtgaagcatgcagagtgctgtttctttttttttttttctcttgaccagaaaaagatttgtttacctaccatttcattggtagtatggcccacggtgaccatttttttgtgtgtacagcgtcatataggctttgcctttaatgatctcttacggttagaaaacacaataaaaacaaactgttcggctactggacaggttgtatattaccagatcatcactagcagatgtcagttgcacattgagtcctttatgaaattcataaataaagaattgttctttctttgtggttttaataagagttcaagaattgttcagagtcttgtaaatgttattttaataatccctttaaattttatctgttgctgttacctcttgaaatatgatttatttagattgctaatcccactcattcaggaaatgccaagaggtattccttggggaaatggtgcctcttacagtgtaaatttttcctcctttacctttgctaatatcatggcagaatttttcttatcccttgtgaggcagttgttgactgagtttttcatccttacaatcctgtcccatggtatttaacataaaaaaaaataa

SEQ ID NO: 34109 - DNA, 6815 bp, Homo sapiens
  source 1..6815: mol_type = unassigned DNA
tcacgtgggtcgccgaggctcgcaagtgcgcgtggccgtggcggctggtgtggggttgagtcagttgtgggacccggagctgctgacccagcgggtggcccaccgaaccggtgacacagcggcaggcgttagggctcgggagccgcgagcctggcctcgtcctagagctcggccgagccgtcgccgccgtcgtcccccgcccccagtcagcaaaccgccgccgcgggcgcgcccccgctctgcgctgtctctccgatggcgtccgcctcaggggccatggcgaagcacgagcagatcctggtcctcgatccgcccacagacctcaaattcaaaggccccttcacagatgtagtcactacaaatcttaaattgcgaaatccatcggatagaaaagtgtgtttcaaagtgaagactacagcacctcgccggtactgtgtgaggcccaacagtggaattattgacccagggtcaactgtgactgtttcagtaatgctacagccctttgactatgatccgaatgaaaagagtaaacacaagtttatggtacagacaatttttgctccaccaaacacttcagatatggaagctgtgtggaaagaggcaaaacctgatgaattaatggattccaaattgagatgcgtatttgaaatgcccaatgaaaatgataaattgaatgatatggaacctagcaaagctgttccactgaatgcatctaagcaagatggacctatgccaaaaccacacagtgtttcacttaatgataccgaaacaaggaaactaatggaagagtgtaaaagacttcagggagaaatgatgaagctatcagaagaaaatcggcacctgagagatgaaggtttaaggctcagaaaggtagcacattcggataaacctggatcaacctcaactgcatccttcagagataatgtcaccagtcctcttccttcacttcttgttgtaattgcagccattttcattggattctttctagggaaattcatcttgtagagtgaagcatgcagagtgctgtttctttttttttttttctcttgaccagaaaaagatttgtttacctaccatttcattggtagtatggcccacggtgaccatttttttgtgtgtacagcgtcatataggctttgcctttaatgatctcttacggttagaaaacacaataaaaacaaactgttcggctactggacaggttgtatattaccagatcatcactagcagatgtcagttgcacattgagtcctttatgaaattcataaataaagaattgttctttctttgtggttttaataagagttcaagaattgttcagagtcttgtaaatgttattttaataatccctttaaattttatctgttgctgttacctcttgaaatatgatttatttagattgctaatcccactcattcaggaaatgccaagaggtattccttggggaaatggtgcctcttacagtgtaaatttttcctcctttacctttgctaatatcatggcagaatttttcttatcccttgtgaggcagttgttgactgagtttttcatccttacaatcctgtcccatggtatttaacataaaaaaaaataaaactgttaacagattcttgctcgatagcttgtttgtgtctgtcgtgttattagagggaactccactatatatggtcacttgaaattatgatgcaaaggtttctcttgcattgaaaccctcttggatattacagtatttttaattgaaagtcctaattctgttaaggaaaggagttgattaaattttaaggtaccactggtattttgggagattataatcagtttgttttcaagataatagaaaataaggtccatgagaatagaagttatgtgatttcagtgagttgatgtgtacagcatggctgtgctccatctgatttaccccattcttaagttctgagagtatgttctcaaggaagatttaactctctttggttttaaattactttttaaccagcctaataaataagtcttactacttttcataatatttcataatagttaaaagtaggtgtttttttcgtgctcaatttggcactcaaaataatgttcattatggaagtttggtaatactgagcaagcctgtggaattttctttatgaaaaatgattttagcctttgcaaatgttaaccatgtgaaacacattttcagtataagtatgcgttacagggtttgatactttcctgcacttaggtttgtcctattcttcatttattcatactaggatagaaaattttggaatcagaaaatagatccagtgtttagctacatacaatctagtacaagtgaatttttattcttaaacataggtgtgttggctctttttttaaaagatgcgctctacctgaaaaggaaattggattttagaactggatgtggtgcagtgaagtattttaggcccaggtctgtgtacacattttatagaagaatgaagtactctgaagtattttggttgccttttcatttcaactgtgttttgaatttgtcagatcacacatatattgtgttattgggcgctgtggtatcttttataaaacctcttgcttgtgtgcaaaagttcctaaaaggaaacacaagtaatgcctatccattactagcatgctatgctgcatgctttactgccattgctgtatgctttactgtctttgtaaaaatccccctctccccttttctggtaactggaaaagcatgctaaaaatagtcttatattttcaccccataaatgcagaatcagtaattccttggcttaaagctcttatataatcaatattattggtggtaaataccaagtttggtatctcatagctatctttttttaaagaaattaagttcttgaaaatttagccaaatcccgttttatgggaatgctctttagaattcattttgttcagcccctttgttctatggttgagaaatctgaggccttacgaaggttaagagaactttccccgtgtctcacaggtaggtagaggcagagctggaactagatatctggtctgttgactctagctcagtgtcttctggtaactgttgaaaattgtcttagtttgagagatggctgaaataatgaacataaaatgctatttataataacaagtatatgtgaaatttcttattgtaagactactaccggcttactgttgaatagtttggttatagtgtttaggctagaaatgcctcccacattggtaataaacattacaaaatacaatgtatttttaggtaggcattttataaaatgcattatgccatggttgcttttgagatagattgtagtctgggtagcatctttaaaatgtatgtgggcttaactgttgttcatatcaggagatgctctgattgtataggtgagactctgtttctgttatttttaattgctgtatgaaatgtgatcagattattttactaccaacagttatagtttgaaagtccaactgtattaattgactgataatatgataatatagagattaaattgtttgtcttcattccttatatgtttagaagtttttgctttgtctgcctgcttacttgtatatgtaagcatgagggaaatacactgttgctaatactgaaattacaatcaagtaactaaggccttgagttcatatgtgacactgaatgcactagcttccttcgttctataactaatgtaccttaacttcccccattcttatatttacaagaagctaagtcattatgttctgagtgtgtggtatgttcccttaaaaaaaaatgacacttggaagaaaaatgtatgaaattcagaaattccgatcaaagaaaagtaattctttctttttttttttgagacagagtcttgctttgttgcccaggctggagggcagtggtgtgatctcacctcactgcagcttccgcctcctgggttcaagtgattctcatggctcagccgcctgagtagctgggattacaggtgtgagccaacaagcccggctaatttttgtatttttagtagagacaaggtttcaccatgttggtcaggctgggctcaaactcctgaatccgcctgcctcggcctcccaaagtgctgggattacaggtgtgagctgccgcacccagccaagaaaaataatactcttaaatacttagatgttcacctaaagttgatattatttggtatgggaattacttttgaactgtaatctttcagattacaccactttgaaaacaagttttaacagtagggtaaaaatatagtttttgagggtattcccaacttgtgatcttctaccactttagagacattcaagtaatagttttcttagagctttgcacattcctattcactgagattttaaaaatttcacctttattcgagggaaggatcaatgcttattaccatttggaaaaacgaagatcagaaggtaaatgatctttattttctagctttaaagggaaattaaaccattcatgaataaactttaaaaatgtgaagtgtccttttccttttcacaatacaaaaaaaatttcaacagattgtgtggtttgtgcatttatatcctgttaagcattaatagctaatcactgggacttgaattctgatggcagatagtctcttgcttagtgagatggagttaactattttttagtaggaagtgagaacagctgattttcatgccacgtttcatagccccacttttggtagactaccaccacgcttcttcgcgtaagcagtggcatcttgggaatgaatgcccagccgctcgtgggttggtgcaaagaagtataaacatatatcactaaggaaaaagaaagtttgtcttgcccttctgacacagtgtgtgcacttcaggcaatttttggaaaatataaaaaattccaaattctgcctttcagcagcatcaattgctaggaacatttcattcatttccctgtaatattaatgttctttaagcataatcactaattataagttgtatcctatttttttccagcttaatttctgtggtttattgaaaaccaagtataaatgtgactaaaagcattttgctttgtttttatagttaactttcttaaggttatggacattttataatgtaacatttgattggcctggcctcttgacaattcccttctagttatgcatatcctcctgttgccacatttcttgttttaaaactcagtttcttgttttccagttgttgctatgtataacacccatcttgaaagagagtatataggaagttattcagataacttttgtagtagtgatattcaactatagcagtaccttaactcatgatgagcttaggaacataaaagataattgttgcttgaatagcacccccagagatactgacctaattggtctggggtggagatctggcatggtagtttttttcaagctccaatcatcggccagacagttgctttatgtaggtttttaaatgccaaaggcagatatgaagtagatttaattaagacttgacttcagcaatacaggggaacttaaaatacttatttttctttaaactgcaggagtcactgttaggtattgcttaaaaaaaattgcataaaagctttgcttgtcaagttaggattgctggaataccactaaagatttttgacttgtgaataaatgagctgtcatcgcaaaaaggcgatttgagaaatgtgggcttcagtattaattgccattttgctgacacccagtgtacctacctacctgagaaatttattttgtccatcatgtatttctcaaagcaaaaggtggttttcaagtataatgtcgttttcaacatgcttattacttagttttacgtcagctcatttcatcatcattgataacttgtgaaatacttatctccatcctatggaataggggagacgggtttagacaggttcaattagctcaagtctacacagctgaagtagcagagaaagtgggatctagatggtctgatcctagtgatctaccatatgaaggacatagtttgtgtcctggtccaagtcaaatattgactcctcacaaacagtaagtatggcaattttgtgatgcctttgattccactttacatggagtactattatttgtgaaatgtctttaagatttttggtcttaaatttttgaagactgctttccccctttatctcccagaaaattgagaagaagtaaactcctgcccactaacaatctcagtccgtgaacaaaaccaacatgaacattcctaaacaagagtgtgtgttactctaagaagaaggctatagaatttatggaaatggcttatgtaacctacaagactggagaacagaatgtgactggccttttctaatggtcctttaagatttaatgattaaagcaagagttttttataattgactttgtggtctaaattcttgatactgtttataattctacaaagaacaaaaattgttatgtactataggcacttaagaaccctgaggaaaaataatacaatgtgtgtgtgtgagagagagagtgagttactgacattgttccaaaaaaaaaaaaaaaaaaaaaaaaaatgtggagggttgaaatggtaaggaattggaatcttttgtattttcgagcaataagaattcctattcttgtttcaaatagaggtttgttaggaattacagttgtggggagcaaactttcttttttgtgctgttttaattcaaaatgtatatccttaattgtatataatatgtagataaatatatgagggtattaagctactttgaattaaatttaaggatatatttcacatgaaaacaaatacaaacgagaatcaaaataaagttttgcaaagta

SEQ ID NO: 34110 - DNA, 1834 bp, Homo sapiens
  source 1..1834: mol_type = unassigned DNA
gcgcgcccacccggtagaggacccccgcccgtgccccgaccggtccccgcctttttgtaaaacttaaagcgggcgcagcattaacgcttcccgccccggtgacctctcaggggtctccccgccaaaggtgctccgccgctaaggaacatggcgaaggtggagcaggtcctgagcctcgagccgcagcacgagctcaaattccgaggtcccttcaccgatgttgtcaccaccaacctaaagcttggcaacccgacagaccgaaatgtgtgttttaaggtgaagactacagcaccacgtaggtactgtgtgaggcccaacagcggaatcatcgatgcaggggcctcaattaatgtatctggaagaagatggactgcggatgaggaagacagtgcagagcaacagccccatttcagcattagccccaactgggaaggaagaaggccttagcacccggctcttggctctggtggttttgttctttatcgttggtgtaattattgggaagattgccttgtagaggtagcatgcacaggatggtaaattggattggtggatccaccatatcatgggatttaaatttatcataaccatgtgtaaaaagaaattaatgtatgatgacatctcacaggtcttgcctttaaattacccctccctgcacacacatacacagatacacacacacaaatataatgtaacgatcttttagaaagttaaaaatgtatagtaactgattgagggggaaaagaatgatctttattaatgacaagggaaaccatgagtaatgccacaatggcatattgtaaatgtcattttaaacattggtaggccttggtacatgatgctggattacctctcttaaaatgacacccttcctcgcctgttggtgctggcccttggggagctggagcccagcatgctggggagtgcggtcagctccacacagtagtccccacgtggcccactcccggcccaggctgctttccgtgtcttcagttctgtccaagccatcagctccttgggactgatgaacagagtcagaagcccaaaggaattgcactgtggcagcatcagacgtactcgtcataagtgagaggcgtgtgttgactgattgacccagcgctttggaaataaatggcagtgctttgttcacttaaagggaccaagctaaatttgtattggttcatgtagtgaagtcaaactgttattcagagatgtttaatgcatatttaacttatttaatgtatttcatctcatgttttcttattgtcacaagagtacagttaatgctgcgtgctgctgaactctgttgggtgaactggtattgctgctggagggctgtgggctcctctgtctctggagagtctggtcatgtggaggtggggtttattgggatgctggagaagagctgccaggaagtgttttttctgggtcagtaaataacaactgtcatagggagggaaattctcagtagtgacagtcaactctaggttaccttttttaatgaagagtagtcagtcttctagattgttcttataccacctctcaaccattactcacacttccagcgcccaggtccaagtctgagcctgacctccccttggggacctagcctggagtcaggacaaatggatcgggctgcagagggttagaagcgagggcaccagcagttgtgggtggggagcaagggaagagagaaactcttcagcgaatccttctagtactagttgagagtttgactgtgaattaattttatgccataaaagaccaacccagttctgtttgactatgtagcatcttgaaaagaaaaattataataaagccccaaaattaagaa

SEQ ID NO: 34111 - DNA, 7936 bp, Homo sapiens
  source 1..7936: mol_type = unassigned DNA
ccccgcccctggagccggcggcgcagggcgcagcttcccgccgccagagcgggccagcctgctgcgtgcgtgcgtgtgtacgactctgcgtgcgtgcgtgcgtgcgtgcgtgccgtcagctcgccgggcaccgcggcctcgccctcgccctccgcccctgcgcctgcaccgcgtagaccgacccccccccagcgcgcccacccggtagaggacccccgcccgtgccccgaccggtccccgcctttttgtaaaacttaaagcgggcgcagcattaacgcttcccgccccggtgacctctcaggggtctccccgccaaaggtgctccgccgctaaggaacatggcgaaggtggagcaggtcctgagcctcgagccgcagcacgagctcaaattccgaggtcccttcaccgatgttgtcaccaccaacctaaagcttggcaacccgacagaccgaaatgtgtgttttaaggtgaagactacagcaccacgtaggtactgtgtgaggcccaacagcggaatcatcgatgcaggggcctcaattaatgtatctgtgatgttacagcctttcgattatgatcccaatgagaaaagtaaacacaagtttatggttcagtctatgtttgctccaactgacacttcagatatggaagcagtatggaaggaggcaaaaccggaagaccttatggattcaaaacttagatgtgtgtttgaattgccagcagagaatgataaaccacatgatgtagaaataaataaaattatatccacaactgcatcaaagacagaaacaccaatagtgtctaagtctctgagttcttctttggatgacaccgaagttaagaaggttatggaagaatgtaagaggctgcaaggtgaagttcagaggctacgggaggagaacaagcagttcaaggaagaagatggactgcggatgaggaagacagtgcagagcaacagccccatttcagcattagccccaactgggaaggaagaaggccttagcacccggctcttggctctggtggttttgttctttatcgttggtgtaattattgggaagattgccttgtagaggtagcatgcacaggatggtaaattggattggtggatccaccatatcatgggatttaaatttatcataaccatgtgtaaaaagaaattaatgtatgatgacatctcacaggtcttgcctttaaattacccctccctgcacacacatacacagatacacacacacaaatataatgtaacgatcttttagaaagttaaaaatgtatagtaactgattgagggggaaaagaatgatctttattaatgacaagggaaaccatgagtaatgccacaatggcatattgtaaatgtcattttaaacattggtaggccttggtacatgatgctggattacctctcttaaaatgacacccttcctcgcctgttggtgctggcccttggggagctggagcccagcatgctggggagtgcggtcagctccacacagtagtccccacgtggcccactcccggcccaggctgctttccgtgtcttcagttctgtccaagccatcagctccttgggactgatgaacagagtcagaagcccaaaggaattgcactgtggcagcatcagacgtactcgtcataagtgagaggcgtgtgttgactgattgacccagcgctttggaaataaatggcagtgctttgttcacttaaagggaccaagctaaatttgtattggttcatgtagtgaagtcaaactgttattcagagatgtttaatgcatatttaacttatttaatgtatttcatctcatgttttcttattgtcacaagagtacagttaatgctgcgtgctgctgaactctgttgggtgaactggtattgctgctggagggctgtgggctcctctgtctctggagagtctggtcatgtggaggtggggtttattgggatgctggagaagagctgccaggaagtgttttttctgggtcagtaaataacaactgtcatagggagggaaattctcagtagtgacagtcaactctaggttaccttttttaatgaagagtagtcagtcttctagattgttcttataccacctctcaaccattactcacacttccagcgcccaggtccaagtctgagcctgacctccccttggggacctagcctggagtcaggacaaatggatcgggctgcagagggttagaagcgagggcaccagcagttgtgggtggggagcaagggaagagagaaactcttcagcgaatccttctagtactagttgagagtttgactgtgaattaattttatgccataaaagaccaacccagttctgtttgactatgtagcatcttgaaaagaaaaattataataaagccccaaaattaagaattcttttgtcattttgtcacatttgctctatggggggaattattattttatcatttttattattttgccattggaaggttaactttaaaatgagccctatcactgagaaatacgtgtttcatgatttaactctgtgtgtgtgtgtgtgtgtgtgtgtgtgtgtgtgtgtattttttttttggttgtcttcagctgacagtatgaaaaatgaaactgctgaaaaagctgagcacctggtcacccttggccttccattgctttggccttcagtaaaaagcagcctcccttctaggtcagggaaccatgccattgagactagtaacgggcgttctgggcacagtcccactgtgcacaggtttgagaggacaagttcatcagaaggaaggcagtccttagaagtcacatacgttgagccacgttgctcctaagcctggctctgtcaagctgggtcaggggccttgaaactggagaagtggaagtctatggttggtctgagtaagtaacttcctgtcttcatgaaaaaagttgactttgaatcccaggtactcacagaaatggtgaacagacttagttgttacccaggcacccatggattgtgttgagtgtgcagacagggaggccaccccaataggaattcgtctccaggatttttcccatgtgtcccccagtacttataaaagggagtgaaaagaccgagctgtaaggcatgtgccttctgccacctgactttccgtgaggggactaaaatttactaattgtagttgctgcagccagttaagtcctgtagcttccaggccctcatgtctttgataggagagtgcttaggtggtccccaacagtgcctaggggtacagtacagtcccattacactagagcagggctctatttatttttaaaggatatggccgtgtgttttgataaaactttattcacaaaaacagccgggtcatgggatttggcttgtgagtctgtaacagttcttaaaaagaatatctgagaaactactctgttttagacctttgaaggtgatttagagttttgtgtacatctaggagaaggtgttcagcttctcagaggatgtggacattttggttgcagctaaaaatcagtctctgaagtctctctcccttctagaggttaggacttggtgaacatgtttgtgggccttttgactgagtggcagaaggaaactgctcaggaagagaaacaggtgactgatgggaaggttgattattttctcagtcatcctggcagccaaaaatgtgccaggaaaagaaagaatgtggagcacgcgtggctcctggaggacttggagatgcatgcacatttagggtgttttccctagaattacataatgaaaaaaagaataaggcaaagaggaggtgaatatggggcctgtcacaacggcctgccctgccccaagagggttaagagtcagataatcgggacgaaactggcatggaaagagcgagcctagggaggatgccgctgggcagtgtgcatgggggagctgctgccaggctgccctccagtctgctcctgtggttactggctccacagcacctcagagagggcggccctggcttcagaaatgccagccatagtgctcacaaatgcagaagagatggaagcggtgacagaatcctgaaagtttttattgattgaagttttaaattggtaacttaagcttccttggcacgatacaaaatacctcttaaagacagcaggcttttttatttgtaggtgtgaggaactggctttaacttttttctcctcctagtttgcatgttttccttctctcgtcttctgaactgctggcaccagcagtaatacatactgataaaatcaaaattgatttttaccagtggccagtttatggctagagagacgacttatacctccataacacagaagggggaaaaatgaagaacctccagtgatccgtgaaaacctaaacgctttcaaacaaatcccaggaacagaattgctatcgaaagatatcattgcccagtttgcaggctatgttgagtcagatagaactgaatgtagtgagagctcagagctacagagcctttcagatgaatttgaaaacagactctgtgtgtgtgtgcatgtgtgcatgtgtgcatgtgtggcatatgtgccgtatgtcagtagcttgacagttttcaaatcgtgcctatatttttttgcatacacaaatttttgtgtttgcaaactcagaatccatgccaaaatacaatgttatatgtcattttcagctccttctctaaaggaatggcccatttctcattgtagtttgagaaatacatgtatgaagagataggggtcttgggcttcccagtgtcactttgaacacctgaataacatttaactcctgagaccttctcggtgtagaggccactgcttccccctgctggagatggcatttcattgaagggcctctcgtggctttccctgcccccggctgtctggcctgaagaaggagaaagaaccaaactgaactatgaaaagttaccactctgaggagacctctcttaattaacacttggggccatgtttgctgttgttgagaaggagtgttctcaaagatgagctggaatggaattgtatttagaaaggcccctgcaaagtatatagatggatgactctagttcatgacatacaaatcccataaggccaacgaccactcttctggaacaccaagagcagctctgagatcatgctggccctacgcgaattgagtttctgtggcctaattggatttggagaacgccttccctggccccttttcctcagacagatctgctctgataggaaccttttcaagaaagttactgttgtttcaatgccactccttacctgtatagaacatttccaatacattcgctcattgaacttaatccttgcaactgtgactggggggtagatggctctgtttgcatacgaagaaataaaggctccaggaggttaaatcgggcaactttttagaactaaatcagtctctgtaaggcctacattgctaagataccatttcagctctgaaaatctgcttcagggaagtgagtggatgaggccttcctgcctcagctactctgcccgtctgtacatcttttgtgtctgcctccgtaccttattcagttattttcacactaaagtaagtagaattaagactgtagttcagatgctttttctttttctgttggaaactgaacacactacagacagtgaaaaaaggtacatattccattttctcattgcctgaagatctctgctgatgctcctggagaatgactttgggggctttagaaagaatattgccagtccgtctcggcaaggagatgatgggagcgctttatatggaggctttacatgacttgtaaattaaatgtgaatgagggcagttgattaaaattggtattacagaagggccctgctgaggtttgaaaacagctgagctgctgatgtctcaggcctttccctgaattagcactgcggttctccaggatatcagcaaagagggcaagtaatagaagcccctgataaggagcgtcagccgacaggcaagcttgggaggctgtgggaatgggtctgcccccagcttcacagacctcttcctccagcctctgaatcccattagccacagcctagaacattagctgagctgcacaagctcacccacccctgtgccagggggccctgacctccctccatgccatgtttttggctgtatctacggcacttaacaataggggctttttattttcattacagagatattttgaaaaatttaaaagacatgaactcacataaacagttatggatgatagttaaaagagaaacgggtggaggtggatgagaggttgtcttcatgaatataattacttgagatttttttttcttaatggaattagtttattagaaaatgtctgtgttaaatccgtagaaaaggaagaaaagtgtagcaacaaaaatgtagccattatctaacttgccataaatatttgcagttatgataccttggaatgttgccacgatatggattgctttgattaaaagatgtcagttgaataaaacagtactgtgggagaatcgctttctgctgctagataaatgctgatgtttatttttaaaccaggaaacattgatcctgtaacaatgcccgattacaattgctttattacaccccagggctgatggagatgtaatcacttggctaatggatgtgggtgcaggacagatgctcgcttgctggcctgctttcctgcttgcattctgatgagctgcaggagtgcgcctggccttctgcaggtggagctgctgtcagagcttcgtttcactgatacccaaagccatgtctgactgaaataaaacaggttccctttttttttccctttggaaaatgccaactaagggagactaatcagatatcttaacacaatttcatccaggcttagtgctaacaagattgcggggctttttagggtttaagaagatgagaaatgagtgtgcacgtttcacacgttgacttgccggtttttccatgtcatacaaaaaagtcctggctgtttctccgaactggctgcctgcattcccgtctttcttttgtttttaagaaatagactgaattcagctgttaatcctctagtacagtatccatgttaaaatgtttttccattgcatcttttatgtgaattcaaaggtcagaatttattgtctgtgatattgagaccatgtgtacaagaactactttttgcttttcatcattcactccttagcaaacgtttcgtaagtaccctctgtctgtttgctactatatgaggtgctgcgaaattagtgggcgtggctttttatatttttcattcgtgtgtagcctaagtaaggtgactcaagatgatacaccgagagaaaaatgcaaaatatatttggttctcatttctgttgctgtcgtttcctttttaaagacgatttatcaactgctgccatttggaacttcctataagaaactaaaaatgatctatttcagtgttcctttcgcctttcctctgctttctgaataaatggtttcagtaacccatgctgttctctccctattctacgtctttctccctatgttgaaaaaagattcccacagtttctgatgtgtgtgtttatagtcttcaatgtatgttaacatgttaggaactgagtatcttaagagatgtcttagaatgctttagttttcataatttgtcctttatgtatttttcattgtatttgctgttttgacatggaagtaatttaaaaagttggtgcaggaaaggactctttactgttgcacattttggttttctgatatgtaataaattcatggcttggcagctgacatgatgtttcccagagagaaggagatgtatttctgcagggtccagaccaaaagagccatttacagcatgttctcccatgttccattatcagcctgatgaaacctgccctgccaaggcataaacttttgtactagctgtctccatattatgttcaataaattctgtgctctgaatatatttaaa

SEQ ID NO: 34112 - DNA, 2265 bp, Homo sapiens
  source 1..2265: mol_type = unassigned DNA
ctcgctcacaaaaaattgagccggccctggaggcctggggggcgagtccggttgcgcctcggagagcgcaacaggcagaatttgttcctgttgaagagtggctcctcttctaatttccagactccttgaggttttaggagtctggtaggtgaaattttctacctctaaggagaaacagtacctgctccttcctcaagcgcaagccctccattgctatggataccgaatccacttattctggatattcttactattcaagtcattcgaaaaaatctcacagacaaggggaaagaactagagagagacacaagtcaccccggaataaagacggcagagggtcagaaaagtctgtcaccattcaacctcccactggagagcccctgttgggaaatgattctactcggacagaggaagttcaggatgacaactggggagagaccaccacggccatcacaggcacctcggagcacagcatatcccaagaggacattgccaggatcagcaaggacatggaggacagcgtggggctggattgcaaacgctacctgggcctcaccgtcgcctcttttcttggacttctagttttcctcacccctattgccttcatccttttacctccgatcctgtggagggatgagctggagccttgtggcacaatttgtgaggggctctttatctccatggcattcaaactcctcattctgctcatagggacctgggcactttttttccgcaagcggagagctgacatgccacgggtgtttgtgtttcgtgcccttttgttggtcctcatctttctctttgtggtttcctattggcttttttacggggtccgcattttggactctcgggaccggaattaccagggcattgtgcaatatgcagtctcccttgtggatgccctcctcttcatccattacctggccatcgtcctgctggagctcaggcagctgcagcccatgttcacgctgcaggtggtccgctccaccgatggcgagtcccgcttctacagcctgggacacctgagtatccagcgagcagcattggtggtcctagaaaattactacaaagatttcaccatctataacccaaacctcctaacagcctccaaattccgagcagccaagcatatggccgggctgaaagtctacaatgtagatggccccagtaacaatgccactggccagtcccgggccatgattgctgcagctgctcggcgcagggactcaagccacaacgagttgtattatgaagaggccgaacatgaacggcgagtaaagaagcggaaagcaaggctggtggttgcagtggaagaggccttcatccacattcagcgtctccaggctgaggagcagcagaaagccccaggggaggtgatggaccctagggaggccgcccaggccattttcccctccatggccagggctctccagaagtacctgcgcatcacccggcagcagaactaccacagcatggagagcatcctgcagcacctggccttctgcatcaccaacggcatgacccccaaggccttcctagaacggtacctcagtgcgggccccaccctgcaatatgacaaggaccgctggctctctacacagtggaggcttgtcagtgatgaggctgtgactaatggattacgggatggaattgtgttcgtccttaagtgcttggacttcagcctcgtagtcaatgtgaagaaaattccattcatcatactctctgaagagttcatagaccccaaatctcacaaatttgtccttcgcttacagtctgagacatccgtttaaaagttctatatttgtggctttattaaaaaaaaaagaaaaatatatagagagatatatatctatgccagaggggtgtcttttttaaaaattcttcttcattgctgactgaaactggcagatgattgaccagtatcctttgaccatctgcactttatttggaaggaagcaggggctgtccaccctgaaaaagagtgactgatgacatctgacttttgtcgatgggacttctcaagaagccattccttggagcttctgttacagctgtaaaccaaagtggagctggtgcttcttgggagcctcgccttacaactaattcctgcctttcgtccagtaccaagtcccccgttgcttctggtcagcccacttgtagacttccaggggacacatctttattctgtttcaggaaaccagtcacgacacgtccacatatgtatttgtgtatgttaatgtccagtatcacatcacccatgaaagt

SEQ ID NO: 34113 - DNA, 8691 bp, Homo sapiens
  source 1..8691: mol_type = unassigned DNA
aggaagcggaaagcagcagtgcagcggcggcggcggcggggctctgcctctccaggagcccagcgcaggccgcagagccggggccgctgtgagccgagaccgcgggccgcggagctcgggcggccggcgcggagaatttgttcctgttgaagagtggctcctcttctaatttccagactccttgaggttttaggagtctggtaggtgaaattttctacctctaaggagaaacagtacctgctccttcctcaagcgcaagccctccattgctatggataccgaatccacttattctggatattcttactattcaagtcattcgaaaaaatctcacagacaaggggaaagaactagagagagacacaagtcaccccggaataaagacggcagagggtcagaaaagtctgtcaccattcaacctcccactggagagcccctgttgggaaatgattctactcggacagaggaagttcaggatgacaactggggagagaccaccacggccatcacaggcacctcggagcacagcatatcccaagaggacattgccaggatcagcaaggacatggaggacagcgtggggctggattgcaaacgctacctgggcctcaccgtcgcctcttttcttggacttctagttttcctcacccctattgccttcatccttttacctccgatcctgtggagggatgagctggagccttgtggcacaatttgtgaggggctctttatctccatggcattcaaactcctcattctgctcatagggacctgggcactttttttccgcaagcggagagctgacatgccacgggtgtttgtgtttcgtgcccttttgttggtcctcatctttctctttgtggtttcctattggcttttttacggggtccgcattttggactctcgggaccggaattaccagggcattgtgcaatatgcagtctcccttgtggatgccctcctcttcatccattacctggccatcgtcctgctggagctcaggcagctgcagcccatgttcacgctgcaggtggtccgctccaccgatggcgagtcccgcttctacagcctgggacacctgagtatccagcgagcagcattggtggtcctagaaaattactacaaagatttcaccatctataacccaaacctcctaacagcctccaaattccgagcagccaagcatatggccgggctgaaagtctacaatgtagatggccccagtaacaatgccactggccagtcccgggccatgattgctgcagctgctcggcgcagggactcaagccacaacgagttgtattatgaagaggccgaacatgaacggcgagtaaagaagcggaaagcaaggctggtggttgcagtggaagaggccttcatccacattcagcgtctccaggctgaggagcagcagaaagccccaggggaggtgatggaccctagggaggccgcccaggccattttcccctccatggccagggctctccagaagtacctgcgcatcacccggcagcagaactaccacagcatggagagcatcctgcagcacctggccttctgcatcaccaacggcatgacccccaaggccttcctagaacggtacctcagtgcgggccccaccctgcaatatgacaaggaccgctggctctctacacagtggaggcttgtcagtgatgaggctgtgactaatggattacgggatggaattgtgttcgtccttaagtgcttggacttcagcctcgtagtcaatgtgaagaaaattccattcatcatactctctgaagagttcatagaccccaaatctcacaaatttgtccttcgcttacagtctgagacatccgtttaaaagttctatatttgtggctttattaaaaaaaaaagaaaaatatatagagagatatatatctatgccagaggggtgtcttttttaaaaattcttcttcattgctgactgaaactggcagatgattgaccagtatcctttgaccatctgcactttatttggaaggaagcaggggctgtccaccctgaaaaagagtgactgatgacatctgacttttgtcgatgggacttctcaagaagccattccttggagcttctgttacagctgtaaaccaaagtggagctggtgcttcttgggagcctcgccttacaactaattcctgcctttcgtccagtaccaagtcccccgttgcttctggtcagcccacttgtagacttccaggggacacatctttattctgtttcaggaaaccagtcacgacacgtccacatatgtatttgtgtatgttaatgtccagtatcacatcacccatgaaagtcgtgggcagttcaggagatacctgccttcatctttgttctttgttgccttaggttcttcagagaaagatcacaacaaaaaatgtacactgtcgtttacagctattaagtgatttgattttgtttttttcccaaagagaaaacctacctgccctgtttctgatcccacccctctgctggcttgaagcaggtaaccctttcccagccctgcagctgcccacctggcctccatgccatcctgcccccacctggctggcagccctggctctccatgtgtgccctccggctctgtgtgaagcctcaagtcagtcccagcattgtttccatagggaagtgtggggtgcccagcaggtaaagcacagggagagagggcagtgggaatgccacctttaggctgcagcaggagccccacactgcccagttttcctccccactgttctacaccaaccaggggagactaacactgtgactctgggattggcaggtgcaacttggagccacttaatttcctggggacgtaagttcttcccaagcttagagcaagctgccctgccaaaggagaccaaaccatgccaaccacgctggcaactgctgctgtccagtccctgtgttttctgaccaccgtcactgtgcaactcatcgcctctgccacttaggaccaggaaagaggctggttttgctcccactcttagttgctgataaagtggggagaaggaaaatggacactctacagagtttggggaagggagagtagggagcccatcttgtccagaaagattcatctgtggtctgtctgttaaacacagctgatttcagtgggctttcccctggccctgggggagcagacactgactgggttgtgggcagaggagccatcctggcggagccctgctgcaggggagctccttcaggagccccatccggacctcttgcactgggctgcctttgcctccatttgccttcctgtatctgcaacaaaccttttaaaagtgttcactcttgctttttccagtatttcggtaatcagccatcttgctgtagtacaggatgacattgtcgaatgctctttgtatgtgtgcacacccccttactcccttactgcttcatacactccacaagtggtacagtattttgtgtcattgtaaaaatcaaaattggctttggatctttgtaatacacctgtacctgaaaaagtaaacaacattcttcaattactagccttcagcttgaaaagacatgctggagaagaaggaagggggaacccataggtgtggcgtggagccaagatgtactattcaactatgtgtttctgtttataaaaaacacataccatggaaccatggtgcttttgttcttagtttttgccgttagatcccttcaaactggaagttccttacaatatctttctcaggaaatattttgggaaatggggtaagagatggcaagtgtgagacgggctgtgtcagaggttgctacgtcatggatacagtgcagttccaagtgccataagtgtatgtacatatagttaataatgacactgttcatcaccattctaaaatactgttcttccaaccctatcttcaatgaccagtccagaaggggttaagctggattcatttgctctggcatgtgcattcccagcagggtgaagaaaggtttaaattaaagaatttattttctctctcccccttcctctttctcccagtctttgcataggagaatgttagacattcagaaattactgtttctgttttaaattgagtattgatttttttatattgactttgtattgagttctttttgaaagaataacaaaataaaatgcaggatctttgtaaagcctttgcactttcaacctctttatagcttgagttacttttgcagtgggaacaatgtaaatgacatttaaaagatttaaggtttcagaaagctgcatcccacaattgaacacaatgcatttttatttcaattcttggaactggtaggctattctttttaaaagggggtaaacttcgccctaaggctggtagaatgtatgttcacattatagtagacaggatttcatttgccttatatgtttatagattttttataattttcatcctacgttattaaaattagagcattgagtgttaaagaacttaatgaggagtctatatctgagattgctctcttccctggtgatgttttaactggtagataatttgttcttaaatatgtacttttgaagataggacagtttttatagtccatgaactgaatgttaaaaagttctgtatgcattctcagagaggattttaaagctatatagttcatccatcctttgcattatcaaaatgttaagtcaaatctgtaatactttggctaaaattcataaagtaagccctagagaaaatacttgaccaccaaatttttgcccaactatcatcacctcccttcccccgcctctgttcttgccttttgacatctacatggaagacaagttctttacagcaaatggtaagaggcaggtgacctggtgtgtttgctgtgttgtagttcattgcctggggcttgggactccttttttaatggagagactagctgtgcaggtgtgtgttggatagggataaagtgctcacccctgccctctctacagtagttggtggtagatttctctctcattttgcctcataatcactttcgagtgcatgtatttacctaagggctgtagctctgtgggatgctaccagcatattggactgacagaaattgattaccttgccactccaacctacgtactgagtgagtgctccagccactcagtgaaaccaacaaaagtgagtccttggtttaccttccaatctgggtcctgctgtgtaagtatccctaagtggggatgcatatttgtttgtgcgtttttatttccatatatgtgagcatttctctgagtgtattaccagacggatagcacatttatatgtcagacatcttaacatctgtgttatctgtagcaggtgtgtagctcagcagatacgtgtcattgtgtatatagctgagtgtgtgagggtgtctgtgtttctgcagtcccctgtgtttgagagatgacttaataaccctgtgttttgagaggtcgctctaaaccagtgacttttccctcccctgctttattcctttccctcactgacactggcttctcccgctagagtaaatggctttagcacagcactgtcttctggggagcctgctgtcctgcaggcaagtccattaaactctttcttgctttaggactctgaaaacagcaagaaacaaacaaacaaaggtcaagctctaagaaaattactgctcaaacttcactaccctggaagccttactagatatttcttaaggtaacttaaaaattgggctttatttttaaaaagtgataggttacttacagtagcacagaaatgttagcatatttatttaaatagtcctgcagcagagaccctgcgattgtaaagtgatttaagtatttctgggtagtgtttgtgatttacggatttgttactgaaaaacaaaaaaatcactactgtgaatttactactatgtaaccttgtggtcgtatttcattataaataaaataagaattgctcttctgcccaccgttcttgattggtattcagtgcagtagcgaaatgagatagtttagacactgttgaaataactgcattgagctttaaccaagtgtatgctcagaaaattcagttttggatcacattttgacaaaacatgttttggtcaaagaaaggaaaggctactaacacatttatcaggtaatgtatgtcacagtccgtgttccacccagccttgttatccccacattctttcaagataggagtcatcttggtttttcgggtgaaaaacggaaggtcagagaggaaggggcttgtccaaggtctcatgtctggttaacagaatttcaaactagatgtttgattctaacccctcagtccactgtaccttgaagtatggtctaaatgattcggcacttctggatgttgaggaaggacctagagacacatccttgaactagaacctggggtgagagttcattgggaggcaggatctcttctttcactttggatttacaccttgtcccttggaaagcttctccactatgctagcaaatatcttaggatatttgatggaaagaacttgagaatcccttctggaaaacccagcctttcagtgttaacacctgctgcaagacagggatgctgttgttctggcagcccccctttgcttttgcctggccccaccttctgctcccactctgctggcttgggcaagatgcgtgccttgggccttgggtgcagggaggcaggcaggggcttgacctggcctctctctggtgccatggcaacattatgccccaaacttcttccctggttggagtgagaggggctgtccacagccccatcctgtggggatctcaagccggagtccctggcctggcctccttgacgtaggtgttctcagcaagcagtttgcatcccaccgtctttctcacacttgcccccaagacttttgacagagcagacgtaaaacaggactcagaaaaccatttttctctgttcccatatgtagtaagttttgattcagttgtgcataaaccatagttttctgccctgctgtttgctttcaatggaagacagtaaagggaagatggtgctcacatctctccatgtgacatctcattaggaattaagatgcgatggattagaaatgtaaaacttcagaataaaattaaatttcagggctctataagtcccgttttcccaggtcctgttccgtttctacgtagataacccaatttgttttgtctatgaaataagcctctttagtgggttgttttagtctctccaacaaaagagcagattcctaaagccaggtgcagcactgtgaaaagtttctttcaatatggcaccaagactctaccatttatgtctctctcagcttacaaacatcagcgttttgtccttgtcatagtggaagaaagacacttactttaagctttggggacaaaggtgacaaaccccaggcttttatcttaaaagtgtctttggcacttcttttggcactgaaatggtatttgggaagcattatttgaatgtacagttgtttggttttgtatgtgcttatctttatctgagctttcacttgtagacatggccttttgttgtgaagttgctcatcatttaggagtgtttaattctaaaaagccttcagcctaagaaagcttcatctgtggggaccagagacttgttgctcagggagttagtgatgggacttgggcatctgatctgcaggtgacaagtttagttcaactgaagttgtagggaatttagacagttgcacatcattgccgttctaggggccttgtagaaagatgaaacagttgtttttcatttaccagcacctctcagttatagaggtaatggaacattcgcttacttttcatcatcattctttaaaaagggaacatacaaaaatctaaactatggcaataatttatttttataatagtttacggtaggctttaattaaatggcaaactcctctgggacccctaagttatggcgtgattagccaaatttgatttccaacagtcatttatggccataactattgcatagagtgcaggatgccagcaaagatgagggtgggggcagatactggctcagtgatttaactcacattatagatgaccccttcctcaacagaaatgctactgagagaaccagagaggcctgggccaggcaggtcttatttgagaggagattatttgataattgctttggttagaaggactttacatttcctgatttcaagtccagcaccaatttagaaagttcagagatgaaaccacctgtctttacctgacagagtcataacggtttgtgtaaaaatgtggtcagggaccttttttgttctttctgattagttaatactgtacattgtaaccaggaggggcagttttgccaaccagcctctgctcatggtcaccatatgtgtatgacaaggcctgagtgagttcctgcataaactgggtagtgggctcttttgacacatttgcaagcatgtaaatgaatgaatgacactaccagcaaccatctgtacaggtccatttacttacattcataaggtttatgctatgaaacttcttctcattgtgatgtcagtaacagagttagtgtctctgatggaatagtgtacctgtcacccaagttattttgttcctttttgggtcctccagtataatccccccctcatcccaattaactgtaaaatgttttacacatcacattttttatactgtaaacttggaaaataaactgaaatatcaaattg

SEQ ID NO: 34114 - DNA, 2062 bp, Homo sapiens
  source 1..2062: mol_type = unassigned DNA
ccctccattgctatggataccgaatccacttattctggatattcttactattcaagtcattcgaaaaaatctcacagacaaggggaaagaactagagagagacacaagtcaccccggaataaagacggcagagggtcagaaaagtctgtcaccattcaacctcccactggagagcccctgttgggaaatgattctactcggacagaggaagttcaggatgacaactggggagagaccaccacggccatcacaggcacctcggagcacagcatatcccaagaggacattgccaggatcagcaaggacatggaggacagcgtggggctggattgcaaacgctacctgggcctcaccgtcgcctcttttcttggacttctagttttcctcacccctattgccttcatccttttacctccgatcctgtggagggatgagctggagccttgtggcacaatttgtgaggggctctttatctccatggcattcaaactcctcattctgctcatagggacctgggcactttttttccgcaagcggagagctgacatgccacgggtgtttgtgtttcgtgcccttttgttggtcctcatctttctctttgtggtttcctattggcttttttacggggtccgcattttggactctcgggaccggaattaccagggcattgtgcaatatgcagtctcccttgtggatgccctcctcttcatccattacctggccatcgtcctgctggagctcaggcagctgcagcccatgttcacgctgcaggtggtccgctccaccgatggcgagtcccgcttctacagcctgggacacctgagtatccagcgagcagcattggtggtcctagaaaattactacaaagatttcaccatctataacccaaacctcctaacagcctccaaattccgagcagccaagcatatggccgggctgaaagtctacaatgtagatggccccagtaacaatgccactggccagtcccgggccatgattgctgcagctgctcggcgcagggactcaagccacaacgagttgtattatgaagaggccgaacatgaacggcgagtaaagaagcggaaagcaaggctggtggttgcagtggaagaggccttcatccacattcagcgtctccaggctgaggagcagcagaaagccccaggggaggtgatggaccctagggaggccgcccaggccattttcccctccatggccagggctctccagaagtacctgcgcatcacccggcagcagaactaccacagcatggagagcatcctgcagcacctggccttctgcatcaccaacggcatgacccccaaggccttcctagaacggtacctcagtgcgggccccaccctgcaatatgacaaggaccgctggctctctacacagtggaggcttgtcagtgatgaggctgtgactaatggattacgggatggaattgtgttcgtccttaagtgcttggacttcagcctcgtagtcaatgtgaagaaaattccattcatcatactctctgaagagttcatagaccccaaatctcacaaatttgtccttcgcttacagtctgagacatccgtttaaaagttctatatttgtggctttattaaaaaaaaaagaaaaatatatagagagatatatatctatgccagaggggtgtcttttttaaaaattcttcttcattgctgactgaaactggcagatgattgaccagtatcctttgaccatctgcactttatttggaaggaagcaggggctgtccaccctgaaaaagagtgactgatgacatctgacttttgtcgatgggacttctcaagaagccattccttggagcttctgttacagctgtaaaccaaagtggagctggtgcttcttgggagcctcgccttacaactaattcctgcctttcgtccagtaccaagtcccccgttgcttctggtcagcccacttgtagacttccaggggacacatctttattctgtttcaggaaaccagtcacgacacgtccacatatgtatttgtgtatgttaatgtccagtatcacatcacccatgaaagt

SEQ ID NO: 34115 - DNA, 4114 bp, Homo sapiens
  source 1..4114: mol_type = unassigned DNA
gggctctgcctctccaggagcccagcgcaggccgcagagccggggccgctgtgagccgagaccgcgggccgcggagctcgggcggccggcgcggagaatttgttcctgttgaagagtggctcctcttctaatttccagactccttgaggttttaggagtctggtaggtgaaattttctacctctaaggagaaacagtacctgctccttcctcaagcgcaagccctccattgctatggataccgaatccacttattctggatattcttactattcaagtcattcgaaaaaatctcacagacaaggggaaagaactagagagagacacaagtcaccccggaataaagacggcagagggtcagaaaagtctgtcaccattcaacctcccactggagagcccctgttgggaaatgattctactcggacagaggaagatgacaactggggagagaccaccacggccatcacaggcacctcggagcacagcatatcccaagaggacattgccaggatcagcaaggacatggaggacagcgtggggctggattgcaaacgctacctgggcctcaccgtcgcctcttttcttggacttctagttttcctcacccctattgccttcatccttttacctccgatcctgtggagggatgagctggagccttgtggcacaatttgtgaggggctctttatctccatggcattcaaactcctcattctgctcatagggacctgggcactttttttccgcaagcggagagctgacatgccacgggtgtttgtgtttcgtgcccttttgttggtcctcatctttctctttgtggtttcctattggcttttttacggggtccgcattttggactctcgggaccggaattaccagggcattgtgcaatatgcagtctcccttgtggatgccctcctcttcatccattacctggccatcgtcctgctggagctcaggcagctgcagcccatgttcacgctgcaggtggtccgctccaccgatggcgagtcccgcttctacagcctgggacacctgagtatccagcgagcagcattggtggtcctagaaaattactacaaagatttcaccatctataacccaaacctcctaacagcctccaaattccgagcagccaagcatatggccgggctgaaagtctacaatgtagatggccccagtaacaatgccactggccagtcccgggccatgattgctgcagctgctcggcgcagggactcaagccacaacgagttgtattatgaagaggccgaacatgaacggcgagtaaagaagcggaaagcaaggctggtggttgcagtggaagaggccttcatccacattcagcgtctccaggctgaggagcagcagaaagccccaggggaggtgatggaccctagggaggccgcccaggccattttcccctccatggccagggctctccagaagtacctgcgcatcacccggcagcagaactaccacagcatggagagcatcctgcagcacctggccttctgcatcaccaacggcatgacccccaaggccttcctagaacggtacctcagtgcgggccccaccctgcaatatgacaaggaccgctggctctctacacagtggaggcttgtcagtgatgaggctgtgactaatggattacgggatggaattgtgttcgtccttaagtgcttggacttcagcctcgtagtcaatgtgaagaaaattccattcatcatactctctgaagagttcatagaccccaaatctcacaaatttgtccttcgcttacagtctgagacatccgtttaaaagttctatatttgtggctttattaaaaaaaaaagaaaaatatatagagagatatatatctatgccagaggggtgtcttttttaaaaattcttcttcattgctgactgaaactggcagatgattgaccagtatcctttgaccatctgcactttatttggaaggaagcaggggctgtccaccctgaaaaagagtgactgatgacatctgacttttgtcgatgggacttctcaagaagccattccttggagcttctgttacagctgtaaaccaaagtggagctggtgcttcttgggagcctcgccttacaactaattcctgcctttcgtccagtaccaagtcccccgttgcttctggtcagcccacttgtagacttccaggggacacatctttattctgtttcaggaaaccagtcacgacacgtccacatatgtatttgtgtatgttaatgtccagtatcacatcacccatgaaagtcgtgggcagttcaggagatacctgccttcatctttgttctttgttgccttaggttcttcagagaaagatcacaacaaaaaatgtacactgtcgtttacagctattaagtgatttgattttgtttttttcccaaagagaaaacctacctgccctgtttctgatcccacccctctgctggcttgaagcaggtaaccctttcccagccctgcagctgcccacctggcctccatgccatcctgcccccacctggctggcagccctggctctccatgtgtgccctccggctctgtgtgaagcctcaagtcagtcccagcattgtttccatagggaagtgtggggtgcccagcaggtaaagcacagggagagagggcagtgggaatgccacctttaggctgcagcaggagccccacactgcccagttttcctccccactgttctacaccaaccaggggagactaacactgtgactctgggattggcaggtgcaacttggagccacttaatttcctggggacgtaagttcttcccaagcttagagcaagctgccctgccaaaggagaccaaaccatgccaaccacgctggcaactgctgctgtccagtccctgtgttttctgaccaccgtcactgtgcaactcatcgcctctgccacttaggaccaggaaagaggctggttttgctcccactcttagttgctgataaagtggggagaaggaaaatggacactctacagagtttggggaagggagagtagggagcccatcttgtccagaaagattcatctgtggtctgtctgttaaacacagctgatttcagtgggctttcccctggccctgggggagcagacactgactgggttgtgggcagaggagccatcctggcggagccctgctgcaggggagctccttcaggagccccatccggacctcttgcactgggctgcctttgcctccatttgccttcctgtatctgcaacaaaccttttaaaagtgttcactcttgctttttccagtatttcggtaatcagccatcttgctgtagtacaggatgacattgtcgaatgctctttgtatgtgtgcacacccccttactcccttactgcttcatacactccacaagtggtacagtattttgtgtcattgtaaaaatcaaaattggctttggatctttgtaatacacctgtacctgaaaaagtaaacaacattcttcaattactagccttcagcttgaaaagacatgctggagaagaaggaagggggaacccataggtgtggcgtggagccaagatgtactattcaactatgtgtttctgtttataaaaaacacataccatggaaccatggtgcttttgttcttagtttttgccgttagatcccttcaaactggaagttccttacaatatctttctcaggaaatattttgggaaatggggtaagagatggcaagtgtgagacgggctgtgtcagaggttgctacgtcatggatacagtgcagttccaagtgccataagtgtatgtacatatagttaataatgacactgttcatcaccattctaaaatactgttcttccaaccctatcttcaatgaccagtccagaaggggttaagctggattcatttgctctggcatgtgcattcccagcagggtgaagaaaggtttaaattaaagaatttattttctctctcccccttcctctttctcccagtctttgcataggagaatgttagacattcagaaattactgtttctgttttaaattgagtattgatttttttatattgactttgtattgagttctttttgaaagaataacaaaataaaatgcaggatctttgtaaa

SEQ ID NO: 34116 - DNA, 5340 bp, Homo sapiens
  source 1..5340: mol_type = unassigned DNA
gattcctgatccttgattccttgatccttggtcccgccatgggagcctgagcgccccctattcccccctggcccccagcccccggggccttgagggggaagaggcagcggtctgggacggagcagggggtgaccagactcaagaacccccccctcaacatcccccatcgcgcgcgctgcctgtccaggagcgccgagttcggagcgacccggagcgctgcggatacaaaggcgacgggccgagcggggcgcccgcggagcccacccggcagttcgcagcggcgggagcgtcgctggattttctctgagacaagcccacccgtccagcaaaatagagtccctcagggtgacagttgacttcctgaaggtgcctcttggcctaaagaagccggtgctgaaggaggtggctgtggggccccccaagaggccccagcctgcggccctggagcgctacaaggcgcggcgttcagacgccatggacaccgagtcccagtactcgggctattcctacaagtcgggccactcccgcagctcccgcaagcacagggaccgccgggaccgacaccgctctaagagtcgagatgggggccgaggggacaagtcggtgacaatccaggctcccggggagcccctgctggacaatgagtccacacgaggggatgagcgggatgacaactggggggaaacgacgacagtagtaacgggcacctcagagcacagcatctcccatgatgacctcacacgcatcgccaaggacatggaggacagtgtccctctggactgctcccgtcacctgggtgtggcagcgggggccaccctggcactgctgtctttcctcacgcctctggccttcctgctgctgcccccactgctgtggcgggaggagctggagccttgcgggacggcctgcgagggcctcttcatctctgtcgccttcaagctgctcatcctgctactgggcagctgggctctgttcttccgccggcccaaggcctcgctgccccgcgtctttgtgctgcgtgccctgcttatggtgctggttttcctgctcgtggtctcctactggctcttctatggtgtgcgcatcctggatgctcgggagcgcagctaccagggcgtggtgcagttcgccgtgtcgctggtggacgcccttcttttcgtgcactacctggccgtggtcctgctggagctgcgccagctccagcctcagttcacgctcaaggtcgtgcgctccaccgacggcgccagccgcttctacaacgttggccatctcagcatccagcgcgtggcagtgtggatcctggagaagtattaccatgacttccctgtctacaaccctgccctcctcaacctgcccaagtccgtcctggccaagaaagtgtctggcttcaaggtgtattccctcggagaggaaaacagcaccaacaactccactggccagtctcgggctgtgattgcagcggcagctcggaggcgggacaacagtcacaatgagtactactatgaggaggctgagcatgagcgaagggtgcgcaagaggagggccaggcttgtagtggcggtggaggaggccttcactcacattaagcggctgcaggaagaggagcagaaaaaccccagggaggtgatggacccccgggaggcagcccaagccatctttgcatccatggcccgtgccatgcagaagtaccttcggaccaccaagcagcagccctaccacaccatggagagcatcctgcagcaccttgaattctgcatcacgcatgacatgacgcccaaggccttcttggagcgatacttggcggctggacctaccatccagtaccacaaggaacgctggctggccaaacagtggacattggtgagcgaggagccggtgaccaacggcctcaaggatggcatcgttttcctcttaaaacgccaggacttcagcctggtggtcagcaccaagaaggtcccattcttcaaactctccgaggaatttgtggatcccaagtcacacaagtttgtcatgaggctgcagtctgagacctcagtgtgactgtgcaacagcagggggagtgggaaactctggggggtcctgagggggtgggagggggcttggttctcaggcccagccacattcctgccacccttcttcttcttgctcttttttttttacttgaattaacgcacccccaccttctctcctcgcttcttccttattttaccccatgtgaacctggagagaccatcctgctgtcaacagtacctgggaaggactcccacctcaccaacaacttttgtattactctaggccctgcaggaatcagtgcctctctccctcttctttccctagtcttttcccagattacagtctctcctgaaagggcacagggccctgctgattgtactttcccctcctgagccccgactcacaaatccaagttcttaaaacatttctcttcagtggcccaacagggtttctctggggcacatggacatgactccagagagccacagtgccaaactcctccagggcagcaactggccctcctgtccctcaccccagccacaacaaaccctgggttctagggcagggatactcctgccacacagcccgagttagaaatctccttgctaggagcatttgcttccacatatatttagagcaaagaaggatcccatccttttcccagaaatctccacctaatgtttttggtttgtatggtcacgtgaccataggcaaccacgtggaaaccctctgtgaccacttttccagggacttaggggaaggtacctttcttccaatgtgtcttcctaggcagcccctgaggaggagggctgaatagatccctgaggttttggagagacccccatcactgactcctgctccctaaccctaccctcactttcgtccccgctcttcccagtgaaggatggtatgtagactcctgtacagacatagtggcttgcagaccctgacccagcccctgtggtcttagacaaatgtttttatttttgtcaccagccacccctgtcctgccgccttctctcgactccagagacctgttgcctcatctcttttggggaagagccggcagctcctcctcatcccctgccttaagtccagttctttgcctcaggggtctcgtttccttggccttccagggtccccaccccttttctccctgcctgattctctgagctctgggctccgtctgtattgggttgaggggcaaggattactgccttttgtaggtacttcacccctcaccccattttagcttccatagtctttgcaccaaatccaaattcttgataatttagatctcattttgagcaaaatttgctggccctctaataaatattttcaatataaatctgagcctttgactcagacatttttgccaaggagagtagaattaggaagtacccatatacatccagccaggatccacatggaggacctttctgatggctgcaatgactaggccattcctctgagtaactcacagtgtccttttgtaggcccttcttttccctgaaagactggttggtacttaccttgcagagcacatcctgggataagatccccagtgtctcccctgggaggctccccctctgtgtagcaccagccctgggaatgatggagcctagtgatcggggtttctcctgctgtcctttctgcaaaagttcacttgtttacccaccgcatgctagagaggagctcattggccaatgcttaccttgtccccaaaggggtgggttgtggagctcacttaggcagggcctctggctggggccagggttatgagataggcctgtatgaaatatgtcctgttctgggggtctgtctcttttcttctcttcaaaaactttgtgtcagagagtcccttctgagtcacataaatacctcactatcctggaaaacagggcctggatggtgactggggtcattgcctttgtggacaggatggagtgtggtgtggtctgaggagcaggttggggtgggggagagggaaaggatttgggatcttagttgctgccctaggttaggggctggggagtgtttattttaagatcctgccatgtttttaatcactgtgatttttttttcattcccctttcctaaaaaaaattttttgcctccaactctctaagcactaagggctgtgcctgagaatggtagcattttggtcttttgcttcagaactgtggtatctttgtcttttttcattattattattattattattattattattactattgttttttaaaatgtcaggatgaattgtcagacatatggccatgtgtttgtcctctgcttctcccctgtgggaagttgtctccatgctgtgaactgctgtggggtgtgcagctgactcagtccctctgagcagtttccccactgtgtctgtcccatcatgcgctggatctgctcattctcctgctgtgggggtatgcccacctcttacccccttgacaccatagggctgctgtggctgggcctcaccagcactgtcttttgtgtgactcatggcatcctcgttcatccccaccgtgcctagcaggccttccttttcaccacctcggaacgcttgcctttcctccctccacaacaggacgctgtgcctcagtccttcacctacctcgccactctgccactgtccccattggtcctttctcctaaactggtctttgtgctctctttgttttttcttatttccctcttgtctctcattttttcttcccattcccctcccatttcagcccttaacttttctctttcccatctccactcagtattccaatggcaaaccctgatgatgtaacacctgcgatgagacatcggactctccggaactttctcatctgacacgtctttttcccagggttcgtacttctcctccattggtcccaggctaactcccctgttcctctgtggtgtctgtcagtccgtctgtcttctctttcctctgcccttcccacagggcagtatctgctgatggattcagtcctggtgtgtgattgttgtgatttgttcttccgtgcgcaaaaggaagagggctttttgagtcccttccaagtgagattgtaaatgtagaattttccactgttggatctagattttttttccttttttttgggggggtggggttacagagctgagaccttgtgcatgcatgtagaaaattgtaaaatgtaaattttttttaatatataaaaagcttgtttctacagtttgcagtggatctaaacattacggcaattttaggatttttttcttaaacataggaactaaaactgtacaaattttttttatataaaataaagacatttgacttttgtgggggca

SEQ ID NO: 34117 - DNA, 3106 bp, Homo sapiens
  source 1..3106: mol_type = unassigned DNA
cattggacttcagcatgactactcagttgccagcttacgtggcaattttgcttttctatgtctcaagagccagctgccaggacactttcactgcagctgtttatgagcatgcagcgatattgcccaatgccaccctaacaccagtgtctcgtgaggaggctttggcattaatgaatcggaatctggacattttggaaggagcgatcacatcagcagcagatcagggtgcgcatattattgtgactccagaagatgctatttatggctggaacttcaacagggactctctctacccatatttggaggacatcccagaccctgaagtaaactggatcccctgtaataatcgtaacagatttggccagaccccagtacaagaaagactcagctgcctggccaagaacaactctatctatgttgtggcaaatattggggacaagaagccatgcgataccagtgatcctcagtgtccccctgatggccgttaccaatacaacactgatgtggtatttgattctcaaggaaaactggtggcacgctaccataagcaaaaccttttcatgggtgaaaatcaattcaatgtacccaaggagcctgagattgtgactttcaataccacctttggaagttttggcattttcacatgctttgatatactcttccatgatcctgctgttaccttggtgaaagatttccacgtggacaccatagtattcccaacagcttggatgaatgttttgccacatttgtcagctgttgaattccactcagcttgggctatgggcatgagggtcaatttccttgcatccaacatacattacccctcaaagaaaatgacaggaagtggcatctatgcacccaattcttcaagagcatttcattatgatatgaagacagaagagggaaaactcctcctctcgcaactggattcccacccatcccattctgcagtggtgaactggacttcctatgccagcagtatagaagcgctctcatcaggaaacaaggaatttaaaggcactgtctttttcgatgaattcacttttgtgaagctcacaggagttgcaggaaattatacagtttgtcagaaagatctctgctgtcatttaagctacaaaatgtctgagaacataccaaatgaagtgtacgctctaggggcatttgacggactgcacactgtggaagggcgctattatctacagatttgtaccctgttgaaatgtaaaacgactaatttaaacacttgcggtgactcagctgaaacagcttctaccaggtttgaaatgttctccctcagtggcactttcggaacccagtatgtctttcctgaggtgttgctgagtgaaaatcagcttgcacctggagaatttcaggtgtcaactgacggacgcttgtttagtctgaagccaacatccggacctgtcttaacagtaactctgtttgggaggttgtatgagaaggactgggcatcaaatgcttcatcaggcctcacagcacaagcaagaataataatgctaatagttatagcacctattgtatgctcattaagttggtagaatattgactttttctcttttttatttgggataatttaaaaaatgatggatgagaaaagaaagattggtccgggttaatattatcctctagtataagtgaattactagtttctctttatttagacaaacacacacacaccagataatataaacttaataaattatctgttaatgtagattttatttaaaaaactatatttgaacattggtctttcttggacgtgagctaattatatcaaataagtatcacaaatcttttacgcagaagaaataaaaactacgggtagaaaacataagaactatcataaaatttacttacaaggaggctgctcttgttaccacttttattatattacgtatcacttattcagctctgctgaaaatttccaatgactttgtttgtttgctctttttgttttttacctaaacaatacattttgattctcttgtgggttgataatgtctccccaaaatttacatgttgaagcacctcagaatgtgactgtatttggagacagggtctttaaagaggtaaaataaggtcattaggatagaccctaattcaatatgactgatgatcataaaagaagaggcgagtagggcacaacaggcacaaagggagaccataaggagacacagaggaaggacaactctttacaagctaagaagagagggcctcagaagaaaccaaccctgccaacaccttgatcttggacttccagcctccaaaactatgagaaataaatttctattgtttaagtcacccagtccatggtactttgttaggcagccctggcaaatgaatcaaagacccattcctgttcctctccccaccactactgttttctactgtaatctgaagcttcaacaaaaggcttacctggtaagaatattcagctggtctgggtcctcaagactccaatagacactcttagagaaggattgctgatggattgatagtgaaaccattagatcattgaattcctctggaattagaaaaccagagagtcccattttaagaaattagatatttaatatagcattgtgtgttctattttagtaacagcagaatctcttgacattacacaactcagtgaaacaacatcatttaagccaaaatatctcccaactgactgatagactctgagcactaatatcatagtgctgtgatgatggacaattacatagtaccgataacagccatgcactgtgcaaagcatgcccttctgcacaggagagcaaggcacttgcagtagtgatctatgccagcaaaacatcattttgagacaaacatttttgtggcagatgtttttcctaaaaagtactatatcatccaagaaatatttgagtaaaatcccttgttcttttgggtgacattaactgacatttgctttttttcaagacctaatagaaaataagaaagcccataatgtatttagaaacaggaatcctcagagcaattctctgtattctcatataatttcaatgtaaaacagaaaacatattgatgtgttggtgataggcttgaattattaaaaacttcaaaaaca

SEQ ID NO: 34118 - DNA, 2118 bp, Homo sapiens
  source 1..2118: mol_type = unassigned DNA
aagaagaaaaatgatgataaagtaaaaggccagtaactggcagccacatgttatgcaaacattctcccctctgtaaatactacatgaatgttatttttgctttcagaaatcactaaaccttggccatggtcacttcctcttttccaatctctgtggcagtttttgccctaataaccctgcaggttggtactcaggacagttttatagctgcagtgtatgaacatgctgtcattttgccaaataaaacagaaacaccagtttctcaggaggatgccttgaatctcatgaacgagaatatagacattctggagacagcgatcaagcaggcagctgagcagggtgctcgaatcattgtgactccagaagatgcactttatggatggaaatttaccagggaaactgttttcccttatctggaggatatcccagaccctcaggtgaactggattccgtgtcaagacccccacagatttggtcacacaccagtacaagcaagactcagctgcctggccaaggacaactctatctatgtcttggcaaatttgggggacaaaaagccatgtaattcccgtgactccacatgtcctcctaatggctactttcaatacaataccaatgtggtgtataatacagaaggaaaactcgtggcacgttaccataagtaccacctgtactctgagcctcagtttaatgtccctgaaaagccggagttggtgactttcaacaccgcatttggaaggtttggcattttcacgtgctttgatatattcttctatgatcctggtgttaccctggtgaaagatttccatgtggacaccatactgtttcccacagcttggatgaacgttttgccccttttgacagctattgaattccattcagcttgggcaatgggaatgggagttaatcttcttgtggccaacacacatcatgtcagcctaaatatgacaggaagtggtatttatgcaccaaatggtcccaaagtgtatcattatgacatgaagacagagttgggaaaacttctcctttcagaggtggattcacatcccctatcctcgcttgcctacccaacagctgttaattggaatgcctacgccaccaccatcaaaccatttccagtacagaaaaacactttcaggggatttatttccagggatgggttcaacttcacagaactttttgaaaatgcaggaaaccttacagtctgtcaaaaggagctttgctgtcatttaagctacagaatgttacaaaaagaagagaatgaagtatacgttctaggagcttttacaggattacatggccgaaggagaagagagtactggcaggtctgcacactgctgaagtgcaaaactactaatttgacaacttgtggacggccagtagaaactgcttctacaagatttgaaatgttctccctcagtggcacatttggaacagagtatgtttttcctgaagtgctacttaccgaaattcatctgtcacctggaaaatttgaggtgctgaaagatgggcgtttggtaaacaagaatggatcatctgggcctatactaacagtgtcactctttgggaggtggtacacaaaggactcactttacagctcatgtgggaccagcaattcagcaataacttacctgctaatattcatattattaatgatcatagctttgcaaaatattgtaatgttatagggcgtctctttatcactcagcttctgcatcatatgcttggctgaatgtgtttatcggcttcccaagtttactaagaaactttgaagggctatttcagtagtatagaccagtgagtcctaaatattttttctcatcaataattattttttaagtattatgataatgttgtccatttttttggctactctgaaatgttgcagtgtggaacaatggaaagagcctgggtgtttgggtcagataaatgaagatcaaactccagctccagcctcatttgcttgagactttgtgtgtatgggggacttgtatgtatgggagtgaggagtttcagggccattgcaaacatagctgtgcccttgaagagaatagtaatgatgggaatttagaggtttatgactgaattccctttgacattaaagactatttgaattca

SEQ ID NO: 34119 - DNA, 594 bp, Homo sapiens
  source 1..594: mol_type = unassigned DNA
gactggaggagcacaggccttggaaaggaaagcagctgagatccagaggagtggaaggctcccccttgactaaagctaaatcactaaaccttggccatggtcacttcctcttttccaatctctgtggcagtttttgccctaataaccctgcaggttggtactcaggacagttttatagctgcagtgtatgaacatgctgtcattttgccaaataaaacagaaacaccagtttctcaggaggatgccttgaatctcatgaacgagaatatagacattctggagacagcgatcaagcaggcagctgagcagggtgctcgaatcattgtgactccagaagatgcactttatggatggaaatttaccagggaaactgttttcccttatctggaggatatcccagaccctcaggtgaactggattccgtgtcaagacccccacagatttggtcacacaccagtacaagcaagactcagctgcctggccaaggacaactctatctatgtcttggcaaatttgggggacaaaaagccatgtaattcccgtgactccacatgtcctcctaatggctactttcaatacaataccaatgtggtg

SEQ ID NO: 34120 - DNA, 1608 bp, Homo sapiens
  source 1..1608: mol_type = unassigned DNA
acaggccttggaaaggaaagcagctgagatccagaggagtggaaggctcccccttgactaaagctaaacaccagtttctcaggaggatgccttgaatctcatgaacgagaatatagacattctggagacagcgatcaagcaggcagctgagcagggtgctcgaatcattgtgactccagaagatgcactttatggatggaaatttaccagggaaactgttttcccttatctggaggatatcccagaccctcaggtgaactggattccgtgtcaagacccccacagatttggtcacacaccagtacaagcaagactcagctgcctggccaaggacaactctatctatgtcttggcaaatttgggggacaaaaagccatgtaattcccgtgactccacatgtcctcctaatggctactttcaatacaataccaatgtggtgtataatacagaaggaaaactcgtggcacgttaccataagtaccacctgtactctgagcctcagtttaatgtccctgaaaagccggagttggtgactttcaacaccgcatttggaaggtttggcattttcacgtgctttgatatattcttctatgatcctggtgttaccctggtgaaagatttccatgtggacaccatactgtttcccacagcttggatgaacgttttgccccttttgacagctattgaattccattcagcttgggcaatgggaatgggagttaatcttcttgtggccaacacacatcatgtcagcctaaatatgacaggaagtggtatttatgcaccaaatggtcccaaagtgtatcattatgacatgaagacagagttgggaaaacttctcctttcagaggtggattcacatcccctatcctcgcttgcctacccaacagctgttaattggaatgcctacgccaccaccatcaaaccatttccagtacagaaaaacactttcaggggatttatttccagggatgggttcaacttcacagaactttttgaaaatgcaggaaaccttacagtctgtcaaaaggagctttgctgtcatttaagctacagaatgttacaaaaagaagagaatgaagtatacgttctaggagcttttacaggattacatggccgaaggagaagagagtactggcaggtctgcacactgctgaagtgcaaaactactaatttgacaacttgtggacggccagtagaaactgcttctacaagatttgaaatgttctccctcagtggcacatttggaacagagtatgtttttcctgaagtgctacttaccgaaattcatctgtcacctggaaaatttgaggtgctgaaagatgggcgtttggtaaacaagaatggatcatctgggcctatactaacagtgtcactctttgggaggtggtacacaaaggactcactttacagctcatgtgggaccagcaattcagcaataacttacctgctaatattcatattattaatgatcatagctttgcaaaatattgtaatgttatagggcgtctctttatcactcagcttctgcatcatatgcttggctgaatgtgtttatcggcttcccaagtttactaagaaactttgaagggctatttcagtagtata

SEQ ID NO: 34121 - DNA, 587 bp, Homo sapiens
  source 1..587: mol_type = unassigned DNA
ggaggagcacaggccttggaaaggaaagcagctgagatccagaggagtggaaggctcccccttgactaaagctccaaggacagagaaaaacatccagatttgggaacacaataacagatatgattgtccccacttctactgccaaaattataaaactgttaactcctcctcatcagcttacctgactacttaaaagcaaaagagttaattaagtattactaattggtgatactagatcaatgaagaaacaccagtttctcaggaggatgccttgaatctcatgaacgagaatatagacattctggagacagcgatcaagcaggcagctgagcagggtgctcgaatcattgtgactccagaagatgcactttatggatggaaatttaccagggaaactgttttcccttatctggaggatatcccagaccctcaggtgaactggattccgtgtcaagacccccacagatttggtcacacaccagtacaagcaagactcagctgcctggccaaggacaactctatctatgtcttggcaaatttgggggacaaaaagccatgtaattcccgtgactccacatgtcctccta

SEQ ID NO: 34122 - DNA, 543 bp, Homo sapiens
  source 1..543: mol_type = unassigned DNA
aaagcagctgagatccagaggagtggaaggctcccccttgactaaagctccaaggacagagaaaaacatccagatttgggaacacaataacagatatgattgtccccacttctactgccaaaattataaaactgttaactcctcctcatcagcttacctgactacttaaaagcaaaagagttaattaagtattactaattggtgatactagatcaatgaagaaatcactaaaccttggccatggtcacttcctcttttccaatctctgtggcagtttttgccctaataaccctgcaggttggtactcaggacagttttatagctgcagtgtatgaacatgctgtcattttgccaaataaaacagaaacaccagtttctcaggaggatgccttgaatctcatgaacgagaatatagacattctggagacagcgatcaagcaggcagctgagcagggtgctcgaatcattgtgactccagaagatgcactttatggatggaaatttaccagggaaactgttttcccttatctggaggatatccca

SEQ ID NO: 34123 - DNA, 1713 bp, Homo sapiens
  source 1..1713: mol_type = unassigned DNA
aatgtaaagtttttccagtgaaacaaaacgtaagaatctgagtttgtttttcaaagatcactaaattttagttatgattatatcacattttccaaaatgtgtggcagtttttgccctccttgctctgagtgttggtgcactggacacttttattgctgcagtatatgagcatgcggtgatattaccaaacagaacagaaacacctgtttcaaaagaagaagctttgctcctgatgaacaagaacatagatgttttggagaaagcagttaagctggcagcgaagcagggtgcacatatcattgtgaccccagaagatggaatctatggttggatcttcaccagggagagcatttacccctatctagaggatataccagaccctggagtgaactggattccatgtagagacccctggagattcggcaacacaccagtgcaacaaagactcagctgcctggccaaggacaactctatctatgtcgtggctaatattggggacaagaagccatgcaatgccagtgactctcagtgtccccctgatggccgttaccaatacaacactgatgtggtgtttgattctcagggaaaactgttggcacgctaccataagtacaatctttttgcacctgaaattcagtttgatttccccaaggattcagaacttgtgacttttgacactccctttgggaagtttggcatttttacttgctttgacattttttctcatgacccagctgtggtggtggtggatgagtcaattgacagcattctctaccccacagcatggtacaacacgctgcccctcctctcggctgttcccttccattcagcatgggccaaggccatgggagtcaatctacttgctgcaaatacccacaacaccagcatgcacatgacagggagtggaatctacgccccagaagcagtcaaggtgtaccactatgacatggaaacagagagtggtcagctgttgctatcagaactgaagtctcggccccgccgtgagcccacctaccctgcagctgttgactggcatgcgtatgccagcagtgtcaagccattttcctctgaacagtcagattttctggggatgatttattttgatgagtttaccttcaccaagcttaagagaaatacaggaaattacacagcttgccagaaagatctgtgttgtcacttaacttacaagatgtctgagaagcgaacagacgagatctatgccctaggtgcttttgatggactgcacacagtagaaggccaatattacttacagatatgtgcattactgaagtgtcaaaccactgacctggaaacgtgtggagaacctgtggggtcagcttttaccaagtttgaagacttctccctcagtggcacatttggaacgcgttatgttttcccacagatcattctaagtgggagtcagcttgcccctgaaagacattatgagatttcaagagatggacgcttgaggagccgaagtggagcccctttgcctgtcttagttatggccctgtatggaagagtgtttgagaaggaccctccacgcttagggcagggatctgggaaattccagtgatctcctttagcagagcccttttaggattagcctggctaagaaaggaagaaaaaaaagagatccgttagtgtctgtttagaaaagatgttataaacttacagaaacaaatataataaactgaagcagatttgaaaagc

SEQ ID NO: 34124 - DNA, 1720 bp, Homo sapiens
  source 1..1720: mol_type = unassigned DNA
aatgtaaagtttttccagtgaaacaaaacgtaagaatctgagtttgtttttcaaagatcactaaattttagttatgattatatcacattttccaaaatgtgtggcagtttttgccctccttgctctgagtgttggtgcactggacacttttattgctgcagtatatgagcatgcggtgatattaccaaacagaacagaaacacctgtttcaaaagaagaagctttgctcctgatgaacaagaacatagatgttttggagaaagcagttaagctggcagcgaagcagggtgcacatatcattgtgaccccagaagatggaatctatggttggatcttcaccagggagagcatttacccctatctagaggatataccagaccctggagtgaactggattccatgtagagacccctggagattcggcaacacaccagtgcaacaaagactcagctgcctggccaaggacaactctatctatgtcgtggctaatattggggacaagaagccatgcaatgccagtgactctcagtgtccccctgatggccgttaccaatacaacactgatgtggtgtttgattctcagggaaaactgttggcacgctaccataagtacaatctttttgcacctgaaattcagtttgatttccccaaggattcagaacttgtgacttttgacactccctttgggaagtttggcatttttacttgctttgacattttttctcatgacccagctgtggtggtggtggatgagtttcaattgacagcattctctaccccacagcatggtacaacacgctgcccctcctctcggctgttcccttccattcagcatgggccaaggccatgggagtcaatctacttgctgcaaatacccacaacaccagcatgcacatgacagggagtggaatctacgccccagaagcagtcaaggtgtaccactatgacatggaaacagagagtggtcagctgttgctatcagaactgaagtctcggccccgccgtgagcccacctaccctgcagctgttgactggcatgcgtatgccagcagtgtcaagccattttcctctgaacagtcagattttctggggatgatttattttgatgagtttaccttcaccaagcttaagagaaatacaggaaattacacagcttgccagaaagatctgtgttgtcacttaacttacaagatgtctgagaagcgaacagacgagatctatgccctaggtgcttttgatggactgcacacagtagaaggccaatattacttacagatatgtgcattactgaagtgtcaaaccactgacctggaaacgtgtggagaacctgtggggtcagcttttaccaagtttgaagacttctccctcagtggcacatttggaacgcgttatgttttcccacagatcattctaagtgggagtcagcttgcccctgaaagacattatgagatttcaagagatggacgcttgaggagccgaagtggagcccctttgcctgtcttagttatggccctgtatggaagagtgtttgagaaggaccctccacgcttagggcagggatctgggaaattccagtgatctcctttagcagagcccttttaggattagcctggctaagaaaggaagaaaaaaaagagatccgttagtgtctgtttagaaaagatgttataaacttacagaaacaaatataataaactgaagcagatttgaaaagcaacaa

SEQ ID NO: 34125 - DNA, 517 bp, Homo sapiens
  source 1..517: mol_type = unassigned DNA
aatgtaaagtttttccagtgaaacaaaacgtaagaatctgagtttgtttttcaaagatcactaaattttagttatgattatatcacattttccaaaatgtgtggcagtttttgccctccttgctctgagtgttggtgcactggacacttttattgctgcagtatatgagcatgcggtgatattaccaaacagaacagaaacacctgtttcaaaagaagaagctttgctcctgatgaacaagaacatagatgttttggagaaagcagttaagctggcagcgaagcagggtgcacatatcattgtgaccccagaagatggaatctatggttggatcttcaccagggagagcatttacccctatctagaggatataccagaccctggagtgaactggattccatgtagagacccctggaggaagagtaaaaagatgaatgagcctgtttccaaagagctttgctatcactgtcattcagaatgcaatcaatatggccaatggaaattgtataggacttga

SEQ ID NO: 34126 - DNA, 1214 bp, Homo sapiens
  source 1..1214: mol_type = unassigned DNA
atgattatatcacattttccaaaatgtgtggcagtttttgccctccttgctctgagtgttggtgcactggacacttttattgctgcagtatatgagcatgcggtgatattaccaaacagaacagaaacacctgtttcaaaagaagaagctttgctcctgatgaacaagaacatagatgttttggagaaagcagttaagctggcagcgaagcagggtgcacatatcattgtgaccccagaagatggaatctatggttggatcttcaccagggagagcatttacccctatctagaggatataccagaccctggagtgaactggattccatgtagagacccctggagattcggcaacacaccagtgcaacaaagactcagctgcctggccaaggacaactctatctatgtcgtggctaatattggggacaagaagccatgcaatgccagtgactctcagtgtccccctgatggccgttaccaatacaacactgatgtggtgtttgattctcagggaaaactgttggcacgctaccataagggagtggaatctacgccccagaagcagtcaaggtgtaccactatgacatggaaacagagagtggtcagctgttgctatcagaactgaagtctcggccccgccgtgagcccacctaccctgcagctgttgactggcatgcgtatgccagcagtgtcaagccattttcctctgaacagtcagattttctggggatgatttattttgatgagtttaccttcaccaagcttaagagaaatacaggaaattacacagcttgccagaaagatctgtgttgtcacttaacttacaagatgtctgagaagcgaacagacgagatctatgccctaggtgcttttgatggactgcacacagtagaaggccaatattacttacagatatgtgcattactgaagtgtcaaaccactgacctggaaacgtgtggagaacctgtggggtcagcttttaccaagtttgaagacttctccctcagtggcacatttggaacgcgttatgttttcccacagatcattctaagtgggagtcagcttgcccctgaaagacattatgagatttcaagagatggacgcttgaggagccgaagtggagcccctttgcctgtcttagttatggccctgtatggaagagtgtttgagaaggaccctccacgcttagggcagggatctgggaaattccagtga

SEQ ID NO: 34127 - DNA, 780 bp, Homo sapiens
  source 1..780: mol_type = unassigned DNA
atgtggacactgggagaaggaagtgagatggaaaagttctttgattgcatccaagaagtgaatggtcctcaagggcgaccattggctgggtagtggagtgttgaccaatcacagctcaggggcgtgattgtctcgtcctgggatcgcgagaggggtatatacagggaggccaggcagcctggagttagccgaccgttgcgagacgttgagctgcggaagatgagtccaaagccgagagcctcgggacctccggccaaggccacggaggcaggaaagaggaagtcctcctctcagccgagccccagtgacccgaagaagaagactaccaaggtggccaagaagggaaaagcagttcgtagagggagacgcgggaagaaaggggctgcgacaaagatggcggccgtgacggcacctgaggcggagagcgcgccagcggcacccggccccagcgaccagcccagccaggagctccctcagcacgagctgccgccggaggagccagtgagcgaggggacccagcacgaccccctgagtcaggaggccgagctggaggaaccactgagtcaggagagcgaggtggaagaaccactgagtcaggagagccaggtggaggaaccactgagtcaggagagcgaggtggaggaaccactgagtcaggagagccaggtggaggaaccactgagtcaggagagcgagatggaagaaccactgagtcaggagagccaggtggaggaaccaccgagtcaggagagcgagatggaagaactaccgagtgtgtag

SEQ ID NO: 34128 - DNA, 967 bp, Homo sapiens
  source 1..967: mol_type = unassigned DNA
atgtggacactgggagaaggaagtgagatggaaaagttctttgattgcatccaagaagtgaatggtcctcaagggcgaccattggctgggtagtggagtgttgaccaatcacagctcaggggcgtgattgtctcgtcctgggatcgcgagaggggtatatacagggaggccaggcagcctggagttagccgaccgttgcgagacgttgagctgcggaagatgagtccaaagccgagagcctcgggacctccggccaaggccacggaggcaggaaagaggaagtcctcctctcagccgagccccagtgacccgaagaagaagactaccaaggtggccaagaagggaaaagcagttcgtagagggagacgcgggaagaaaggggctgcgacaaagatggcggccgtgacggcacctgaggcggagagcgcgccagcggcacccggccccagcgaccagcccagccaggagctccctcagcacgagctgccgccggaggagccagtgagcgaggggacccagcacgaccccctgagtcaggaggccgagctggaggaaccactgagtcaggagagcgaggtggaagaaccactgagtcaggagagccaggtggaggaaccactgagtcaggagagcgaggtggaagaaccactgagtcaggagagccaggtggaggaaccactgagtcaggagagcgaggtggaggaaccactgagtcaggagagccaggtggaggaaccactgagtcaggagagcgagatggaagaaccactgagtcaggagagccaggtggaggaaccaccgagtcaggagagcgagatggaagaactaccgagtgtgtagacggccaagtactcccctatctccgagagcagcgactaagttcaggcccagccgccagacctcagagatctcaccagcggggtgcttgccattctgaagataataaaatgaatgtgttgcaaattga

SEQ ID NO: 34129 - DNA, 811 bp, Homo sapiens
  source 1..811: mol_type = unassigned DNA
atgtggatgctgggagaagtatgtgagatggaaaagttgtttcatggcatccaagaagtgaatgatcctcaaggtgtagcagaggaatttgtaggagagagggatgattgacgtcttcgtatagccctccatccatcccagttagcatggagggattttagggctaccattggctgggtagtggagtgttgaccaatcacagctcaggggcgtgattgtctcgtcctgggatcgcgagaggggtatatacagggaggccaggcagcctggagttagtcgaccgttgcgagacgttgagctgcggaagatgagtccaaagccgagagcctcgggacctccggccaaggccacggaggcaggaaagaggaagtcctcctctcagccgagccccagtgacccgaagaagaagactaccaaggtggccaagaagggaaaagcagttcgtagagggagacgcgggaagaaaggggctgcgacaaagatggcggccgtgacggcacctgaggcggagagcgcgccagcggcacccggccccagcgaccagcccagccaggagctccctcagcacgagctgccgccggaggagccagtgagcgaggggacccagcacgaccccctgagtcaggagagcgaggtggaagaaccactgagtcaggagagcgaggtggaagaaccactgactgtgtggatggccagcttttcccctgtctccgagagcaccgactaagttcaggcccagccgccagacctcagagatctcaccagcggggtgcttgccattctgaagataataaaatgaatgtgttgcaaa

SEQ ID NO: 34130 - DNA, 995 bp, Homo sapiens
  source 1..995: mol_type = unassigned DNA
atgtggatgctgggagaagtatgtgagatggaaaagttgtttcatggcatccaagaagtgaatgatcctcaaggtgtagcagaggaatctgtaggagagagggatgattgacgtcttcgtatagccctccatccatcccagttagcatggagggattttagggctaccattggctgggtagtggagtgttgaccaatcacagctcaggggcgtgattgtctcgtcctgggatcgcgagaggggtatatacagggaggccaggcagcctggagttagtcgaccgttgcgagacgttgagctgcggaagatgagtccaaagccgagagcctcgggacctccggccaaggccacggaggcaggaaagaggaagtcctcctctcagccgagccccagtgacccgaagaagaagactaccaaggtggccaagaagggaaaagcagttcgtagagggagacgcgggaagaaaggggctgcgacaaagatggcggccgtgacggcacctgaggcggagagcgggccagcggcacccggccccagcgaccagcccagccaggagctccctcagcacgagctgccgccggaggagccagtgagcgaggggacccagcacgaccccctgagtcaggagagcgagctggaggaaccactgagtcaggagagcgaggtggaagaaccactgagtcaggagagccaggtggaggaaccactgagtcaggagagcgaggtggaagaaccactgagtcaggagagccaggtggaggaaccactgagtcaggagagcgaggtggaggaaccactgagtcaggagagccaggtggaggaaccactgagtcaggagagcgagatggaagaactaccgagtgtgtagacggccagctactcccctatctccgagagcagcgactaagttcaggcccagccgccagacctcagagatctcaccagcggggtgcttgccattctgaagataataaaatgaatgtgttgcaaattga

SEQ ID NO: 34131 - DNA, 808 bp, Homo sapiens
  source 1..808: mol_type = unassigned DNA
atgtggatgctgggagaagtatgtgagatggaaaagttgtttcatggcatccaagaagtgaatgatcctcaaggtgtagcagaggaatctgtaggagagagggatgattgacgtcttcgtatagccctccatccatcccagttagcatggagggattttagggctaccattggctgggtagtggagtgttgaccaatcacagctcaggggcgtgattgtctcgtcctgggatcgcgagaggggtatatacagggaggccaggcagcctggagttagtcgaccgttgcgagacgttgagctgcggaagatgagtccaaagccgagagcctcgggacctccggccaaggccacggaggcaggaaagaggaagtcctcctctcagccgagccccagtgacccgaagaagaagactaccaaggtggccaagaagggaaaagcagttcgtagagggagacgcgggaagaaaggggctgcgacaaagatggcggccgtgacggcacctgaggcggagagcgggccagcggcacccggccccagcgaccagcccagccaggagctccctcagcacgagctgccgccggaggagccagtgagcgaggggacccagcacgaccccctgagtcaggagagcgagctggaggaaccactgagtcaggagagcgaggtggaagaaccactgagtcaggagagccaggtggaggaaccactgagtcaggagagcgaggtggaggaaccactgagtcaggagagccaggtggaggaaccactgagtcaggagagcgagatggaagaactaccgagtgtgtag

SEQ ID NO: 34132 - DNA, 682 bp, Homo sapiens
  source 1..682: mol_type = unassigned DNA
atgtggatgctgggagaagtatgtgagatggaaaagttgtttcatggcatccaagaagtgaatgatcctcaaggtgtagcagaggaatctgtaggagagagggatgattgacgtcttcgtatagccctccatccatcccagttagcatggagggattttagggctaccattggctgggtagtggagtgttgaccaatcacagctcaggggcgtgattgtctcgtcctgggatcgcgagaggggtatatacagggaggccaggcagcctggagttagtcgaccgttgcgagacgttgagctgcggaagatgagtccaaagccgagagcctcgggacctccggccaaggccacggaggcaggaaagaggaagtcctcctctcagccgagccccagtgacccgaagaagaagactaccaaggtggccaagaagggaaaagcagttcgtagagggagacgcgggaagaaaggggctgcgacaaagatggcggccgtgacggcacctgaggcggagagcgggccagcggcacccggccccagcgaccagcccagccaggagctccctcagcacgagctgccgccggaggagccagtgagcgaggggacccagcacgaccccctgagtcaggagagcgagctggaggaaccactgagtcaggaacggccagctactcccctatctccg

SEQ ID NO: 34133 - DNA, 550 bp, Homo sapiens
  source 1..550: mol_type = unassigned DNA
cgagaggggtatacacagggaggccaggcagcctggagttagtcgaccgttgcgagacgttgagctgcggcagatgagtccaaagccgagagcctcgggacctccggccaaggccaaggagacaggaaagaggaagtcctcctctcagccgagccccagtggcccgaagaagaagactaccaaggtggccgagaagggagaagcagttcgtggagggagacgcgggaagaaaggggctgcgacaaagatggcggccgtgacggcacctgaggcggagagcgggccagcggcacccggccccagcgaccagcccagccaggagctccctcagcacgagctgccgccggaggagccagtgagcgaggggacccagcacgaccccctgagtcaggagagcgagctggaggaaccactgagtaaggggcgcccatctactcccctatctccctgagcagcaactaagtttaggcccagctgccagacctcagagatctcaccagcagggtgcttcccatgttgatgacaataaaatgaatgtgttgcaaaccga

SEQ ID NO: 34134 - DNA, 3083 bp, Homo sapiens
  source 1..3083: mol_type = unassigned DNA
ctcactggcttcaggagctgaataccctcccaggcacacacaggtgggacacaaataagggttttggaaccactattttctcatcacgacagcaacttaaaatgcctgggaagatggtcgtgatccttggagcctcaaatatactttggataatgtttgcagcttctcaagcttttaaaatcgagaccaccccagaatctagatatcttgctcagattggtgactccgtctcattgacttgcagcaccacaggctgtgagtccccatttttctcttggagaacccagatagatagtccactgaatgggaaggtgacgaatgaggggaccacatctacgctgacaatgaatcctgttagttttgggaacgaacactcttacctgtgcacagcaacttgtgaatctaggaaattggaaaaaggaatccaggtggagatctactcttttcctaaggatccagagattcatttgagtggccctctggaggctgggaagccgatcacagtcaagtgttcagttgctgatgtatacccatttgacaggctggagatagacttactgaaaggagatcatctcatgaagagtcaggaatttctggaggatgcagacaggaagtccctggaaaccaagagtttggaagtaacctttactcctgtcattgaggatattggaaaagttcttgtttgccgagctaaattacacattgatgaaatggattctgtgcccacagtaaggcaggctgtaaaagaattgcaagtctacatatcacccaagaatacagttatttctgtgaatccatccacaaagctgcaagaaggtggctctgtgaccatgacctgttccagcgagggtctaccagctccagagattttctggagtaagaaattagataatgggaatctacagcacctttctggaaatgcaactctcaccttaattgctatgaggatggaagattctggaatttatgtgtgtgaaggagttaatttgattgggaaaaacagaaaagaggtggaattaattgttcaagagaaaccatttactgttgagatctcccctggaccccggattgctgctcagattggagactcagtcatgttgacatgtagtgtcatgggctgtgaatccccatctttctcctggagaacccagatagacagccctctgagcgggaaggtgaggagtgaggggaccaattccacgctgaccctgagccctgtgagttttgagaacgaacactcttatctgtgcacagtgacttgtggacataagaaactggaaaagggaatccaggtggagctctactcattccctagagatccagaaatcgagatgagtggtggcctcgtgaatgggagctctgtcactgtaagctgcaaggttcctagcgtgtacccccttgaccggctggagattgaattacttaagggggagactattctggagaatatagagtttttggaggatacggatatgaaatctctagagaacaaaagtttggaaatgaccttcatccctaccattgaagatactggaaaagctcttgtttgtcaggctaagttacatattgatgacatggaattcgaacccaaacaaaggcagagtacgcaaacactttatgtcaatgttgcccccagagatacaaccgtcttggtcagcccttcctccatcctggaggaaggcagttctgtgaatatgacatgcttgagccagggctttcctgctccgaaaatcctgtggagcaggcagctccctaacggggagctacagcctctttctgagaatgcaactctcaccttaatttctacaaaaatggaagattctggggtttatttatgtgaaggaattaaccaggctggaagaagcagaaaggaagtggaattaattatccaagttactccaaaagacataaaacttacagcttttccttctgagagtgtcaaagaaggagacactgtcatcatctcttgtacatgtggaaatgttccagaaacatggataatcctgaagaaaaaagcggagacaggagacacagtactaaaatctatagatggcgcctataccatccgaaaggcccagttgaaggatgcgggagtatatgaatgtgaatctaaaaacaaagttggctcacaattaagaagtttaacacttgatgttcaaggaagagaaaacaacaaagactatttttctcctgagcttctcgtgctctattttgcatcctccttaataatacctgccattggaatgataatttactttgcaagaaaagccaacatgaaggggtcatatagtcttgtagaagcacagaagtcaaaagtgtagctaatgcttgatatgttcaactggagacactatttatctgtgcaaatccttgatactgctcatcattccttgagaaaaacaatgagctgagaggcagacttccctgaatgtattgaacttggaaagaaatgcccatctatgtcccttgctgtgagcaagaagtcaaagtaaaacttgctgcctgaagaacagtaactgccatcaagatgagagaactggaggagttccttgatctgtatatacaataacataatttgtacatatgtaaaataaaattatgccatagcaagattgcttaaaatagcaacactctatatttagattgttaaaataactagtgttgcttggactattataatttaatgcatgttaggaaaatttcacattaatatttgctgacagctgacctttgtcatctttcttctattttattccctttcacaaaattttattcctatatagtttattgacaataatttcaggttttgtaaagatgccgggttttatatttttatagacaaataataagcaaagggagcactgggttgactttcaggtactaaatacctcaacctatggtataatggttgactgggtttctctgtatagtactggcatggtacggagatgtttcacgaagtttgttcatcagactcctgtgcaactttcccaatgtggcctaaaaatgcaacttctttttattttcttttgtaaatgtttaggtttttttgtatagtaaagtgataatttctggaattagaa

SEQ ID NO: 34135 - DNA, 2812 bp, Homo sapiens
  source 1..2812: mol_type = unassigned DNA
cgggcctcactggcttcaggagctgaataccctcccaggcacacacaggtgggacacaaataagggttttggaaccactattttctcatcacgacagcaacttaaaatgcctgggaagatggtcgtgatccttggagcctcaaatatactttggataatgtttgcagcttctcaagcttttaaaatcgagaccaccccagaatctagatatcttgctcagattggtgactccgtctcattgacttgcagcaccacaggctgtgagtccccatttttctcttggagaacccagatagatagtccactgaatgggaaggtgacgaatgaggggaccacatctacgctgacaatgaatcctgttagttttgggaacgaacactcttacctgtgcacagcaacttgtgaatctaggaaattggaaaaaggaatccaggtggagatctactcttttcctaaggatccagagattcatttgagtggccctctggaggctgggaagccgatcacagtcaagtgttcagttgctgatgtatacccatttgacaggctggagatagacttactgaaaggagatcatctcatgaagagtcaggaatttctggaggatgcagacaggaagtccctggaaaccaagagtttggaagtaacctttactcctgtcattgaggatattggaaaagttcttgtttgccgagctaaattacacattgatgaaatggattctgtgcccacagtaaggcaggctgtaaaagaattgcaagtctacatatcacccaagaatacagttatttctgtgaatccatccacaaagctgcaagaaggtggctctgtgaccatgacctgttccagcgagggtctaccagctccagagattttctggagtaagaaattagataatgggaatctacagcacctttctggaaatgcaactctcaccttaattgctatgaggatggaagattctggaatttatgtgtgtgaaggagttaatttgattgggaaaaacagaaaagaggtggaattaattgttcaagcattccctagagatccagaaatcgagatgagtggtggcctcgtgaatgggagctctgtcactgtaagctgcaaggttcctagcgtgtacccccttgaccggctggagattgaattacttaagggggagactattctggagaatatagagtttttggaggatacggatatgaaatctctagagaacaaaagtttggaaatgaccttcatccctaccattgaagatactggaaaagctcttgtttgtcaggctaagttacatattgatgacatggaattcgaacccaaacaaaggcagagtacgcaaacactttatgtcaatgttgcccccagagatacaaccgtcttggtcagcccttcctccatcctggaggaaggcagttctgtgaatatgacatgcttgagccagggctttcctgctccgaaaatcctgtggagcaggcagctccctaacggggagctacagcctctttctgagaatgcaactctcaccttaatttctacaaaaatggaagattctggggtttatttatgtgaaggaattaaccaggctggaagaagcagaaaggaagtggaattaattatccaagttactccaaaagacataaaacttacagcttttccttctgagagtgtcaaagaaggagacactgtcatcatctcttgtacatgtggaaatgttccagaaacatggataatcctgaagaaaaaagcggagacaggagacacagtactaaaatctatagatggcgcctataccatccgaaaggcccagttgaaggatgcgggagtatatgaatgtgaatctaaaaacaaagttggctcacaattaagaagtttaacacttgatgttcaaggaagagaaaacaacaaagactatttttctcctgagcttctcgtgctctattttgcatcctccttaataatacctgccattggaatgataatttactttgcaagaaaagccaacatgaaggggtcatatagtcttgtagaagcacagaagtcaaaagtgtagctaatgcttgatatgttcaactggagacactatttatctgtgcaaatccttgatactgctcatcattccttgagaaaaacaatgagctgagaggcagacttccctgaatgtattgaacttggaaagaaatgcccatctatgtcccttgctgtgagcaagaagtcaaagtaaaacttgctgcctgaagaacagtaactgccatcaagatgagagaactggaggagttccttgatctgtatatacaataacataatttgtacatatgtaaaataaaattatgccatagcaagattgcttaaaatagcaacactctatatttagattgttaaaataactagtgttgcttggactattataatttaatgcatgttaggaaaatttcacattaatatttgctgacagctgacctttgtcatctttcttctattttattccctttcacaaaattttattcctatatagtttattgacaataatttcaggttttgtaaagatgccgggttttatatttttatagacaaataataagcaaagggagcactgggttgactttcaggtactaaatacctcaacctatggtataatggttgactgggtttctctgtatagtactggcatggtacggagatgtttcacgaagtttgttcatcagactcctgtgcaactttcccaatgtggcctaaaaatgcaacttctttttattttcttttgtaaatgtttaggtttttttgtatagtaaagtgataatttctggaattagaa

SEQ ID NO: 34136 - DNA, 2475 bp, Homo sapiens
  source 1..2475: mol_type = unassigned DNA
ctggcttcaggagctgaataccctcccaggcacacacaggtgggacacaaataagggttttggaaccactattttctcatcacgacagcaacttaaaatgcctgggaagatggtcgtgatccttggagcctcaaatatactttggataatgtttgcagcttctcaagcttttaaaatcgagaccaccccagaatctagatatcttgctcagattggtgactccgtctcattgacttgcagcaccacaggctgtgagtccccatttttctcttggagaacccagatagatagtccactgaatgggaaggtgacgaatgaggggaccacatctacgctgacaatgaatcctgttagttttgggaacgaacactcttacctgtgcacagcaacttgtgaatctaggaaattggaaaaaggaatccaggtggagatctactcttttcctaaggatccagagattcatttgagtggccctctggaggctgggaagccgatcacagtcaagtgttcagttgctgatgtatacccatttgacaggctggagatagacttactgaaaggagatcatctcatgaagagtcaggaatttctggaggatgcagacaggaagtccctggaaaccaagagtttggaagtaacctttactcctgtcattgaggatattggaaaagttcttgtttgccgagctaaattacacattgatgaaatggattctgtgcccacagtaaggcaggctgtaaaagaattgcaagtctacatatcacccaagaatacagttatttctgtgaatccatccacaaagctgcaagaaggtggctctgtgaccatgacctgttccagcgagggtctaccagctccagagattttctggagtaagaaattagataatgggaatctacagcacctttctggaaatgcaactctcaccttaattgctatgaggatggaagattctggaatttatgtgtgtgaaggagttaatttgattgggaaaaacagaaaagaggtggaattaattgttcaagttgcccccagagatacaaccgtcttggtcagcccttcctccatcctggaggaaggcagttctgtgaatatgacatgcttgagccagggctttcctgctccgaaaatcctgtggagcaggcagctccctaacggggagctacagcctctttctgagaatgcaactctcaccttaatttctacaaaaatggaagattctggggtttatttatgtgaaggaattaaccaggctggaagaagcagaaaggaagtggaattaattatccaagttactccaaaagacataaaacttacagcttttccttctgagagtgtcaaagaaggagacactgtcatcatctcttgtacatgtggaaatgttccagaaacatggataatcctgaagaaaaaagcggagacaggagacacagtactaaaatctatagatggcgcctataccatccgaaaggcccagttgaaggatgcgggagtatatgaatgtgaatctaaaaacaaagttggctcacaattaagaagtttaacacttgatgttcaaggaagagaaaacaacaaagactatttttctcctgagcttctcgtgctctattttgcatcctccttaataatacctgccattggaatgataatttactttgcaagaaaagccaacatgaaggggtcatatagtcttgtagaagcacagaagtcaaaagtgtagctaatgcttgatatgttcaactggagacactatttatctgtgcaaatccttgatactgctcatcattccttgagaaaaacaatgagctgagaggcagacttccctgaatgtattgaacttggaaagaaatgcccatctatgtcccttgctgtgagcaagaagtcaaagtaaaacttgctgcctgaagaacagtaactgccatcaagatgagagaactggaggagttccttgatctgtatatacaataacataatttgtacatatgtaaaataaaattatgccatagcaagattgcttaaaatagcaacactctatatttagattgttaaaataactagtgttgcttggactattataatttaatgcatgttaggaaaatttcacattaatatttgctgacagctgacctttgtcatctttcttctattttattccctttcacaaaattttattcctatatagtttattgacaataatttcaggttttgtaaagatgccgggttttatatttttatagacaaataataagcaaagggagcactgggttgactttcaggtactaaatacctcaacctatggtataatggttgactgggtttctctgtatagtactggcatggtacggagatgtttcacgaagtttgttcatcagactcctgtgcaactttcccaatgtggcctaaaaatgcaacttctttttattttcttttgtaaatgtttaggtttttttgtatagtaaagtgataatttctgga

SEQ ID NO: 34137 - DNA, 2317 bp, Homo sapiens
  source 1..2317: mol_type = unassigned DNA
ctgcatcgggcctcactggcttcaggagctgaataccctcccaggcacacacaggtgggacacaaataagggttttggaaccactattttctcatcacgacagcaacttaaaatgcctgggaagatggtcgtgatccttggagcctcaaatatactttggataatgtttgcagcttctcaagcttttaaaatcgagaccaccccagaatctagatatcttgctcagattggtgactccgtctcattgacttgcagcaccacaggctcttttcctaaggatccagagattcatttgagtggccctctggaggctgggaagccgatcacagtcaagtgttcagttgctgatgtatacccatttgacaggctggagatagacttactgaaaggagatcatctcatgaagagtcaggaatttctggaggatgcagacaggaagtccctggaaaccaagagtttggaagtaacctttactcctgtcattgaggatattggaaaagttcttgtttgccgagctaaattacacattgatgaaatggattctgtgcccacagtaaggcaggctgtaaaagaattgcaagtctacatatcacccaagaatacagttatttctgtgaatccatccacaaagctgcaagaaggtggctctgtgaccatgacctgttccagcgagggtctaccagctccagagattttctggagtaagaaattagataatgggaatctacagcacctttctggaaatgcaactctcaccttaattgctatgaggatggaagattctggaatttatgtgtgtgaaggagttaatttgattgggaaaaacagaaaagaggtggaattaattgttcaagagaaaccatttactgttgagatctcccctggaccccggattgctgctcagattggagactcagtcatgttgacatgtagtgtcatgggctgtgaatccccatctttctcctggagaacccagatagacagccctctgagcgggaaggtgaggagtgaggggaccaattccacgctgaccctgagccctgtgagttttgagaacgaacactcttatctgtgcacagtgacttgtggacataagaaactggaaaagggaatccaggtggagctctactcattccctagagatccagaaatcgagatgagtggtggcctcgtgaatgggagctctgtcactgtaagctgcaaggttcctagcgtgtacccccttgaccggctggagattgaattacttaagggggagactattctggagaatatagagtttttggaggatacggatatgaaatctctagagaacaaaagtttggaaatgaccttcatccctaccattgaagatactggaaaagctcttgtttgtcaggctaagttacatattgatgacatggaattcgaacccaaacaaaggcagagtacgcaaacactttatgtcaatgttgcccccagagatacaaccgtcttggtcagcccttcctccatcctggaggaaggcagttctgtgaatatgacatgcttgagccagggctttcctgctccgaaaatcctgtggagcaggcagctccctaacggggagctacagcctctttctgagaatgcaactctcaccttaatttctacaaaaatggaagattctggggtttatttatgtgaaggaattaaccaggctggaagaagcagaaaggaagtggaattaattatccaagttactccaaaagacataaaacttacagcttttccttctgagagtgtcaaagaaggagacactgtcatcatctcttgtacatgtggaaatgttccagaaacatggataatcctgaagaaaaaagcggagacaggagacacagtactaaaatctatagatggcgcctataccatccgaaaggcccagttgaaggatgcgggagtatatgaatgtgaatctaaaaacaaagttggctcacaattaagaagtttaacacttgatgttcaaggaagagaaaacaacaaagactatttttctcctgagcttctcgtgctctattttgcatcctccttaataatacctgccattggaatgataatttactttgcaagaaaagccaacatgaaggggtcatatagtcttgtagaagcacagaagtcaaaagtgtagctaatgcttgatatgttcaactggagacactatttatctgtgcaaatccttgatactgctcatcattccttgagaaaaacaatgagctgagaggcagacttccctgaatgtattgaacttggaaagaaatgcccatctatgtcccttgctgtgagcaagaagtcaaagtaa

SEQ ID NO: 34138 - DNA, 4633 bp, Homo sapiens
  source 1..4633: mol_type = unassigned DNA
gtggccgcgctcggcgctgccatgttgaggagccgccgctgccgttgccgccgccgccgccgccgctttgttgtcgcctcctccggctgaggaggctccccgagcggggggagtggggaggaggggggtcggccgccgcagccatggaggccaactggaccgcgttcctgttccaggcccatgaagcttcccatcaccaacagcaggcagcacagaacagcttgctgcccctcctgagctctgccgtggagccccctgatcagaaaccattgcttccaataccaataactcagaaacctcagggtgcaccagaaacattaaaggatgccattgggattaaaaaagaaaaacccaaaacttcatttgtgtgcacttactgcagtaaagctttcagggacagctatcacctgaggcgccacgaatcctgccacacagggatcaagttggtgtcccggccaaagaaaacccccaccacggtggttccccttatctctaccatcgctggggacagcagccgaacttcgttggtctcgaccattgcaggcatcttgtcaacagtcactacatcttcctcgggcaccaaccccagtagcagtgccagcaccacagctatgccagtgacccagtctgtcaagaaacccagtaagcctgtcaagaagaaccatgcttgtgagatgtgtgggaaggccttccgagatgtgtaccatctcaatcgacacaagctctcccattcagatgagaaaccctttgagtgtcctatttgtaatcagcgcttcaagaggaaggaccggatgacttaccatgtgaggtctcatgaaggaggcatcaccaaaccctatacttgcagtgtttgtgggaaaggcttctcaaggcctgaccacttaagctgtcatgtaaaacatgtccattcaacagaaagacccttcaaatgccaaacgtgcactgctgcctttgccaccaaagacagactgcggacacacatggtgcgccatgaaggcaaggtatcatgtaacatctgtgggaagctcctgagtgcagcatacatcaccagccacttaaagactcatgggcagagccaaagtatcaactgtaatacatgtaaacaaggcatcagtaaaacatgcatgagtgaagagaccagtaaccaaaagcagcagcagcagcagcagcagcagcagcagcagcagcaacaacaacaacaacaacatgtgacaagctggccagggaagcaagtagaaacactgagactgtgggaagaagctgttaaagcaaggaagaaagaagctgctaacctgtgccaaacctccacggctgctacgacacctgtgactctcactactccattcagtataacatcctctgtgtcgtctgggactatgtcaaacccagtcacagtggcagctgcaatgagcatgagaagtccagtaaatgtttcaagtgcagttaacataaccagcccaatgaacatagggcatcctgtaactataaccagtccattatccatgacctctcctttaacactcactaccccagtcaacctccccacccccgtcactgccccagtgaatatagcacaccctgtcaccatcacatctccaatgaatctacccacacctatgacattagccgcccctctcaatatagcaatgagacctgtagagagcatgcctttcttgccccaagctttgcctacatcaccgccttggtaaacagtattataaaatcaaaatatgggtaaaagtaaatatttaccagcaacttaacttttagttgattaaagcaaaaagtaaaccatgaaattgggagattttattacattagttaataagagtgtggtagcatttttctccaatttggctgggattattcaaagtagggtgtgtatgtaacttatcactggaccactttagtttaatcagaaattccttttagctgacaacattgcttaaacaggatagtagttggcaagatgaaatgccagaattaaaaccaatcataagtagaacccacttcaaaataaaaaaacagcattactatttctaatcccaaggaatcactttattgtaaacactagcagaactcttctccctatacaaggtggatggctgattttaacctgaaattttaaatccacagattgagagctagtgtagaattgtctgtgtttattgtttttatgagtaaatacatgcattgtcataataaaatgcatttcagagaatatgcattttacctttgggaatatgttaatttcaggcagcattccctatgggaaaggtgataccagctctgatatgcaaagcatatgataatttatcattctaacttcaacgtataatagggattgtgacctgatatttggagatgtaaatattgctcagcatattaatcccgatggaatatagcattgtagttgactttttaaaaaaaaaaaaaatttaaaaaaaatctacaaattgtgttttgctaagaaaagcctcaactgacagaggagaagtcaagtgtgtggacaggcaagctcctaataaacagagtccagtgggattcctatttaggagccaaggagtactttggaacagtacaaatatattgctttaaattggaagacgctggaggcactgggatgtgatatgcccctctctctcccaatcagagcctgttgatattacaacagggacagatgtgttagttgctcactagagtttatgtcttatattaaattgtatacagtttttattctaaccactaactaggtagtgtatgccccttcagaacatgcagagtgtatctttttttaaatttctccttccgtttcttaagtattgcgcagatttgttcaactttgtaaatatggacatcactttttttttctttgagaaaacacttgtatcagctttgtggtgttttcagggagacagctgtctgcattccctgtagaaacccagcaatgattatgcacgttgagacatgtgctttttatttcttagcaagatattttatctctgtacataaagtagaaaccaaaagctagggaaacagatactctttacaccatcatgccacgcattgtttttaaagcattgcgttaaaaaaaaaattaactaaaccaagatgctgtgattttttaagttgcaatatgtttttggtttttttcattttttaatcattgcagttaagagaaatggaaattagttgtgttaatcttgcagaatgtttgcaggactgactatcaaactggatgatttccatttataccctactgtgtcagttcaagcatcaaaataccttgcatctgagacagacttcctacatcagggacaggtatctgtgtgtcattatacaaaacagttctagggggttgaactacatagtaaaaaaataaaataaatagtacttagtgtaaaataattttataaatgatcttttgtactttaggacattaaattgtacaacttttgtatatataaaagcttaggaactttctgtttagcaggaaggcaacacattcctacacttttaatgtatatgtttgttataatgtccatgtaaacatgccctatgtttgtgccttttaattagtttgtctcaataaacaaaatgtagagaaaaatatgtagctatgactttgttacaactgttcttatccacagtacaaaaatggtttgtttttaatatgtagagcattatgtgtggactactggaaggactcgtgtagggaaagcccaagaatgaccttgctgaggcctggattgggaggcacagtggccacatttggaggaagttcacatttcctggcatgcagacccaaaactgggttctggctctgcctgctgggatctgttatctctggtgggctggcagtcataattcacaattcagacagcccaggcttcctccacagtggtccaaggagcagtcctcagtgggggcaggtgtgggccctacccctaagctagaatgtggttgtcagaaccctgaaagtattagttctaaaaaaaaaaagatatatactagaagtaattgttttatcaattcattgtataataaacaggagtgagacttcattgtatgacttcagttaaaatactattttgtatgcattctttattcacttaagaagcttgtctgcaataataaagccacgtcatgtcttcttttgggagggagagagtcgatggcaggagggggttttgggtgggccactgaaaaggggtaccgaataggttgtgtgatgaaattctgtgtcttggaactggaattgagtttcgatgttgatgaactgattcaaccaggtgttgaaggcacgacagccactgctctacgaaaaggcagagtacgtttttcccttctggttgtaacctggttgagagcttcccctttatcagattggcagctaaacagttgtattagataatccttaaatctgacatccagcctgttacgctctagggctcgctgcttggcctgcgtttgctttttattgtgtatccgttcccctcctacggtgtgctcctgaatgaaggtttctatgtaagcagatgatgattttacctgtcaataccagcactgtattactaacatgcaaaatactgcagatttattttgaaaattaaagttaactggtcacaaatgt

SEQ ID NO: 34139 - DNA, 2321 bp, Homo sapiens
  source 1..2321: mol_type = unassigned DNA
agcggggggagtggggaggaggggggtcggccgccgcagccatggaggccaactggaccgcgttcctgttccaggcccatgaagcttcccatcaccaacagcaggcagcacagaacagcttgctgcccctcctgagctctgccgtggagccccctgatcagaaaccattgcttccaataccaataactcagaaacctcagggtgcaccagaaacattaaaggatgccattgggattaaaaaagaaaaacccaaaacttcatttgtgtgcacttactgcagtaaagctttcagggacagctatcacctgaggcgccacgaatcctgccacacagggatcaagttggtgtcccggccaaagaaaacccccaccacggtggttccccttatctctaccatcgctggggacagcagccgaacttcgttggtctcgaccattgcaggcatcttgtcaacagtcactacatcttcctcgggcaccaaccccagtagcagtgccagcaccacagctatgccagtgacccagtctgtcaagaaacccagtaagcctgtcaagaagaaccatgcttgtgagatgtgtgggaaggccttccgagatgtgtaccatctcaatcgacacaagctctcccattcagatgagaaaccctttgagtgtcctatttgtaatcagcgcttcaagaggaaggaccggatgacttaccatgtgaggtctcatgaaggaggcatcaccaaaccctatacttgcagtgtttgtgggaaaggcttctcaaggcctgaccacttaagctgtcatgtaaaacatgtccattcaacagaaagacccttcaaatgccaaacgtgcactgctgcctttgccaccaaagacagactgcggacacacatggtgcgccatgaaggcaaggtatcatgtaacatctgtgggaagctcctgagtgcagcatacatcaccagccacttaaagactcatgggcagagccaaagtatcaactgtaatacatgtaaacaaggcatcagtaaaacatgcatgagtgaagagaccagtaaccaaaagcagcagcagcagcagcagcagcagcagcagcagcagcaacaacaacaacaacaacatgtgacaagctggccagggaagcaagtagaaacactgagactgtgggaagaagctgttaaagcaaggaagaaagaagctgctaacctgtgccaaacctccacggctgctacgacacctgtgactctcactactccattcagtataacatcctctgtgtcgtctgggactatgtcaaacccagtcacagtggcagctgcaatgagcatgagaagtccagtaaatgtttcaagtgcagttaacataaccagcccaatgaacatagggcatcctgtaactataaccagtccattatccatgacctctcctttaacactcactaccccagtcaacctccccacccccgtcactgccccagtgaatatagcacaccctgtcaccatcacatctccaatgaatctacccacacctatgacattagccgcccctctcaatatagcaatgagacctgtagagagcatgcctttcttgccccaagctttgcctacatcaccgccttggtaaacagtattataaaatcaaaatatgggtaaaagtaaatatttaccagcaacttaacttttagttgattaaagcaaaaagtaaaccatgaaattgggagattttattacattagttaataagagtgtggtagcatttttctccaatttggctgggattattcaaagtagggtgtgtatgtaacttatcactggaccactttagtttaatcagaaattccttttagctgacaacattgcttaaacaggatagtagttggcaagatgaaatgccagaattaaaaccaatcataagtagaacccacttcaaaataaaaaaacagcattactatttctaatcccaaggaatcactttattgtaaacactagcagaactcttctccctatacaaggtggatggctgattttaacctgaaattttaaatccacagattgagagctagtgtagaattgtctgtgtttattgtttttatgagtaaatacatgcattgtcataataaaatgcatttcagagaatatgcattttacctttgggaatatgttaatttcaggcagcattccctatgggaaaggtgataccagctctgatatgcaaagcatatgataatttatcattctaacttcaacgtataatagggattgtgacctgatatttggagatgtaaatattgctcagcatattaatcccgatggaatatagcattgtagttgacttttt

SEQ ID NO: 34140 - DNA, 2773 bp, Homo sapiens
  source 1..2773: mol_type = unassigned DNA
ggggccacagcgccagcgccactctgccaggctcccggccatcgcccgcctggtgcgccgcccgccagctctttgcccgcgcggggccgcccgccgcgggctcagggcagaccatgcgcccgccaagtccgctgcccgcccgctggctatgcgtgctggcaggcgccctcgcctgggcccttgggccggcgggcggccaggcggccaggctgcaggaggagtgtgactatgtgcagatgatcgaggtgcagcacaagcagtgcctggaggaggcccagctggagaatgagacaataggctgcagcaagatgtgggacaacctcacctgctggccagccacccctcggggccaggtagttgtcttggcctgtcccctcatcttcaagctcttctcctccattcaaggccgcaatgtaagccgcagctgcaccgacgaaggctggacgcacctggagcctggcccgtaccccattgcctgtggtttggatgacaaggcagcgagtttggatgagcagcagaccatgttctacggttctgtgaagaccggctacaccattggctacggcctgtccctcgccacccttctggtcgccacagctatcctgagcctgttcaggaagctccactgcacgcggaactacatccacatgcacctcttcatatccttcatcctgagggctgccgctgtcttcatcaaagacttggccctcttcgacagcggggagtcggaccagtgctccgagggctcggtgggctgtaaggcagccatggtctttttccaatattgtgtcatggctaacttcttctggctgctggtggagggcctctacctgtacaccctgcttgccgtctccttcttctctgagcggaagtacttctgggggtacatactcatcggctggggggtacccagcacattcaccatggtgtggaccatcgccaggatccattttgaggattatgggtgctgggacaccatcaactcctcactgtggtggatcataaagggccccatcctcacctccatcttggtaaacttcatcctgtttatttgcatcatccgaatcctgcttcagaaactgcggcccccagatatcaggaagagtgacagcagtccatactcaaggctagccaggtccacactcctgctgatccccctgtttggagtacactacatcatgttcgccttctttccggacaattttaagcctgaagtgaagatggtctttgagctcgtcgtggggtctttccagggttttgtggtggctatcctctactgcttcctcaatggtgaggtgcaggcggagctgaggcggaagtggcggcgctggcacctgcagggcgtcctgggctggaaccccaaataccggcacccgtcgggaggcagcaacggcgccacgtgcagcacgcaggtttccatgctgacccgcgtcagcccaggtgcccgccgctcctccagcttccaagccgaagtctccctggtctgaccaccaggatcccaggggcccaaggcggcccctcccgccccttcccactcaccccggcagacgccggggacagaggcctgcccgggcgcggccagccccggccctgggctcggaggctgcccccggccccctggtctctggtccggacactcctagagaacgcagccctagagcctgcctggagcgtttctagcaagtgagagagatgggagctcctctcctggaggattgcaggtggaactcagtcattagactcctcctccaaaggccccctacgccaatcaagggcaaaaagtctacatactttcatcctgactctgccccctgctggctcttctgcccaattggaggaaagcaaccggtggatcctcaaacaacactggtgtgacctgagggcagaaaggttctgcccgggaaggtcaccagcaccaacaccacggtagtgcctgaaatttcaccattgctgtcaagttcctttgggttaagcattaccactcaggcatttgactgaagatgcagctcactaccctattctctctttacgcttagttatcagctttttaaagtgggttattctggagtttttgtttggagagcacacctatcttagtggttccccaccgaagtggactggcccctgggtcagtctggtgggaggacggtgcaacccaaggactgagggactctgaagcctctgggaaatgagaaggcagccaccagcgaatgctaggtctcggactaagcctacctgctctccaagtctcagtggcttcatctgtcaagtgggatctgtcacaccagccatacttatctctctgtgctgtggaagcaacaggaatcaagagctgccctccttgtccacccacctatgtgccaactgttgtaactaggctcagagatgtgcacccatgggctctgacagaaagcagatacctcaccctgctacacatacaggatttgaactcagatctgtctgataggaatgtgaaagcacggactcttactgctaacttttgtgtatcgtaaccagccagatcctcttggttatttgtttaccacttgtattattaatgccattatccctgaatcccccttgccaccccaccctccctggagtgtggctgaggaggcctccatctcatgtatcatctggataggagcctgctggtcacagcctcctctgtctgcccttcaccccagtggccactcagcttcctacccacacctctgccagaagatcccctcaggactgcaacaggcttgtgcaacaataaatgttggcttgg

SEQ ID NO: 34141 - DNA, 3161 bp, Homo sapiens
  source 1..3161: mol_type = unassigned DNA
attttcccagcttactagtggaaaagcagcttctttcccacagttccagcaaaagccccagggctgatgctcattggcccaggttggggcatgtgaccattggcaagactcccattggccaggcctggggcaggtgctcactactggagccagagcggagtataagccctacccaatcactgaactacgtgggtcaagagtaaaggagctgtggcttccccccaatcagaagggcactggatgatggatgaactctgtgtggtgcgtcttcacactgacaccaggaggataaggaagtgactccctcagctgagtggctggcatgtgccaggctagagcagcttggctatggcagaacatccagccccaccgtgtggacggcagagatgaggaaactggtgtggggttgccggggccagcaaccacttttctaaagccaaagacgcagaaggtgctgccagtccaacgcttcctccatggaggccttcacccacccacacccatctaagagttcccaagacctgttttttctggctattcctagacagccatcacccccactcacatgtcttccacaagggcggccaggcggccaggctgcaggaggagtgtgactatgtgcagatgatcgaggtgcagcacaagcagtgcctggaggaggcccagctggagaatgagacaataggctgcagcaagatgtgggacaacctcacctgctggccagccacccctcggggccaggtagttgtcttggcctgtcccctcatcttcaagctcttctcctccattcaaggccgcaatgtaagccgcagctgcaccgacgaaggctggacgcacctggagcctggcccgtaccccattgcctgtggtttggatgacaaggcagcgagtttggatgagcagcagaccatgttctacggttctgtgaagaccggctacaccattggctacggcctgtccctcgccacccttctggtcgccacagctatcctgagcctgttcaggaagctccactgcacgcggaactacatccacatgcacctcttcatatccttcatcctgagggctgccgctgtcttcatcaaagacttggccctcttcgacagcggggagtcggaccagtgctccgagggctcggtgggctgtaaggcagccatggtctttttccaatattgtgtcatggctaacttcttctggctgctggtggagggcctctacctgtacaccctgcttgccgtctccttcttctctgagcggaagtacttctgggggtacatactcatcggctggggggtacccagcacattcaccatggtgtggaccatcgccaggatccattttgaggattatgggtgctgggacaccatcaactcctcactgtggtggatcataaagggccccatcctcacctccatcttggtaaacttcatcctgtttatttgcatcatccgaatcctgcttcagaaactgcggcccccagatatcaggaagagtgacagcagtccatactcaaggctagccaggtccacactcctgctgatccccctgtttggagtacactacatcatgttcgccttctttccggacaattttaagcctgaagtgaagatggtctttgagctcgtcgtggggtctttccagggttttgtggtggctatcctctactgcttcctcaatggtgaggtgcaggcggagctgaggcggaagtggcggcgctggcacctgcagggcgtcctgggctggaaccccaaataccggcacccgtcgggaggcagcaacggcgccacgtgcagcacgcaggtttccatgctgacccgcgtcagcccaggtgcccgccgctcctccagcttccaagccgaagtctccctggtctgaccaccaggatcccaggggcccaaggcggcccctcccgccccttcccactcaccccggcagacgccggggacagaggcctgcccgggcgcggccagccccggccctgggctcggaggctgcccccggccccctggtctctggtccggacactcctagagaacgcagccctagagcctgcctggagcgtttctagcaagtgagagagatgggagctcctctcctggaggattgcaggtggaactcagtcattagactcctcctccaaaggccccctacgccaatcaagggcaaaaagtctacatactttcatcctgactctgccccctgctggctcttctgcccaattggaggaaagcaaccggtggatcctcaaacaacactggtgtgacctgagggcagaaaggttctgcccgggaaggtcaccagcaccaacaccacggtagtgcctgaaatttcaccattgctgtcaagttcctttgggttaagcattaccactcaggcatttgactgaagatgcagctcactaccctattctctctttacgcttagttatcagctttttaaagtgggttattctggagtttttgtttggagagcacacctatcttagtggttccccaccgaagtggactggcccctgggtcagtctggtgggaggacggtgcaacccaaggactgagggactctgaagcctctgggaaatgagaaggcagccaccagcgaatgctaggtctcggactaagcctacctgctctccaagtctcagtggcttcatctgtcaagtgggatctgtcacaccagccatacttatctctctgtgctgtggaagcaacaggaatcaagagctgccctccttgtccacccacctatgtgccaactgttgtaactaggctcagagatgtgcacccatgggctctgacagaaagcagatacctcaccctgctacacatacaggatttgaactcagatctgtctgataggaatgtgaaagcacggactcttactgctaacttttgtgtatcgtaaccagccagatcctcttggttatttgtttaccacttgtattattaatgccattatccctgaatcccccttgccaccccaccctccctggagtgtggctgaggaggcctccatctcatgtatcatctggataggagcctgctggtcacagcctcctctgtctgcccttcaccccagtggccactcagcttcctacccacacctctgccagaagatcccctcaggactgcaacaggcttgtgcaacaataaatgttggcttgg

SEQ ID NO: 34142 - DNA, 1393 bp, Homo sapiens
  source 1..1393: mol_type = unassigned DNA
agctctggggccacagcgccagcgccactctgccaggctcccggccatcgcccgcctggtgcgccgcccgccagctctttgcccgcgcggggccgcccgccgcgggctcagggcagaccatgcgcccgccaagtccgctgcccgcccgctggctatgcgtgctggcaggcgccctcgcctgggcccttgggccggcggctgcagcaagatgtgggacaacctcacctgctggccagccacccctcggggccaggtagttgtcttggcctgtcccctcatcttcaagctcttctcctccattcaaggccgcaatgtaagccgcagctgcaccgacgaaggctggacgcacctggagcctggcccgtaccccattgcctgtggtttggatgacaaggcagcgagtttggatgaggtgggctgtaaggcagccatggtctttttccaatattgtgtcatggctaacttcttctggctgctggtggagggcctctacctgtacaccctgcttgccgtctccttcttctctgagcggaagtacttctgggggggtacccagcacattcaccatggtgtggaccatcgccaggatccattttgaggattatgggtgctgggacaccatcaactcctcactgtggtggatcataaagggccccatcctcacctccatcttggtaaacttcatcctgtttatttgcatcatccgaatcctgcttcagaaactgcggcccccagatatcaggaagagtgacagcagtccatactcaaggctagccaggtccacactcctgctgatccccctgtttggagtacactacatcatgttcgccttctttccggacaattttaagcctgaagtgaagatggtctttgagctcgtcgtggggtctttccagggttttgtggtggctatcctctactgcttcctcaatggtgaggtgcaggcggagctgaggcggaagtggcggcgctggcacctgcagggcgtcctgggctggaaccccaaataccggcacccgtcgggaggcagcaacggcgccacgtgcagcacgcaggtttccatgctgacccgcgtcagcccaggtgcccgccgctcctccagcttccaagccgaagtctccctggtctgaccaccaggatcccaggggcccaaggcggcccctcccgccccttcccactcaccccggcagacgccggggacagaggcctgcccgggcgcggccagccccggccctgggctcggaggctgcccccggccccctggtctctggtccggacactcctagagaacgcagccctagagcctgcctggagcgtttctagcaagtgagagagatgggagctcctctcctggaggattgcaggtggaactcagtcattagactcctcctcc

SEQ ID NO: 34143 - DNA, 1502 bp, Homo sapiens
  source 1..1502: mol_type = unassigned DNA
ctcttagctctggggccacagcgccagcgccactctgccaggctcccggccatcgcccgcctggtgcgccgcccgccagctctttgcccgcgcggggccgcccgccgcgggctcagggcagaccatgcgcccgccaagtccgctgcccgcccgctggctatgcgtgctggcaggcgccctcgcctgggcccttgggccggcggctgcagcaagatgtgggacaacctcacctgctggccagccacccctcggggccaggtagttgtcttggcctgtcccctcatcttcaagctcttctcctccattcaaggccgcaatgtaagccgcagctgcaccgacgaaggctggacgcacctggagcctggcccgtaccccattgcctgtggtttggatgacaaggcagcgagtttggatgagcagaccatgttctacggttctgtgaagaccggctacaccattggctacggcctgtccctcgccacccttctggtcgccacagctatcctgagcctgttcaggaagctccactgcacgcggaactacatccacatgcacctcttcatatccttcatcctgagggctgccgctgtcttcatcaaagacttggccctcttcgacagcggggagtcggaccagtgctccgagggctcggtgggctgtaaggcagccatggtctttttccaatattgtgtcatggctaacttcttctggctgctggtggagggcctctacctgtacaccctgcttgccgtctccttcttctctgagcggaagtacttctgggggtacatactcatcggctggggggtacccagcacattcaccatggtgtggaccatcgccaggatccattttgaggattatgggtgctgggacaccatcaactcctcactgtggtggatcataaagggccccatcctcacctccatcttggtaaacttcatcctgtttatttgcatcatccgaatcctgcttcagaaactgcggcccccagatatcaggaagagtgacagcagtccatactcaaggctagccaggtccacactcctgctgatccccctgtttggagtacactacatcatgttcgccttctttccggacaattttaagcctgaagtgaagatggtctttgagctcgtcgtggggtctttccagggttttgtggtggctatcctctactgcttcctcaatggtgaggtgcaggcggagctgaggcggaagtggcggcgctggcacctgcagggcgtcctgggctggaaccccaaataccggcacccgtcgggaggcagcaacggcgccacgtgcagcacgcaggtttccatgctgacccgcgtcagcccaggtgcccgccgctcctccagcttccaagccgaagtctccctggtctgaccaccaggatcccaggggcccaaggcggcccctcccgccccttcccactcaccccggcagacgccggggacagaggcctgcccgggcgcggccagccccggccctgggctcgg

SEQ ID NO: 34144 - DNA, 3944 bp, Homo sapiens
  source 1..3944: mol_type = unassigned DNA
gtgcattgagcgcgctccagctgccgggacggagggggcggcccccgcgctcgggcgctcggctacagctgcggggcccgaggtctccgcgcactcgctcccggcccatgctggaggcggcggaaccgcggggacctaggacggaggcggcgggcgctgggcggcccccggcacgctgagctcgggatgcggacgctgctgcctcccgcgctgctgacctgctggctgctcgcccccgtgaacagcattcacccagaatgccgatttcatctggaaatacaggaggaagaaacaaaatgtgcagagcttctgaggtctcaaacagaaaaacacaaagcctgcagtggcgtctgggacaacatcacgtgctggcggcctgccaatgtgggagagaccgtcacggtgccctgcccaaaagtcttcagcaatttttacagcaaagcaggaaacataagcaaaaactgtacgagtgacggatggtcagagacgttcccagatttcgtcgatgcctgtggctacagcgacccggaggatgagagcaagatcacgttttatattctggtgaaggccatttatacactgggctacagtgtctctctgatgtctcttgcaacaggaagcataattctgtgcctcttcaggaagctgcactgcaccaggaattacatccacctgaacctgttcctgtccttcatcctgagagccatctcagtgctggtcaaggacgacgttctctactccagctctggcacgttgcactgccctgaccagccatcctcctgggtgggctgcaagctgagcctggtcttcctgcagtactgcatcatggccaacttcttctggctgctggtggaggggctctacctccacaccctcctggtggccatgctcccccctagaaggtgcttcctggcctacctcctgatcggatggggcctccccaccgtctgcatcggtgcatggactgcggccaggctctacttagaagacaccggttgctgggatacaaacgaccacagtgtgccctggtgggtcatacgaataccgattttaatttccatcatcgtcaattttgtccttttcattagtattatacgaattttgctgcagaagttaacatccccagatgtcggcggcaacgaccagtctcagtacaagaggctggccaagtccacgctcctgcttatcccgctgttcggcgtccactacatggtgtttgccgtgtttcccatcagcatctcctccaaataccagatactgtttgagctgtgcctcgggtcgttccagggcctggtggtggccgtcctctactgtttcctgaacagtgaggtgcagtgcgagctgaagcgaaaatggcgaagccggtgcccgaccccgtccgcgagccgggattacagggtctgcggttcctccttctcccgcaacggctcggagggcgccctgcagttccaccgcggctcccgcgcccagtccttcctgcaaacggagacctcggtcatctagccccacccctgcctgtcggacgcggcgggaggcccacggttcggggcttctgcggggctgagacgccggcttcctccttccagatgcccgagcaccgtgtcgggcaggtcagcgcggtcctgactccgtcaagctggttgtccactaaaccccatacctggaattggagtcgtgttgtcattgactcgatttaaactccagcatttagataatcttgtgcaaaatgtgtttcagccgtatagtggatccacttttttttttttttttttttttgagacggagtctcgctctgtcgcccaggctggactgcagtggcctgatctctgctccctgcaagctccgcctcccgggttcacgccattctcctgcctcagcctcccatagctgggactacaggcgcccgccaacacgcctggctaattttttgtatttttagtagagacagggtttcaccatgttagccaggatggtctcgatctcctgacctcgtgatgggcccgcctcggcctcccaaagtgctgggattaaggcgtgagccactgcgcccggcccaagagaataggggagccaaggaggaaatgtggaaacgcagttgtgtggcccagcacgagcctgggcgaccaccgggtgacatccgtcccacatcagggcggcctcccaggtcccataagggtagccccctcatctgcaggacagagggaagccagtcagggcccccctgacgttaggaccaggagaaatcaacaggagggcagcccgtcctctctcttggggcgcccacccggcccggctgagccctgccccacccaactccacagggctgttttgcctccccacggaaggcgggctgaggagacaaccagatcaggagagcaaggtcatgaaggaggggacctctccacacaggtgttccgtgggaccctcagcagctctggctctgcctcaggaggtcacctgccgccctgtgggagccgcagagcctgacgctcagccccaggccagctgcggccaggcctgcgggcccctggtgatggggttacgtggggtgcgggatacagctgagtgggaaccggaaacctattctctttttaacaaaaataatcttaggataagaattattttaacaacatataaaactgtttcaagccctcctccccagagctggcgctcagcagccctagcggctgctccttcaggcgaagggtggtttgcagatgtggggagggtgtctggggacgttgctgagccagctgcagaagggtggggatatcagggcacagtctccatgtgtgtgccaagccctggcccccacagcgctcgatggacctcagcaagctgcccagccctggcccaggtgccccgactgtgggactcagttgttctgagcacatttgactccacttttcccttaaaaatgaatgtcttgttcctgtgcattggtggcatcacagaccccagctggggcgcgatgtcaaaggtcgggacagctgtgccgggaggcagccacagggaagctcacacatcctgtcagtgtcaccttggtttgcaaaacccatatccccggtaaaatgaggccggacagaggggctgttaggacagcaaagcagcagtgtccagagacccctcaatccccaaaggtccgcaccctgtcctgcacaccctgggccacgccggccacacccctctgctgcaacaagctcatccctggacttctgggagaatgaacccgaggttggtttggggagacaggtgaggcggtcggatctacagaacaacccaccatttctgggggccgcagaggatccatcacagacggatactggggagtaaacggcccaggccaggtgcccaggaaaggacggctgagcatgtggagcgagagggaggcaggtggacgctgcagaccccaggttcagtgcggcccctcggctgttcctcccctgtagggtttggacagacccacccccagccttgcccagctttcaaaggacaaaagggagcatcccccacctactctcaggtttttgaggaaacaaagatttgtggtaactgaaggtgttgggtcagtggccaggtgccgacactgagctgtgacccagaggggacgctgaggaagtgggcgtgagtggacgtgtcaggtggttaccaggcactggttgttgatggtcggtggttgggtgtgggcagtcatcagtcatcaggtgtgctcaggggacaatctcccctcaaccgcacatgtgccactgttcagcggagctgactggtttctcctggtagaggggccggctgtttcctgacagatgcctggtgagcaggggaagcaggacccagtggtcagcaggtgtctttaactgtcattgtgtgtggaatgtcgcagactcctccacgtggcgggaatgagctgtgtaaatacttcaataaagcctgacttcacatctgca

SEQ ID NO: 34145 - DNA, 1491 bp, Homo sapiens
  source 1..1491: mol_type = unassigned DNA
aaacttcactccccagggctcccatccctggtgacaaagatcacagcagctggcactgcagatgcctttgtgggaggcaccatctgatcatcccgccaaccctcctgcaaccctgcaaggacacaccagcctcccagggtgccaggaggagcctgccagagacccccagagcggcctgccccaaatcacctctgagagcagcagcttttctgaaggaagcctcccctcatggtcctcaggcccagcaggtgccaagctcaatgccagccacgagggcattggctcatcgagtgatgggaacggggacagcaaggcggccacagagagggtggtctcagccatggacacagtacggcggaagcatcccgagatcacgttttatattctggtgaaggccatttatacactgggctacagtgtctctctgatgtctcttgcaacaggaagcataattctgtgcctcttcaggaagctgcactgcaccaggaattacatccacctgaacctgttcctgtccttcatcctgagagccatctcagtgctggtcaaggacgacgttctctactccagctctggcacgttgcactgccctgaccagccatcctcctgggtgggctgcaagctgagcctggtcttcctgcagtactgcatcatggccaacttcttctggctgctggtggaggggctctacctccacaccctcctggtggccatgctcccccctagaaggtgcttcctggcctacctcctgatcggatggggcctccccaccgtctgcatcggtgcatggactgcggccaggctctacttagaagacaccggttgctgggatacaaacgaccacagtgtgccctggtgggtcatacgaataccgattttaatttccatcatcgtcaattttgtccttttcattagtattatacgaattttgctgcagaagttaacatccccagatgtcggcggcaacgaccagtctcagtacaagaggctggccaagtccacgctcctgcttatcccgctgttcggcgtccactacatggtgtttgccgtgtttcccatcagcatctcctccaaataccagatactgtttgagctgtgcctcgggtcgttccagggcctggtggtggccgtcctctactgtttcctgaacagtgaggtgcagtgcgagctgaagcgaaaatggcgaagccggtgcccgaccccgtccgcgagccgggattacagggtctgcggttcctccttctcccgcaacggctcggagggcgccctgcagttccaccgcggctcccgcgcccagtccttcctgcaaacggagacctcggtcatctagccccacccctgcctgtcggacgcggcgggaggcccacggttcggggcttctgcggggctgagacgccggcttcctccttccagatgcccgagcaccgtgtcgggcaggtcagcgcggtcctgactccgtcaagctggttgtccactaaaccccatacctgg

SEQ ID NO: 34146 - DNA, 717 bp, Homo sapiens
  source 1..717: mol_type = unassigned DNA
ccatgctggaggcggcggaaccgcggggacctaggacggaggcggcgggcgctgggcggcccccggcacgctgagctcgggatgcggacgctgctgcctcccgcgctgctgacctgctggctgctcgcccccgtgaacagcattcacccagaatgccgatttcatctggaaatacaggaggaagaaacaaaatgtgcagagcttctgaggtctcaaacagaaaaacacaaaggccatacaaagggattcatcctcattcacgccggaggtttaaagaggatcctggacccacatacctacccattggctccatgaccagtgcttttataattacaaaatcattgagaaattaagtcacaggaagcctcgtgtgtggtatacactggtgataaagcaagtcccatgcagtctgagatggcaagggaccttctagggaaagggcagtgacccagaagcccgactgctcggctggctcccgcactccgtcctgtggtcagagtgtgtttcctcccctctgtgaacctggtctcctccccagtgtgaggacaggggctctcgccttcttcagggagttgctgggaggacaaaatggagtatatgtaaaagtcatttcctagataagggggagcatgtcgtaagagtctcttgaaatttaattgatgtttatgtcattgacattgaaataatgagaaaataaatccaaatccagagctcaaa

SEQ ID NO: 34147 - DNA, 2806 bp, Homo sapiens
  source 1..2806: mol_type = unassigned DNA
gactccggagcccgagcccggggcgggtggacgcggactcgaacgcagttgcttcgggacccaggaccccctcgggcccgacccgccaggaaagactgaggccgcggcctgccccgcccggctccctgcgccgccgccgcctcccgggacagaagatgtgctccagggtccctctgctgctgccgctgctcctgctactggccctggggcctggggtgcagggctgcccatccggctgccagtgcagccagccacagacagtcttctgcactgcccgccaggggaccacggtgccccgagacgtgccacccgacacggtggggctgtacgtctttgagaacggcatcaccatgctcgacgcaggcagctttgccggcctgccgggcctgcagctcctggacctgtcacagaaccagatcgccagcctgcccagcggggtcttccagccactcgccaacctcagcaacctggacctgacagccaacaggctgcatgaaatcaccaatgagaccttccgtggcctgcggcgcctcgagcgcctctacctgggcaagaaccgcatccgccacatccagcctggtgccttcgacacgctcgaccgcctcctggagctcaagctgcaggacaacgagctgcgggcactgcccccgctgcgcctgccccgcctgctgctgctggacctcagccacaacagcctcctggccctggagcccggcatcctggacactgccaacgtggaggcgctgcggctggctggtctggggctgcagcagctggacgaggggctcttcagccgcttgcgcaacctccacgacctggatgtgtccgacaaccagctggagcgagtgccacctgtgatccgaggcctccggggcctgacgcgcctgcggctggccggcaacacccgcattgcccagctgcggcccgaggacctggccggcctggctgccctgcaggagctggatgtgagcaacctaagcctgcaggccctgcctggcgacctctcgggcctcttcccccgcctgcggctgctggcagctgcccgcaaccccttcaactgcgtgtgccccctgagctggtttggcccctgggtgcgcgagagccacgtcacactggccagccctgaggagacgcgctgccacttcccgcccaagaacgctggccggctgctcctggagcttgactacgccgactttggctgcccagccaccaccaccacagccacagtgcccaccacgaggcccgtggtgcgggagcccacagccttgtcttctagcttggctcctacctggcttagccccacagagccggccactgaggcccccagcccgccctccactgccccaccgactgtagggcctgtcccccagccccaggactgcccaccgtccacctgcctcaatgggggcacatgccacctggggacacggcaccacctggcgtgcttgtgccccgaaggcttcacgggcctgtactgtgagagccagatggggcaggggacacggcccagccctacaccagtcacgccgaggccaccacggtccctgaccctgggcatcgagccggtgagccccacctccctgcgcgtggggctgcagcgctacctccaggggagctccgtgcagctcaggagcctccgtctcacctatcgcaacctatcgggccctgataagcggctggtgacgctgcgactgcctgcctcgctcgctgagtacacggtcacccagctgcggcccaacgccacttactccgtctgtgtcatgcctttggggcccgggcgggtgccggagggcgaggaggcctgcggggaggcccatacacccccagccgtccactccaaccacgccccagtcacccaggcccgcgagggcaacctgccgctcctcattgcgcccgccctggccgcggtgctcctggccgcgctggctgcggtgggggcagcctactgtgtgcggcgggggcgggccatggcagcagcggctcaggacaaagggcaggtggggccaggggctgggcccctggaactggagggagtgaaggtccccttggagccaggcccgaaggcaacagagggcggtggagaggccctgcccagcgggtctgagtgtgaggtgccactcatgggcttcccagggcctggcctccagtcacccctccacgcaaagccctacatctaagccagagagagacagggcagctggggccgggctctcagccagtgagatggccagccccctcctgctgccacaccacgtaagttctcagtcccaacctcggggatgtgtgcagacagggctgtgtgaccacagctgggccctgttccctctggacctcggtctcctcatctgtgagatgctgtggcccagctgacgagccctaacgtccccagaaccgagtgcctatgaggacagtgtccgccctgccctccgcaacgtgcagtccctgggcacggcgggccctgccatgtgctggtaacgcatgcctgggccctgctgggctctcccactccaggcggaccctgggggccagtgaaggaagctcccggaaagagcagagggagagcgggtaggcggctgtgtgactctagtcttggccccaggaagcgaaggaacaaaagaaactggaaaggaagatgctttaggaacatgttttgcttttttaaaatatatatatatttataagagatcctttcccatttattctgggaagatgtttttcaaactcagagacaaggactttggtttttgtaagacaaacgatgatatgaaggccttttgtaagaaaaaataaaagatgaagtgtgttt

SEQ ID NO: 34148 - DNA, 2888 bp, Homo sapiens
  source 1..2888: mol_type = unassigned DNA
actagctgtcgctccacaggcgagcagggcaggcgtgcgggcgggtgggtggtggaggctgcgagggtgcacggccggccctgggcaggcggtagccatggagctgtggcgccaatgcacccactggctcatccagtgccgggtgctgccgcccagccaccgcgtgacctgggatggggctcaggtgtgtgaactggcccaggccctccgggatggtgtccttctgtgtcagctgcttaacaacctgctaccccatgccatcaacctgcgtgaggtcaacctgcgcccccagatgtcccagttcctgtgccttaagaacattagaaccttcctgtccacctgctgtgagaagttcggcctcaagcggagcgagctcttcgaagcctttgacctcttcgatgtgcaggattttggcaaggtcatctacaccctgtctgctctgtcctggaccccgatcgcccagaacagggggatcatgcccttccccaccgaggaggagagtgtaggtgatgaagacatctacagtggcctgtccgaccagatcgacgacacggtggaggaggatgaggacctgtatgactgcgtggagaatgaggaggcggaaggcgacgagatctatgaggacctcatgcgctcggagcccgtgtccatgccgcccaagatgacagagtatgacaagcgctgctgctgcctgcgggagatccagcagacggaggagaagtacactgacacgctgggctccatccagcagcatttcttgaagcccctgcaacggttcctgaaacctcaagacattgagatcatctttatcaacattgaggacctgcttcgtgttcatactcacttcctaaaggagatgaaggaagccctgggcacccctggcgcagccaatctctaccaggtcttcatcaaatacaaggagaggttcctcgtctatggccgctactgcagccaggtggagtcagccagcaaacacctggaccgtgtggccgcagcccgggaggacgtgcagatgaagctggaggaatgttctcagagagccaacaacgggaggttcaccctgcgggacctgctgatggtgcctatgcagcgagttctcaaatatcacctccttctccaggagctggtgaaacacacgcaggaggcgatggagaaggagaacctgcggctggccctggatgccatgagggacctggctcagtgcgtgaacgaggtcaagcgagacaacgagacactgcgacagatcaccaatttccagctgtccattgagaacctggaccagtctctggctcactatggccggcccaagatcgacggggaactcaagatcacctcggtggaacggcgctccaagatggacaggtatgccttcctgctcgacaaagctctactcatctgtaagcgcaggggagactcctatgacctcaaggactttgtaaacctgcacagcttccaggttcgggatgactcttcaggagaccgagacaacaagaagtggagccacatgttcctcctgatcgaggaccaaggtgcccagggctatgagctgttcttcaagacaagagaattgaagaagaagtggatggagcagtttgagatggccatctccaacatctatccggagaatgccaccgccaacgggcatgacttccagatgttctcctttgaggagaccacatcctgcaaggcctgtcagatgctgcttagaggtaccttctatcagggctaccgctgccatcggtgccgggcatctgcacacaaggagtgtctggggagggtccctccatgtggccgacatgggcaagatttcccaggaactatgaagaaggacaaactacatcgcagggctcaggacaaaaagaggaatgagctgggtctgcccaagatggaggtgtttcaggaatactacgggcttcctccaccccctggagccattggaccctttctacggctcaaccctggagacattgtggagctcacgaaggctgaggctgaacagaactggtgggagggcagaaatacatctactaatgaaattggctggtttccttgtaacagggtgaagccctatgtccatggccctcctcaggacctgtctgttcatctctggtacgcaggccccatggagcgggcaggggcagagagcatcctggccaaccgctcggacgggactttcttggtgcggcagagggtgaaggatgcagcagaatttgccatcagcattaaatataacgtcgaggtcaagcacattaaaatcatgacagcagaaggactgtaccggatcacagagaaaaaggctttccgggggcttacggagctggtggagttttaccagcagaactctctaaaggattgcttcaagtctctggacaccaccttgcagttccccttcaaggagcctgaaaagagaaccatcagcaggccagcagtgggaagcacaaagtattttggcacagccaaagcccgctatgacttctgcgcccgagaccgatcagagctgtcgctcaaggagggtgacatcatcaagatccttaacaagaagggacagcaaggctggtggcgaggggagatctatggccgggttggctggttccctgccaactacgtggaggaagattattctgaatactgctgagccctggtgccttggcagagagacgagaaactccaggctctgagcccggcgtgggcaggcagcggagccaggggctgtgacagctcccggcgggtggagactttgggatggactggaggaggccagcgtccagctggcggtgctcccgggatgtgccctgacatggttaatttataacaccccgatttcctcttgggtcccctcaagcagacggggctcaagggggttacatttaataaaaggatgaagatgg

SEQ ID NO: 34149 - DNA, 2545 bp, Homo sapiens
  source 1..2545: mol_type = unassigned DNA
ctaccccatgccatcaacctgcgtgaggtcaacctgcgcccccagatgtcccagttcctgtgccttaagaacattagaaccttcctgtccacctgctgtgagaagttcggcctcaagcggagcgagctcttcgaagcctttgacctcttcgatgtgcaggattttggcaaggtcatctacaccctgtctgctctgtcctggaccccgatcgcccagaacagggggatcatgcccttccccaccgaggaggagagtgtaggtgatgaagacatctacagtggcctgtccgaccagatcgacgacacggtggaggaggatgaggacctgtatgactgcgtggagaatgaggaggcggaaggcgacgagatctatgaggacctcatgcgctcggagcccgtgtccatgccgcatttcttgaagcccctgcaacggttcctgaaacctcaagacattgagatcatctttatcaacattgaggacctgcttcgtgttcatactcacttcctaaaggagatgaaggaagccctgggcacccctggcgcagccaatctctaccaggtcttcatcaaatacaaggagaggttcctcgtctatggccgctactgcagccaggtggagtcagccagcaaacacctggaccgtgtggccgcagcccgggaggacgtgcagatgaagctggaggaatgttctcagagagccaacaacgggaggttcaccctgcgggacctgctgatggtgcctatgcagcgagttctcaaatatcacctccttctccaggagctggtgaaacacacgcaggaggcgatggagaaggagaacctgcggctggccctggatgccatgagggacctggctcagtgcgtgaacgaggtcaagcgagacaacgagacactgcgacagatcaccaatttccagctgtccattgagaacctggaccagtctctggctcactatggccggcccaagatcgacggggaactcaagatcacctcggtggaacggcgctccaagatggacaggtatgccttcctgctcgacaaagctctactcatctgtaagcgcaggggagactcctatgacctcaaggactttgtaaacctgcacagcttccaggttcgggatgactcttcaggagaccgagacaacaagaagtggagccacatgttcctcctgatcgaggaccaaggtgcccagggctatgagctgttcttcaagacaagagaattgaagaagaagtggatggagcagtttgagatggccatctccaacatctatccggagaatgccaccgccaacgggcatgacttccagatgttctcctttgaggagaccacatcctgcaaggcctgtcagatgctgcttagaggtaccttctatcagggctaccgctgccatcggtgccgggcatctgcacacaaggagtgtctggggagggtccctccatgtggccgacatgggcaagatttcccaggaactatgaagaaggacaaactacatcgcagggctcaggacaaaaagaggaatgagctgggtctgcccaagatggaggtgtttcaggaatactacgggcttcctccaccccctggagccattggaccctttctacggctcaaccctggagacattgtggagctcacgaaggctgaggctgaacagaactggtgggagggcagaaatacatctactaatgaaattggctggtttccttgtaacagggtgaagccctatgtccatggccctcctcaggacctgtctgttcatctctggtacgcaggccccatggagcgggcaggggcagagagcatcctggccaaccgctcggacgggactttcttggtgcggcagagggtgaaggatgcagcagaatttgccatcagcattaaatataacgtcgaggtcaagcacattaaaatcatgacagcagaaggactgtaccggatcacagagaaaaaggctttccgggggcttacggagctggtggagttttaccagcagaactctctaaaggattgcttcaagtctctggacaccaccttgcagttccccttcaaggagcctgaaaagagaaccatcagcaggccagcagtgggaagcacaaagtattttggcacagccaaagcccgctatgacttctgcgcccgagaccgatcagagctgtcgctcaaggagggtgacatcatcaagatccttaacaagaagggacagcaaggctggtggcgaggggagatctatggccgggttggctggttccctgccaactacgtggaggaagattattctgaatactgctgagccctggtgccttggcagagagacgagaaactccaggctctgagcccggcgtgggcaggcagcggagccaggggctgtgacagctcccggcgggtggagactttgggatggactggaggaggccagcgtccagctggcggtgctcccgggatgtgccctgacatggttaatttataacaccccgatttcctcttgggtcccctcaagcagacggggctcaagggggttacatttaataaaaggatgaagatgg

SEQ ID NO: 34150 - DNA, 2775 bp, Homo sapiens
  source 1..2775: mol_type = unassigned DNA
aggcgagcagggcaggcgtgcgggcgggtgggtggtggaggctgcgagggtgcacggccggccctgggcaggcggtagccatggagctgtggcgccaatgcacccactggctcatccagtgccgggtgctgccgcccagccaccgcgtgacctgggatggggctcaggtgtgtgaactggcccaggccctccgggatggtgtccttctgtgtcagctgcttaacaacctgctaccccatgccatcaacctgcgtgaggtcaacctgcgcccccagatgtcccagttcctgtgccttaagaacattagaaccttcctgtccacctgctgtgagaagttcggcctcaagcggagcgagctcttcgaagcctttgacctcttcgatgtgcaggattttggcaaggtcatctacaccctgtctgctctgtcctggaccccgatcgcccagaacagggggatcatgcccttccccaccgaggaggagagtgtaggtgatgaagacatctacagtggcctgtccgaccagatcgacgacacggtggaggaggatgaggacctgtatgactgcgtggagaatgaggaggcggaaggcgacgagatctatgaggacctcatgcgctcggagcccgtgtccatgccgcatttcttgaagcccctgcaacggttcctgaaacctcaagacattgagatcatctttatcaacattgaggacctgcttcgtgttcatactcacttcctaaaggagatgaaggaagccctgggcacccctggcgcagccaatctctaccaggtcttcatcaaatacaaggagaggttcctcgtctatggccgctactgcagccaggtggagtcagccagcaaacacctggaccgtgtggccgcagcccgggaggacgtgcagatgaagctggaggaatgttctcagagagccaacaacgggaggttcaccctgcgggacctgctgatggtgcctatgcagcgagttctcaaatatcacctccttctccaggagctggtgaaacacacgcaggaggcgatggagaaggagaacctgcggctggccctggatgccatgagggacctggctcagtgcgtgaacgaggtcaagcgagacaacgagacactgcgacagatcaccaatttccagctgtccattgagaacctggaccagtctctggctcactatggccggcccaagatcgacggggaactcaagatcacctcggtggaacggcgctccaagatggacaggtatgccttcctgctcgacaaagctctactcatctgtaagcgcaggggagactcctatgacctcaaggactttgtaaacctgcacagcttccaggttcgggatgactcttcaggagaccgagacaacaagaagtggagccacatgttcctcctgatcgaggaccaaggtgcccagggctatgagctgttcttcaagacaagagaattgaagaagaagtggatggagcagtttgagatggccatctccaacatctatccggagaatgccaccgccaacgggcatgacttccagatgttctcctttgaggagaccacatcctgcaaggcctgtcagatgctgcttagaggtaccttctatcagggctaccgctgccatcggtgccgggcatctgcacacaaggagtgtctggggagggtccctccatgtggccgacatgggcaagatttcccaggaactatgaagaaggacaaactacatcgcagggctcaggacaaaaagaggaatgagctgggtctgcccaagatggaggtgtttcaggaatactacgggcttcctccaccccctggagccattggaccctttctacggctcaaccctggagacattgtggagctcacgaaggctgaggctgaacagaactggtgggagggcagaaatacatctactaatgaaattggctggtttccttgtaacagggtgaagccctatgtccatggccctcctcaggacctgtctgttcatctctggtacgcaggccccatggagcgggcaggggcagagagcatcctggccaaccgctcggacgggactttcttggtgcggcagagggtgaaggatgcagcagaatttgccatcagcattaaatataacgtcgaggtcaagcacattaaaatcatgacagcagaaggactgtaccggatcacagagaaaaaggctttccgggggcttacggagctggtggagttttaccagcagaactctctaaaggattgcttcaagtctctggacaccaccttgcagttccccttcaaggagcctgaaaagagaaccatcagcaggccagcagtgggaagcacaaagtattttggcacagccaaagcccgctatgacttctgcgcccgagaccgatcagagctgtcgctcaaggagggtgacatcatcaagatccttaacaagaagggacagcaaggctggtggcgaggggagatctatggccgggttggctggttccctgccaactacgtggaggaagattattctgaatactgctgagccctggtgccttggcagagagacgagaaactccaggctctgagcccggcgtgggcaggcagcggagccaggggctgtgacagctcccggcgggtggagactttgggatggactggaggaggccagcgtccagctggcggtgctcccgggatgtgccctgacatggttaatttataacaccccgatttcctcttgggtcccctcaagcagacggggctcaagggggttacatttaataaaaggatgaagatgg

SEQ ID NO: 34151 - DNA, 2620 bp, Homo sapiens
  source 1..2620: mol_type = unassigned DNA
acaggcgagcagggcaggcgtgcgggcgggtgggtggtggaggctgcgagggtgcacggccggccctgggcaggcggtagccatggagctgtggcgccaatgcacccactggctcatccagtgccgggtgctgccgcccagccaccgcgtgacctgggatggggctcaggtgtgtgaactggcccaggccctccgggatggtgtccttctgtgtcagctgcttaacaacctgctaccccatgccatcaacctgcgtgaggtcaacctgcgcccccagatgtcccagttcctgtgccttaagaacattagaaccttcctgtccacctgctgtgagaagttcggcctcaagcggagcgagctcttcgaagcctttgacctcttcgatgtgcaggattttggcaaggtcatctacaccctgtctgctctgtcctggaccccgatcgcccagaacagggggatcatgcccttccccaccgaggaggagagtgtaggtgatgaagacatctacagtggcctgtccgaccagatcgacgacacggtggaggaggatgaggacctgtatgactgcgtggagaatgaggaggcggaaggcgacgagatctatgaggacctcatgcgctcggagcccgtgtccatgccgcccaagatgacagagtatgacaagcgctgctgctgcctgcgggagatccagcagacggaggagaagtacactgacacgctgggctccatccagcagcatttcttgaagcccctgcaacggttcctgaaacctcaagacattgagatcatctttatcaacattgaggacctgcttcgtgttcatactcacttcctaaaggagatgaaggaagccctgggcacccctggcgcagccaatctctaccaggtcttcatcaaatacaaggagaggttcctcgtctatggccgctactgcagccaggtggagtcagccagcaaacacctggaccgtgtggccgcagcccgggaggacgtgcagatgaagctggaggaatgttctcagagagccaacaacgggaggttcaccctgcgggacctgctgatggtgcctatgcagcgagttctcaaatatcacctccttctccaggagctggtgaaacacacgcaggaggcgatggagaaggagaacctgcggctggccctggatgccatgagggacctggctcagtgcgtgaacgaggtcaagcgagacaacgagacactgcgacagatcaccaatttccagctgtccattgagaacctggaccagtctctggctcactatggccggcccaagatcgacggggaactcaagatcacctcggtggaacggcgctccaagatggacaggtatgccttcctgctcgacaaagctctactcatctgtaagcgcaggggagactcctatgacctcaaggactttgtaaacctgcacagcttccaggttcgggatgactcttcaggagaccgagacaacaagaagtggagccacatgttcctcctgatcgaggaccaaggtgcccagggctatgagctgttcttcaagacaagagaattgaagaagaagtggatggagcagtttgagatggccatctccaacatctatccggagaatgccaccgccaacgggcatgacttccagatgttctcctttgaggagaccacatcctgcaaggcctgtcagatgctgcttagaggtaccttctatcagggctaccgctgccatcggtgccgggcatctgcacacaaggagtgtctggggagggtccctccatgtggccgacatgggcaagatttcccaggaactatgaagaaggacaaactacatcgcagggctcaggacaaaaagaggaatgagctgggtctgcccaagatggaggtgtttcaggaatactacgggcttcctccaccccctggagccattggaccctttctacggctcaaccctggagacattgtggagctcacgaaggctgaggctgaacagaactggtgggagggcagaaatacatctactaatgaaattggctggtttccttgtaacagggtgaagccctatgtccatggccctcctcaggacctgtctgttcatctctggtacgcaggccccatggagcgggcaggggcagagagcatcctggccaaccgctcggacgggactttcttggtgcggcagagggtgaaggatgcagcagaatttgccatcagcattaaatataacgtcgaggtcaagcacattaaaatcatgacagcagaaggactgtaccggatcacagagaaaaaggctttccgggggcttacggagctggtggagttttaccagcagaactctctaaaggattgcttcaagtctctggacaccaccttgcagttccccttcaaggagcctgaaaagagaaccatcagcaggccagcagtgggaagcacaaagtattttggcacagccaaagcccgctatgacttctgcgcccgagaccgatcagagctgtcgctcaaggagggtgacatcatcaagatccttaacaagaagggacagcaaggctggtggcgaggggagatctatggccgggttggctggttccctgccaactacgtggaggaagattattctgaatactgctga

SEQ ID NO: 34152 - DNA, 4820 bp, Homo sapiens
  source 1..4820: mol_type = unassigned DNA
actttggctcgagcactgccctgagccggtcgggcccgcgggcgccatggagcagtggcggcagtgcggccgctggctcatcgattgcaaggtcctgccgcccaaccaccgggtggtgtggccctcggccgtggtcttcgacctggcgcaggcgctgcgcgacggggtccttctgtgccagctgctgcacaacctctcccccggctccatcgacctcaaggacatcaacttccggccgcagatgtcccagtttctgtgtttgaagaacatacgcaccttcctgaaagtctgccacgataaatttggattaaggaacagcgagctgtttgacccctttgacctcttcgatgtgcgagactttggaaaggtcatctccgcggtgtcgaggctctccctgcacagcatcgcgcagaacaaagggatcaggccttttccctcagaggagaccacagagaatgacgatgacgtctaccgcagcctggaggagctggccgacgagcatgacctgggggaggacatctacgactgcgtcccgtgtgaggatggaggggacgacatctacgaggacatcatcaaggtggaggtgcagcagcccatgaaaatgggcatgactgaagatgacaagaggaactgctgcctgctggagatccaggagaccgaggccaagtactaccgcaccctggaggacattgagaagaactacatgagccccctgcggctggtgctgagcccggcggacatggcagctgtcttcattaacctggaggacctgatcaaggtgcatcacagcttcctgagggccatcgacgtgtccgtgatggtggggggcagcacgctggccaaggtcttcctcgatttcaaggaaaggcttctgatctacggggagtactgcagccacatggagcacgcccagaacacactgaaccagctcctggccagccgggaggacttcaggcagaaagtcgaggagtgcacactgaaggtccaggatggaaaatttaagctgcaagacctgctggtggtccccatgcagagggtgctcaaataccacctgctcttgaaggagcttctgagccattctgcggaacggcctgagaggcagcagctcaaagaagcactggaagccatgcaggacttggcgatgtacatcaatgaagttaaacgggacaaggagaccttgaggaaaatcagcgaatttcagagttctatagaaaatttgcaagtgaaactggaggaatttggaagaccaaagattgacggggaactgaaagtccggtccatagtcaaccacaccaagcaggacaggtacttgttcctgtttgacaaggtggtcatcgtctgcaagcggaagggctacagctacgagctcaaggagatcatcgagctgctgttccacaagatgaccgacgaccccatgaacaacaaggacgtcaagaagtggtcctacggcttctacctaattcaccttcaaggaaagcagggcttccagtttttctgcaaaacagaagatatgaagaggaagtggatggagcagtttgagatggccatgtcaaacatcaagccagacaaagccaatgccaaccaccacagtttccagatgtacacgtttgacaagaccaccaactgcaaagcctgcaaaatgttcctcaggggcaccttctaccagggatacatgtgtaccaagtgtggcgtcggggcacacaaggagtgcctggaagtgatacctccctgcaagttcagaactagtggggacagggacgcctccggagcgggaccaggtcccaagatggtggccatgcagaattaccatggcaacccagcccctcccgggaagcctgtgctgaccttccagacgggcgacgtgcttgagctgctgaggggcgaccctgagtctccgtggtgggagggtcgtctggtacaaaccaggaagtcagggtatttccccagctcatctgtgaagccctgccctgtggatggaaggccgcccatcagccggccgccatcccgggagatcgactacactgcatacccctggtttgcaggtaacatggagaggcagcagacggacaacctgctcaagtcccacgccagcgggacctacctgatcagggagcggcctgccgaggctgagcgctttgcaataagcatcaagttcaatgatgaggtgaagcacatcaaggtggtggagaaggacaactggatccacatcacagaggccaagaaattcgacagcctcctggagttggtggagtactaccagtgccactcactgaaggagagcttcaagcagctggacaccacactcaagtacccctacaagtcccgggaacgttcggcctccagggcctccagccggtccccagcttcctgtgcttcctacaacttttcttttctcagtcctcagggcctcagctttgcttctcagggcccctccgctcccttctggtcagtgttcacgccccgcgtcatcggcacagctgtggccaggtataactttgccgcccgagatatgagggagctttcgctgcgggagggtgacgtggtgaggatctacagccgcatcggcggagaccagggctggtggaagggcgagaccaacggacggattggctggtttccttcaacgtacgtagaagaggagggcatccagtgacggcaggaacgtggacaagactcgcagattttcttgggagagtcactccagccctgaagtctgtctctagctcctctgtgactcagaggggaaataccaacctcccagtcttccactgcccacagggatagggagggtgttgagaatcctaaactcgaaccgtttcactgtcagcctgccctcggcgacccatcactgggtatgctattgtacatagaggaaacctgggctagccccacccagagcgcagaggagggggcaccgacagcgctgcgagccaggctctgggtagtggctgaggccagaggcccatcgcctgcccctgtccaactgagatggccttcaggagcctaggtttgaacagcagatgctgtcccaggaagggctagggacatcggaggggacctgcccccacaccctctgctcagcccctggactcagccttgcctgtcttttcctgctgctcccagggggaggtgtcagacctcgggaggcagacgggaccagagccaggctgttcactgtgggcccacttgccccactgtgctagggcgcgggaggagagagcactgtggtcgccctctgcagccactctggctcccaagacttccctgactcccccactcccctccttgccaggggcacacccggaccccacacggcaggcccctctcttgggaggggcctttggaatgatgaaattccaaccctgctgcccggtcagcggtaccgtttcctgccctctctctgagaggccctttctggagtcctgggaaggtgtctgcctggccgcgctgccagatcagtacatcttttgtaaaaaccctgaaatgggcagggaagaaaacagggatttcccctctctagatccctgccaggtccctctccaggaggcccctctgctctcctgaagggtggtccctgagggtctgcccagccttggcacgagaggttggttccagcccctggcagggcttccttccaagggcccctgcagcctacaaactgggcctcgggcgactcaaaataagtgctcttgggggtggctctaccccattacctcccccagccacaactcctggccttcgacttctggctgggttagccagaccctggtttctctaccctgatgttgcatgagacctggtaacagtgtctccctcccagctccttgccaaagcctctgttgagacctgggcttcttgtagccccttctccctctggccagctgcacagcctgtgggaggtgcccggcccaggctgggtgtgggggaagctggtccctgctgtgggtggcgctggggacctaggggctccttctgaggttggccttgtggcctctgggctgtatgcctctggggtgtagggaagaggcgggaggagtcatggggatggggagcggcagggggagagaggggccctcgacaaaggcttgggaaatgaggggaggtggaggcagggcaggggaagcgaagagtcagccttggagagagcaccctggggcctccgtgtcggggtacacccagcactttgcgacctgcggcccagcaggcgcggaggatggcggggaggaagccagcagcccctgtgtttactgtcgtcagaaaggtcttgtgttttggttttggggtttttgttttgtttgtgttttgtttggcttgtttgttttttaaggggaaaaaagtttgtaattatttcatccaaatctcccgttatatatctgtgaataataagagattttataatagcaagaaaatgatgtatattttagtttgttgacaaataagtcatcatgatcacgaaggacactgagaaaaaataatttagaaccctggtttttgtgaatttttttgttttgtgtttctttgttttgagatttgtgtttggtttggtttttgcactgcactaaggcaggagggttggagggctgggtgcagcctgggagtccgatggttttcagcaggagacggggtgtcccctgcagggggctaaactgcaggggcctgagattagctgtgaacatgtgggagcccgatgcatgtgggtcagggatctgggggcccccccagctggcgggaaccccaaatggacacaaactgtacatttgccaatgggtttttttcagaccatggtttttacttgcaaataaacctgagttcttttctgc

SEQ ID NO: 34153 - DNA, 4837 bp, Homo sapiens
  source 1..4837: mol_type = unassigned DNA
actgccctgagccggtcgggcccgcgggcgccatggagcagtggcggcagtgcggccgctggctcatcgattgcaaggtcctgccgcccaaccaccgggtggtgtggccctcggccgtggtcttcgacctggcgcaggcgctgcgcgacggggtccttctgtgccagctgctgcacaacctctcccccggctccatcgacctcaaggacatcaacttccggccgcagatgtcccagtttctgtgtttgaagaacatacgcaccttcctgaaagtctgccacgataaatttggattaaggaacagcgagctgtttgacccctttgacctcttcgatgtgcgagactttggaaaggtcatctccgcggtgtcgaggctctccctgcacagcatcgcgcagaacaaagggatcaggccttttccctcagaggagaccacagagaatgacgatgacgtctaccgcagcctggaggagctggccgacgagcatgacctgggggaggacatctacgactgcgtcccgtgtgaggatggaggggacgacatctacgaggacatcatcaaggtggaggtgcagcagcccatgattagatacatgcagaaaatgggcatgactgaagatgacaagaggaactgctgcctgctggagatccaggagaccgaggccaagtactaccgcaccctggaggacattgagaagaactacatgagccccctgcggctggtgctgagcccggcggacatggcagctgtcttcattaacctggaggacctgatcaaggtgcatcacagcttcctgagggccatcgacgtgtccgtgatggtggggggcagcacgctggccaaggtcttcctcgatttcaaggaaaggcttctgatctacggggagtactgcagccacatggagcacgcccagaacacactgaaccagctcctggccagccgggaggacttcaggcagaaagtcgaggagtgcacactgaaggtccaggatggaaaatttaagctgcaagacctgctggtggtccccatgcagagggtgctcaaataccacctgctcttgaaggagcttctgagccattctgcggaacggcctgagaggcagcagctcaaagaagcactggaagccatgcaggacttggcgatgtacatcaatgaagttaaacgggacaaggagaccttgaggaaaatcagcgaatttcagagttctatagaaaatttgcaagtgaaactggaggaatttggaagaccaaagattgacggggaactgaaagtccggtccatagtcaaccacaccaagcaggacaggtacttgttcctgtttgacaaggtggtcatcgtctgcaagcggaagggctacagctacgagctcaaggagatcatcgagctgctgttccacaagatgaccgacgaccccatgaacaacaaggacgtcaagaagtctcacgggaaaatgtggtcctacggcttctacctaattcaccttcaaggaaagcagggcttccagtttttctgcaaaacagaagatatgaagaggaagtggatggagcagtttgagatggccatgtcaaacatcaagccagacaaagccaatgccaaccaccacagtttccagatgtacacgtttgacaagaccaccaactgcaaagcctgcaaaatgttcctcaggggcaccttctaccagggatacatgtgtaccaagtgtggcgtcggggcacacaaggagtgcctggaagtgatacctccctgcaagttcacttctcctgcagatctggacgcctccggagcgggaccaggtcccaagatggtggccatgcagaattaccatggcaacccagcccctcccgggaagcctgtgctgaccttccagacgggcgacgtgcttgagctgctgaggggcgaccctgagtctccgtggtgggagggtcgtctggtacaaaccaggaagtcagggtatttccccagctcatctgtgaagccctgccctgtggatggaaggccgcccatcagccggccgccatcccgggagatcgactacactgcatacccctggtttgcaggtaacatggagaggcagcagacggacaacctgctcaagtcccacgccagcgggacctacctgatcagggagcggcctgccgaggctgagcgctttgcaataagcatcaagttcaatgatgaggtgaagcacatcaaggtggtggagaaggacaactggatccacatcacagaggccaagaaattcgacagcctcctggagttggtggagtactaccagtgccactcactgaaggagagcttcaagcagctggacaccacactcaagtacccctacaagtcccgggaacgttcggcctccagggcctccagccggtccccagcttcctgtgcttcctacaacttttcttttctcagtcctcagggcctcagctttgcttctcagggcccctccgctcccttctggtcagtgttcacgccccgcgtcatcggcacagctgtggccaggtataactttgccgcccgagatatgagggagctttcgctgcgggagggtgacgtggtgaggatctacagccgcatcggcggagaccagggctggtggaagggcgagaccaacggacggattggctggtttccttcaacgtacgtagaagaggagggcatccagtgacggcaggaacgtggacaagactcgcagattttcttgggagagtcactccagccctgaagtctgtctctagctcctctgtgactcagaggggaaataccaacctcccagtcttccactgcccacagggatagggagggtgttgagaatcctaaactcgaaccgtttcactgtcagcctgccctcggcgacccatcactgggtatgctattgtacatagaggaaacctgggctagccccacccagagcgcagaggagggggcaccgacagcgctgcgagccaggctctgggtagtggctgaggccagaggcccatcgcctgcccctgtccaactgagatggccttcaggagcctaggtttgaacagcagatgctgtcccaggaagggctagggacatcggaggggacctgcccccacaccctctgctcagcccctggactcagccttgcctgtcttttcctgctgctcccagggggaggtgtcagacctcgggaggcagacgggaccagagccaggctgttcactgtgggcccacttgccccactgtgctagggcgcgggaggagagagcactgtggtcgccctctgcagccactctggctcccaagacttccctgactcccccactcccctccttgccaggggcacacccggaccccacacggcaggcccctctcttgggaggggcctttggaatgatgaaattccaaccctgctgcccggtcagcggtaccgtttcctgccctctctctgagaggccctttctggagtcctgggaaggtgtctgcctggccgcgctgccagatcagtacatcttttgtaaaaaccctgaaatgggcagggaagaaaacagggatttcccctctctagatccctgccaggtccctctccaggaggcccctctgctctcctgaagggtggtccctgagggtctgcccagccttggcacgagaggttggttccagcccctggcagggcttccttccaagggcccctgcagcctacaaactgggcctcgggcgactcaaaataagtgctcttgggggtggctctaccccattacctcccccagccacaactcctggccttcgacttctggctgggttagccagaccctggtttctctaccctgatgttgcatgagacctggtaacagtgtctccctcccagctccttgccaaagcctctgttgagacctgggcttcttgtagccccttctccctctggccagctgcacagcctgtgggaggtgcccggcccaggctgggtgtgggggaagctggtccctgctgtgggtggcgctggggacctaggggctccttctgaggttggccttgtggcctctgggctgtatgcctctggggtgtagggaagaggcgggaggagtcatggggatggggagcggcagggggagagaggggccctcgacaaaggcttgggaaatgaggggaggtggaggcagggcaggggaagcgaagagtcagccttggagagagcaccctggggcctccgtgtcggggtacacccagcactttgcgacctgcggcccagcaggcgcggaggatggcggggaggaagccagcagcccctgtgtttactgtcgtcagaaaggtcttgtgttttggttttggggtttttgttttgtttgtgttttgtttggcttgtttgttttttaaggggaaaaaagtttgtaattatttcatccaaatctcccgttatatatctgtgaataataagagattttataatagcaagaaaatgatgtatattttagtttgttgacaaataagtcatcatgatcacgaaggacactgagaaaaaataatttagaaccctggtttttgtgaatttttttgttttgtgtttctttgttttgagatttgtgtttggtttggtttttgcactgcactaaggcaggagggttggagggctgggtgcagcctgggagtccgatggttttcagcaggagacggggtgtcccctgcagggggctaaactgcaggggcctgagattagctgtgaacatgtgggagcccgatgcatgtgggtcagggatctgggggcccccccagctggcgggaaccccaaatggacacaaactgtacatttgccaatgggtttttttcagaccatggtttttacttgcaaataaacctgagttcttttctgca

SEQ ID NO: 34154 - DNA, 5101 bp, Homo sapiens
  source 1..5101: mol_type = unassigned DNA
cgcggattggggagcgctgcggcgactggctgcgtggagcccggcccggggcccgcaggcacttgcgtgtgtgaagcggggagatccggcgcgctgcccgttgcccgccccgcggccgcacgtgggcgggagcggcggcccgagaggagcccgaggagtaggaggaggaagaggaggggacgcacggcggcgcagcgggggacctggggcagcccgcgcgaagccccgccccggccctgagccccgcgcgcgcgcgggcgggatgccccgcggccgctgcactttggctcgagcactgccctgagccggtcgggcccgcgggcgccatggagcagtggcggcagtgcggccgctggctcatcgattgcaaggtcctgccgcccaaccaccgggtggtgtggccctcggccgtggtcttcgacctggcgcaggcgctgcgcgacggggtccttctgtgccagctgctgcacaacctctcccccggctccatcgacctcaaggacatcaacttccggccgcagatgtcccagtttctgtgtttgaagaacatacgcaccttcctgaaagtctgccacgataaatttggattaaggaacagcgagctgtttgacccctttgacctcttcgatgtgcgagactttggaaaggtcatctccgcggtgtcgaggctctccctgcacagcatcgcgcagaacaaagggatcaggccttttccctcagaggagaccacagagaatgacgatgacgtctaccgcagcctggaggagctggccgacgagcatgacctgggggaggacatctacgactgcgtcccgtgtgaggatggaggggacgacatctacgaggacatcatcaaggtggaggtgcagcagcccatgaaaatgggcatgactgaagatgacaagaggaactgctgcctgctggagatccaggagaccgaggccaagtactaccgcaccctggaggacattgagaagaactacatgagccccctgcggctggtgctgagcccggcggacatggcagctgtcttcattaacctggaggacctgatcaaggtgcatcacagcttcctgagggccatcgacgtgtccgtgatggtggggggcagcacgctggccaaggtcttcctcgatttcaaggaaaggcttctgatctacggggagtactgcagccacatggagcacgcccagaacacactgaaccagctcctggccagccgggaggacttcaggcagaaagtcgaggagtgcacactgaaggtccaggatggaaaatttaagctgcaagacctgctggtggtccccatgcagagggtgctcaaataccacctgctcttgaaggagcttctgagccattctgcggaacggcctgagaggcagcagctcaaagaagcactggaagccatgcaggacttggcgatgtacatcaatgaagttaaacgggacaaggagaccttgaggaaaatcagcgaatttcagagttctatagaaaatttgcaagtgaaactggaggaatttggaagaccaaagattgacggggaactgaaagtccggtccatagtcaaccacaccaagcaggacaggtacttgttcctgtttgacaaggtggtcatcgtctgcaagcggaagggctacagctacgagctcaaggagatcatcgagctgctgttccacaagatgaccgacgaccccatgaacaacaaggacgtcaagaagtggtcctacggcttctacctaattcaccttcaaggaaagcagggcttccagtttttctgcaaaacagaagatatgaagaggaagtggatggagcagtttgagatggccatgtcaaacatcaagccagacaaagccaatgccaaccaccacagtttccagatgtacacgtttgacaagaccaccaactgcaaagcctgcaaaatgttcctcaggggcaccttctaccagggatacatgtgtaccaagtgtggcgtcggggcacacaaggagtgcctggaagtgatacctccctgcaagttcacttctcctgcagatctggacgcctccggagcgggaccaggtcccaagatggtggccatgcagaattaccatggcaacccagcccctcccgggaagcctgtgctgaccttccagacgggcgacgtgcttgagctgctgaggggcgaccctgagtctccgtggtgggagggtcgtctggtacaaaccaggaagtcagggtatttccccagctcatctgtgaagccctgccctgtggatggaaggccgcccatcagccggccgccatcccgggagatcgactacactgcatacccctggtttgcaggtaacatggagaggcagcagacggacaacctgctcaagtcccacgccagcgggacctacctgatcagggagcggcctgccgaggctgagcgctttgcaataagcatcaagttcaatgatgaggtgaagcacatcaaggtggtggagaaggacaactggatccacatcacagaggccaagaaattcgacagcctcctggagttggtggagtactaccagtgccactcactgaaggagagcttcaagcagctggacaccacactcaagtacccctacaagtcccgggaacgttcggcctccagggcctccagccggtccccagcttcctgtgcttcctacaacttttcttttctcagtcctcagggcctcagctttgcttctcagggcccctccgctcccttctggtcagtgttcacgccccgcgtcatcggcacagctgtggccaggtataactttgccgcccgagatatgagggagctttcgctgcgggagggtgacgtggtgaggatctacagccgcatcggcggagaccagggctggtggaagggcgagaccaacggacggattggctggtttccttcaacgtacgtagaagaggagggcatccagtgacggcaggaacgtggacaagactcgcagattttcttgggagagtcactccagccctgaagtctgtctctagctcctctgtgactcagaggggaaataccaacctcccagtcttccactgcccacagggatagggagggtgttgagaatcctaaactcgaaccgtttcactgtcagcctgccctcggcgacccatcactgggtatgctattgtacatagaggaaacctgggctagccccacccagagcgcagaggagggggcaccgacagcgctgcgagccaggctctgggtagtggctgaggccagaggcccatcgcctgcccctgtccaactgagatggccttcaggagcctaggtttgaacagcagatgctgtcccaggaagggctagggacatcggaggggacctgcccccacaccctctgctcagcccctggactcagccttgcctgtcttttcctgctgctcccagggggaggtgtcagacctcgggaggcagacgggaccagagccaggctgttcactgtgggcccacttgccccactgtgctagggcgcgggaggagagagcactgtggtcgccctctgcagccactctggctcccaagacttccctgactcccccactcccctccttgccaggggcacacccggaccccacacggcaggcccctctcttgggaggggcctttggaatgatgaaattccaaccctgctgcccggtcagcggtaccgtttcctgccctctctctgagaggccctttctggagtcctgggaaggtgtctgcctggccgcgctgccagatcagtacatcttttgtaaaaaccctgaaatgggcagggaagaaaacagggatttcccctctctagatccctgccaggtccctctccaggaggcccctctgctctcctgaagggtggtccctgagggtctgcccagccttggcacgagaggttggttccagcccctggcagggcttccttccaagggcccctgcagcctacaaactgggcctcgggcgactcaaaataagtgctcttgggggtggctctaccccattacctcccccagccacaactcctggccttcgacttctggctgggttagccagaccctggtttctctaccctgatgttgcatgagacctggtaacagtgtctccctcccagctccttgccaaagcctctgttgagacctgggcttcttgtagccccttctccctctggccagctgcacagcctgtgggaggtgcccggcccaggctgggtgtgggggaagctggtccctgctgtgggtggcgctggggacctaggggctccttctgaggttggccttgtggcctctgggctgtatgcctctggggtgtagggaagaggcgggaggagtcatggggatggggagcggcagggggagagaggggccctcgacaaaggcttgggaaatgaggggaggtggaggcagggcaggggaagcgaagagtcagccttggagagagcaccctggggcctccgtgtcggggtacacccagcactttgcgacctgcggcccagcaggcgcggaggatggcggggaggaagccagcagcccctgtgtttactgtcgtcagaaaggtcttgtgttttggttttggggtttttgttttgtttgtgttttgtttggcttgtttgttttttaaggggaaaaaagtttgtaattatttcatccaaatctcccgttatatatctgtgaataataagagattttataatagcaagaaaatgatgtatattttagtttgttgacaaataagtcatcatgatcacgaaggacactgagaaaaaataatttagaaccctggtttttgtgaatttttttgttttgtgtttctttgttttgagatttgtgtttggtttggtttttgcactgcactaaggcaggagggttggagggctgggtgcagcctgggagtccgatggttttcagcaggagacggggtgtcccctgcagggggctaaactgcaggggcctgagattagctgtgaacatgtgggagcccgatgcatgtgggtcagggatctgggggcccccccagctggcgggaaccccaaatggacacaaactgtacatttgccaatgggtttttttcagaccatggtttttacttgcaaataaacctgagttcttttctgca

SEQ ID NO: 34155 - DNA, 4691 bp, Homo sapiens
  source 1..4691: mol_type = unassigned DNA
gccatggagcagtggcggcagtgcggccgctggctcatcgattgcaaggtcctgccgcccaaccaccgggtggtgtggccctcggccgtggtcttcgacctggcgcaggcgctgcgcgacggggtccttctgtgccagctgctgcacaacctctcccccggctccatcgacctcaaggacatcaacttccggccgcagatgtcccagtttctgtgtttgaagaacatacgcaccttcctgaaagtctgccacgataaatttggattaaggaacagcgagctgtttgacccctttgacctcttcgatgtgcgagactttggaaaggtcatctccgcggtgtcgaggctctccctgcacagcatcgcgcagaacaaagggatcaggccttttccctcagaggagaccacagagaatgacgatgacgtctaccgcagcctggaggagctggccgacgagcatgacctgggggaggacatctacgactgcgtcccgtgtgaggatggaggggacgacatctacgaggacatcatcaaggtggaggtgcagcagcccatgaaaatgggcatgactgaagatgacaagaggaactgctgcctgctggagatccaggagaccgaggccaagtactaccgcaccctggaggacattgagaagaactacatgagccccctgcggctggtgctgagcccggcggacatggcagctgtcttcattaacctggaggacctgatcaaggtgcatcacagcttcctgagggccatcgacgtgtccgtgatggtggggggcagcacgctggccaaggtcttcctcgatttcaaggaaaggcttctgatctacggggagtactgcagccacatggagcacgcccagaacacactgaaccagctcctggccagccgggaggacttcaggcagaaagtcgaggagtgcacactgaaggtccaggatggaaaatttaagctgcaagacctgctggtggtccccatgcagagggtgctcaaataccacctgctcttgaaggagcttctgagccattctgcggaacggcctgagaggcagcagctcaaagaagcactggaagccatgcaggacttggcgatgtacatcaatgaagttaaacgggacaaggagaccttgaggaaaatcagcgaatttcagagttctatagaaaatttgcaagtgaaactggaggaatttggaagaccaaagattgacggggaactgaaagtccggtccatagtcaaccacaccaagcaggacaggtacttgttcctgtttgacaaggtggtcatcgtctgcaagcggaagggctacagctacgagctcaaggagatcatcgagctgctgttccacaagatgaccgacgaccccatgaacaacaaggacgtcaagaagtggtcctacggcttctacctaattcaccttcaaggaaagcagggcttccagtttttctgcaaaacagaagatatgaagaggaagtggatggagcagtttgagatggccatgtcaaacatcaagccagacaaagccaatgccaaccaccacagtttccagatgtacacgtttgacaagaccaccaactgcaaagcctgcaaaatgttcctcaggggcaccttctaccagggatacatgtgtaccaagtgtggcgtcggggcacacaaggagtgcctggaagtgatacctccctgcaagttcacttctcctgcagatctggacgcctccggagcgggaccaggtcccaagatggtggccatgcagaattaccatggcaacccagcccctcccgggaagcctgtgctgaccttccagacgggcgacgtgcttgagctgctgaggggcgaccctgagtctccgtggtgggagggtcgtctggtacaaaccaggaagtcagggtatttccccagctcatctgtgaagccctgccctgtggatggaaggccgcccatcagccggccgccatcccgggagatcgactacactgcatacccctggtttgcaggtaacatggagaggcagcagacggacaacctgctcaagtcccacgccagcgggacctacctgatcagggagcggcctgccgaggctgagcgctttgcaataagcatcaagttcaatgatgaggtgaagcacatcaaggtggtggagaaggacaactggatccacatcacagaggccaagaaattcgacagcctcctggagttggtggagtactaccagtgccactcactgaaggagagcttcaagcagctggacaccacactcaagtacccctacaagtcccgggaacgttcggcctccagggcctccagccggtccccagtgttcacgccccgcgtcatcggcacagctgtggccaggtataactttgccgcccgagatatgagggagctttcgctgcgggagggtgacgtggtgaggatctacagccgcatcggcggagaccagggctggtggaagggcgagaccaacggacggattggctggtttccttcaacgtacgtagaagaggagggcatccagtgacggcaggaacgtggacaagactcgcagattttcttgggagagtcactccagccctgaagtctgtctctagctcctctgtgactcagaggggaaataccaacctcccagtcttccactgcccacagggatagggagggtgttgagaatcctaaactcgaaccgtttcactgtcagcctgccctcggcgacccatcactgggtatgctattgtacatagaggaaacctgggctagccccacccagagcgcagaggagggggcaccgacagcgctgcgagccaggctctgggtagtggctgaggccagaggcccatcgcctgcccctgtccaactgagatggccttcaggagcctaggtttgaacagcagatgctgtcccaggaagggctagggacatcggaggggacctgcccccacaccctctgctcagcccctggactcagccttgcctgtcttttcctgctgctcccagggggaggtgtcagacctcgggaggcagacgggaccagagccaggctgttcactgtgggcccacttgccccactgtgctagggcgcgggaggagagagcactgtggtcgccctctgcagccactctggctcccaagacttccctgactcccccactcccctccttgccaggggcacacccggaccccacacggcaggcccctctcttgggaggggcctttggaatgatgaaattccaaccctgctgcccggtcagcggtaccgtttcctgccctctctctgagaggccctttctggagtcctgggaaggtgtctgcctggccgcgctgccagatcagtacatcttttgtaaaaaccctgaaatgggcagggaagaaaacagggatttcccctctctagatccctgccaggtccctctccaggaggcccctctgctctcctgaagggtggtccctgagggtctgcccagccttggcacgagaggttggttccagcccctggcagggcttccttccaagggcccctgcagcctacaaactgggcctcgggcgactcaaaataagtgctcttgggggtggctctaccccattacctcccccagccacaactcctggccttcgacttctggctgggttagccagaccctggtttctctaccctgatgttgcatgagacctggtaacagtgtctccctcccagctccttgccaaagcctctgttgagacctgggcttcttgtagccccttctccctctggccagctgcacagcctgtgggaggtgcccggcccaggctgggtgtgggggaagctggtccctgctgtgggtggcgctggggacctaggggctccttctgaggttggccttgtggcctctgggctgtatgcctctggggtgtagggaagaggcgggaggagtcatggggatggggagcggcagggggagagaggggccctcgacaaaggcttgggaaatgaggggaggtggaggcagggcaggggaagcgaagagtcagccttggagagagcaccctggggcctccgtgtcggggtacacccagcactttgcgacctgcggcccagcaggcgcggaggatggcggggaggaagccagcagcccctgtgtttactgtcgtcagaaaggtcttgtgttttggttttggggtttttgttttgtttgtgttttgtttggcttgtttgttttttaaggggaaaaaagtttgtaattatttcatccaaatctcccgttatatatctgtgaataataagagattttataatagcaagaaaatgatgtatattttagtttgttgacaaataagtcatcatgatcacgaaggacactgagaaaaaataatttagaaccctggtttttgtgaatttttttgttttgtgtttctttgttttgagatttgtgtttggtttggtttttgcactgcactaaggcaggagggttggagggctgggtgcagcctgggagtccgatggttttcagcaggagacggggtgtcccctgcagggggctaaactgcaggggcctgagattagctgtgaacatgtgggagcccgatgcatgtgggtcagggatctgggggcccccccagctggcgggaaccccaaatggacacaaactgtacatttgccaatgggtttttttcagaccatggtttttacttgcaaataaacctgagttcttttctgca

SEQ ID NO: 34156 - DNA, 4990 bp, Homo sapiens
  source 1..4990: mol_type = unassigned DNA
gcggcagccgccgccgagccggccggggcgcacggagagcgcgcgggactcgctgcagcggcggccgggtcgcggcgcacccgggccgggaccggagccgagcctagcgcggcgcccgcgacccgtcagccgcggctcctgctccctcgatcccgcgcggggaaagggccggcggctgttggcgtcggcggggcgcggaggaaccgcggcggcggcggcggcggccgcatccttgccgcccgccccggcccagccgcgtcccggagccgtcgggcatggagccgtggaagcagtgcgcgcagtggctcatccattgcaaggtgctgcccaccaaccaccgggtgacctgggactcggctcaggtgttcgaccttgcgcagaccctccgcgatggagtcctgctctgccagctgcttaacaacctccgggcgcactccatcaacctgaaggagatcaacctgaggccgcagatgtcccagtttctctgtttgaagaacataaggacatttctcacggcctgttgtgagacgtttggaatgaggaaaagtgaacttttcgaggcatttgacttgtttgatgttcgtgactttggaaaggttatagaaacattatcacgactttctcgaacacctatagcattggccacaggaatcaggcccttcccaacagaagaaagcattaatgatgaagacatctacaaaggccttcctgatttaatagatgaaacccttgtggaagatgaagaagatctctatgactgtgtttatggggaagatgaaggtggagaagtctatgaggacttaatgaaggcagaggaagcacatcagcccaaatgtccagaaaatgatatacgaagttgttgtctagcagaaattaagcagacagaagaaaaatatacagaaactttggagtcaatagaaaagtatttcatggcaccactaaaaagatttctgacagcagcagaatttgattcagtattcatcaacattcctgaacttgtaaaacttcatcggaacctaatgcaagagattcatgattccattgtaaataaaaatgaccagaacttgtaccaagtttttattaactacaaggaaagattggttatttacgggcagtactgcagtggagtggagtcagccatctctagtttagactacatttctaagacaaaagaagatgtcaaactgaaattagaggaatgttccaaaagagcaaataatgggaaatttactcttcgagacttgcttgtggttcctatgcaacgtgttttaaagtaccaccttctcctccaggaactggtcaaacataccactgatccgactgagaaggcaaatctgaaactggctcttgatgccatgaaggacttggcacaatatgtgaatgaagtgaaaagagataatgagacccttcgtgaaattaaacagtttcagctatctatagagaatttgaaccaaccagttttgctttttggacgacctcagggagatggtgaaattcgaataaccactctagacaagcataccaaacaagaaaggcatatcttcttatttgatttggcagtgatcgtatgtaagagaaaaggtgataactatgaaatgaaggaaataatagatcttcagcagtacaagatagccaataatcctacaaccgataaagaaaacaaaaagtggtcttatggcttctacctcatccatacccaaggacaaaatgggttagaattttattgcaaaacaaaagatttaaagaagaaatggctagaacagtttgaaatggctttgtctaacataagaccagactatgcagactccaatttccacgacttcaagatgcataccttcactcgagtcacatcctgcaaagtctgccagatgctcctgaggggaacattttatcaaggctatttatgttttaagtgtggagcgagagcacacaaagaatgtttgggaagagtagacaattgtggcagagttaattctggtgaacaagggacactcaaactaccagagaaacggaccaatggactgcgaagaactcctaaacaggtggatccaggtttaccaaagatgcaggtcattaggaactattctggaacaccacccccagctctgcatgaaggaccccctttacagctccaggccggggataccgttgaacttctgaaaggagatgcacacagtctgttttggcagggcagaaatttagcatctggagaggttggattttttccaagtgatgcagtcaagccttgcccatgtgtgcccaaaccagtagattattcttgccaaccctggtatgctggagcaatggaaagattgcaagcagagaccgaacttattaatagggtaaatagtacttaccttgtgaggcacaggaccaaagagtcaggagaatatgcaattagcattaagtacaataatgaagcaaagcacatcaagattttaacaagagatggcttttttcacattgcagaaaatagaaaatttaaaagtttaatggaacttgtggagtactacaagcatcattctctcaaggaagggttcagaaccttagatacaactctgcagtttccatacaaggagccagaacattcagctggacagaggggtaatagagcaggcaacagcttgttaagtccaaaagtgctgggcattgccatcgctcggtatgacttctgtgcaagagatatgagagagttgtccttgttgaaaggagatgtggtgaagatttacacaaagatgagtgcaaatggctggtggagaggagaagtaaatggcagggtgggctggtttccatccacatatgtggaagaggatgaataaattcaaatcccgtgttgcaccctgcaccaaaaatttcagagaagggataaatagaagcctgcacagcatcgtgaattaactgaagtgtttaaaaagctgcatttctggctgttcaacatcctccctccttagcccctcctaagtcttaatgctgagatttctaaagatgctggtactgacagattaatggcttgcctagagctgtgcaagaaacagcctgccagtctgtcattgtcagggaccagggcaaaaccaagagctgttcttcccagaagagccctgcaaacacattggttcgtgcttccctttacttcttctggtcagataccatgaatgccagtcatcagtaaatcttaatacacttttgctttattctcacatgccattcaccagattatttgatggtacaaagaagcagaagtgtaattttccttttcccagcatgacgaaaaattggagttctgccatttgagcagcttactggaaagatccagccttacttgtcttaaattgtccaacaaggtgactcattgcccggcaaacacttttaccctcagatgttactcatgatattataaaatatgaggccagtgctcaggtttgcatcataagtgagctatccctgaagggttttaattacttatttggtgtcctgattatatttgcaaacttctttataaaaggtgaaaaaagcacacaaaagagagggtgtcttcatattaaaccttcacaaccttcatgatttcataggattattttggaaatatagcacttgactttatgaaaggatctgggctaggtatattaagggtagttgccaataacctgaagaagctggcattgtttacagaaacagatcaagggctataatttatgtcattttatagcagcagtatctattaatacatgccttttcctcccatccacctcccccgcacacacacaaagatgacctgggacatgatttttttattcccacattttcttggagcacaaacaactttgttgaggattttggaaggaaagcacaactgggtcctttattcatttctgggacagaaagagggtcagtggacttttgtgggcctccagcttctctcagagtctccccctctgcagcccatcctgggagtgtattaactggagggaagatgggtcttgcagtacatttgttttgcccagccatcactcttttttgtgaggagcctaaatacattcttcctggggtccagagtccccattcaaggcagtcaagttaagacactaacttggccctttcctgatggaaatatttcctccatagcagaagttgtgttctgacaagactgagagagttacatgttgggaaaaaaaagaagcattaacttagtagaactgaaccaggagcattaagttctgaaattttgaatcatctctgaaatgaagcaggtgtagcctgccctctcatcaatccgtctgggtgccagaactcaaggttcagtggacacatccccctgttagagaccctcatgggctaggacttttcatctaggatagattcaagacctttacctcagaattatgtaaactgtgattgtgttttagaaaaattattatttgctaaaaccatttaagtctttgtatatgtgtaaatgatcacaaaaatgtattttataaaatgttctgtacaataaagttacacctcaaagtgtactcttggaatggattctttcctgtaaagtcttatctgcgactctgtctcgggaatgttttgtctgttgccgtcagccgaactttgttatggagggagcagcctcacacaagcagaaacactcctgtggatggtattgtagcatgtattgtttattttagtcaatagaccctctccttataaatggtgtttagtcttcctgttgcatttcatgggcctgggggtttcctagcagaggatattggagcccctttttgtgacattaccaattacatctttgtccacgtttaatactttgttttggaaaatttaaatgctgcagatttgtgtagagttctaataccaaagacagaagtaaatgttttccatatactttgtcttgcctgtatgcagccctcgtgtaatacggtgaattagagtggtatttcactttgtattattttgtaaatatgtcaatataataaatagtgactaaattgat

SEQ ID NO: 34157 - DNA, 2271 bp, Homo sapiens
  source 1..2271: mol_type = unassigned DNA
agtgcgcgcagtggctcatccattgcaaggtgctgcccaccaaccaccgggtgacctgggactcggctcaggtgttcgaccttgcgcagaccctccgcgatggagtcctgctctgccagctgcttaacaacctccgggcgcactccatcaacctgaaggagatcaacctgaggccgcagatgtcccagtttctctgtttgaagaacataaggacatttctcacggcctgttgtgagacgtttggaatgaggaaaagtgaacttttcgaggcatttgacttgtttgatgttcgtgactttggaaaggttatagaaacattatcacgactttctcgaacacctatagcattggccacaggaatcaggcccttcccaacagaagaaagcattaatgatgaagacatctacaaaggccttcctgatttaatagatgaaacccttgtggaagatgaagaagatctctatgactgtgtttatggggaagatgaaggtggagaagtctatgaggacttaatgaaggcagaggaagcacatcagcccaaatgtccagaaaatgatatacgaagttgttgtctagcagaaattaagcagacagaagaaaaatatacagaaactttggagtcaatagaaaagtatttcatggcaccactaaaaagatttctgacagcagcagaatttgattcagtattcatcaacattcctgaacttgtaaaacttcatcggaacctaatgcaagagattcatgattccattgtaaataaaaatgaccagaacttgtaccaagtttttattaactacaaggaaagattggttatttacgggcagtactgcagtggagtggagtcagccatctctagtttagactacatttctaagacaaaagaagatgtcaaactgaaattagaggaatgttccaaaagagcaaataatgggaaatttactcttcgagacttgcttgtggttcctatgcaacgtgttttaaagtaccaccttctcctccaggaactggtcaaacataccactgatccgactgagaaggcaaatctgaaactggctcttgatgccatgaaggacttggcacaatatgtgaatgaagtgaaaagagataatgagacccttcgtgaaattaaacagtttcagctatctatagagaatttgaaccaaccagttttgctttttggacgacctcagggagatggtgaaattcgaataaccactctagacaagcataccaaacaagaaaggcatatcttcttatttgatttggcagtgatcgtatgtaagagaaaaggtgataactatgaaatgaaggaaataatagatcttcagcagtacaagatagccaataatcctacaaccgataaagaaaacaaaaagtggtcttatggcttctacctcatccatacccaaggacaaaatgggttagaattttattgcaaaacaaaagatttaaagaagaaatggctagaacagtttgaaatggctttgtctaacataagaccagactatgcagactccaatttccacgacttcaagatgcataccttcactcgagtcacatcctgcaaagtctgccagatgctcctgaggggaacattttatcaaggctatttatgttttaagtgtggagcgagagcacacaaagaatgtttgggaagagtagacaattgtggcagagttaattctggtgaacaagggacactcaaactaccagagaaacggaccaatggactgcgaagaactcctaaacaggtggatccagatgtgccctgtctccttcatttctttatttccatggcccctgctactagaagcattgtaaaaagccaaaagaagaacaagaaattctgaggacatgggtgaaaatgcagccttgaggtttctgaaaataacaggagacagacaaggctggtgtccagcaacaatactgggtagctctttttgtccccacttacacagcgaaggataaagaagagatcctatggacacttagtaaggattacttcatgttttaattcaaagtactttggaaagaagactttgagcagagtggaatagcaggaggtttttgtaaggtgaaatagaatgaaagtgcagccaagaatttttctgtcttcaattttaaagaacaccggcataactcatttttctttttttcccctgtgttctttttgaccttcttagcagctcctgactttctcccttggggatttttctctgtatagtcagcgctgactcccttagaaatcctgaaccccacacccgtatcgcg

SEQ ID NO: 34158 - DNA, 1293 bp, Homo sapiens
  source 1..1293: mol_type = unassigned DNA
aaagcagtggtgttttaccactctgcagagaaagctaaggttgctaaccaaacaaaataactttacactgacaatgccaatttttacatttctttcagaacaagggacactcaaactaccagagaaacggaccaatggactgcgaagaactcctaaacaggtggatccaggtttaccaaagatgcaggtcattaggaactattctggaacaccacccccagctctgcatgaaggaccccctttacagctccaggccggggataccgttgaacttctgaaaggagatgcacacagtctgttttggcagggcagaaatttagcatctggagaggttggattttttccaagtgatgcagtcaagccttgcccatgtgtgcccaaaccagtagattattcttgccaaccctggtatgctggagcaatggaaagattgcaagcagagaccgaacttattaatagggtaaatagtacttaccttgtgaggcacaggaccaaagagtcaggagaatatgcaattagcattaagtacaataatgaagcaaagcacatcaagattttaacaagagatggcttttttcacattgcagaaaatagaaaatttaaaagtttaatggaacttgtggagtactacaagcatcattctctcaaggaagggttcagaaccttagatacaactctgcagtttccatacaaggagccagaacattcagctggacagaggggtaatagagcaggcaacagcttgttaagtccaaaagtgctgggcattgccatcgctcggtatgacttctgtgcaagagatatgagagagttgtccttgttgaaaggagatgtggtgaagatttacacaaagatgagtgcaaatggctggtggagaggagaagtaaatggcagggtgggctggtttccatccacatatgtggaagaggatgaataaattcaaatcccgtgttgcaccctgcaccaaaaatttcagagaagggataaatagaagcctgcacagcatcgtgaattaactgaagtgtttaaaaagctgcatttctggctgttcaacatcctccctccttagcccctcctaagtcttaatgctgagatttctaaagatgctggtactgacagattaatggcttgcctagagctgtgcaagaaacagcctgccagtctgtcattgtcagggaccagggcaaaaccaagagctgttcttcccagaagagccctgcaaacacattggttcgtgcttccctttacttcttctggtcagataccatgaatgccagtcatcagtaaatctta

SEQ ID NO: 34159 - DNA, 4510 bp, Homo sapiens
  source 1..4510: mol_type = unassigned DNA
ctcctgctccctcgatcccgcgcggggaaagggccggcggctgttggcgtcggcggggcgcggaggaaccgcggcggcggcggcggcggccgcatccttgccgcccgccccggcccagccgcgtcccggagccgtcgggcatggagccgtggaagcagtgcgcgcagtggctcatccattgcaaggtgctgcccaccaaccaccgggtgacctgggactcggctcaggtgttcgaccttgcgcagaccctccgcgatggagtcctgctctgccagctgcttaacaacctccgggcgcactccatcaacctgaaggagatcaacctgaggccgcagatgtcccagtttctctgtttgaagaacataaggacatttctcacggcctgttgtgagacgtttggaatgaggaaaagtgaacttttcgaggcatttgacttgtttgatgttcgtgactttggaaaggttatagaaacattatcacgactttctcgaacacctatagcattggccacaggaatcaggcccttcccaacagaagaaagcattaatgatgaagacatctacaaaggccttcctgatttaatagatgaaacccttgtggaagatgaagaagatctctatgactgtgtttatggggaagatgaaggtggagaagtctatgaggacttaatgaaggcagaggaagcacatcagcccaaatgtccagaaaatgatatacgaagttgttgtctagcagaaattaagcagacagaagaaaaatatacagaaactttggagtcaatagaaaagtatttcatggcaccactaaaaagatttctgacagcagcagaatttgattcagtattcatcaacattcctgaacttgtaaaacttcatcggaacctaatgcaagagattcatgattccattgtaaataaaaatgaccagaacttgtaccaagtttttattaactacaaggaaagattggttatttacgggcagtactgcagtggagtggagtcagccatctctagtttagactacatttctaagacaaaagaagatgtcaaactgaaattagaggaatgttccaaaagagcaaataatgggaaatttactcttcgagacttgcttgtggttcctatgcaacgtgttttaaagtaccaccttctcctccaggaactggtcaaacataccactgatccgactgagaaggcaaatctgaaactggctcttgatgccatgaaggacttggcacaatatgtgaatgaagtgaaaagagataatgagacccttcgtgaaattaaacagtttcagctatctatagagaatttgaaccaaccagttttgctttttggacgacctcagggagatggtgaaattcgaataaccactctagacaagcataccaaacaagaaaggcatatcttcttatttgatttggcagtgatcgtatgtaagagaaaaggtgataactatgaaatgaaggaaataatagatcttcagcagtacaagatagccaataatcctacaaccgataaagaaaacaaaaagtggtcttatggcttctacctcatccatacccaaggacaaaatgggttagaattttattgcaaaacaaaagatttaaagaagaaatggctagaacagtttgaaatggctttgtctaacataagaccagactatgcagactccaatttccacgacttcaagatgcataccttcactcgagtcacatcctgcaaagtctgccagatgctcctgaggggaacattttatcaaggctatttatgttttaagtgtggagcgagagcacacaaagaatgtttgggaagagtagacaattgtggcagagttaattctggtgaacaagggacactcaaactaccagagaaacggaccaatggactgcgaagaactcctaaacaggtggatccaggtttaccaaagatgcaggtcattaggaactattctggaacaccacccccagctctgcatgaaggaccccctttacagctccaggccggggataccgttgaacttctgaaaggagatgcacacagtctgttttggcagggcagaaatttagcatctggagaggttggattttttccaagtgatgcagtcaagccttgcccatgtgtgcccaaaccagtagattattcttgccaaccctggtatgctggagcaatggaaagattgcaagcagagaccgaacttattaatagggtaaatagtacttaccttgtgaggcacaggaccaaagagtcaggagaatatgcaattagcattaagtacaataatgaagcaaagcacatcaagattttaacaagagatggcttttttcacattgcagaaaatagaaaatttaaaagtttaatggaacttgtggagtactacaagcatcattctctcaaggaagggttcagaaccttagatacaactctgcagtttccatacaaggagccagaacattcagctggacagaggggtaatagagcaggcaacagctccccctctttgttctgtggcttttcttttgtaactcctccagactacagctttgttcccccttcttccactcctttctggtcagtgttaagtccaaaagtgctgggcattgccatcgctcggtatgacttctgtgcaagagatatgagagagttgtccttgttgaaaggagatgtggtgaagatttacacaaagatgagtgcaaatggctggtggagaggagaagtaaatggcagggtgggctggtttccatccacatatgtggaagaggatgaataaattcaaatcccgtgttgcaccctgcaccaaaaatttcagagaagggataaatagaagcctgcacagcatcgtgaattaactgaagtgtttaaaaagctgcatttctggctgttcaacatcctccctccttagcccctcctaagtcttaatgctgagatttctaaagatgctggtactgacagattaatggcttgcctagagctgtgcaagaaacagcctgccagtctgtcattgtcagggaccagggcaaaaccaagagctgttcttcccagaagagccctgcaaacacattggttcgtgcttccctttacttcttctggtcagataccatgaatgccagtcatcagtaaatcttaatacacttttgctttattctcacatgccattcaccagattatttgatggtacaaagaagcagaagtgtaattttccttttcccagcatgacgaaaaattggagttctgccatttgagcagcttactggaaagatccagccttacttgtcttaaattgtccaacaaggtgactcattgcccggcaaacacttttaccctcagatgttactcatgatattataaaatatgaggccagtgctcaggtttgcatcataagtgagctatccctgaagggttttaattacttatttggtgtcctgattatatttgcaaacttctttataaaaggtgaaaaaagcacacaaaagagagggtgtcttcatattaaaccttcacaaccttcatgatttcataggattattttggaaatatagcacttgactttatgaaaggatctgggctaggtatattaagggtagttgccaataacctgaagaagctggcattgtttacagaaacagatcaagggctataatttatgtcattttatagcagcagtatctattaatacatgccttttcctcccatccacctcccccgcacacacacaaagatgacctgggacatgatttttttattcccacattttcttggagcacaaacaactttgttgaggattttggaaggaaagcacaactgggtcctttattcatttctgggacagaaagagggtcagtggacttttgtgggcctccagcttctctcagagtctccccctctgcagcccatcctgggagtgtattaactggagggaagatgggtcttgcagtacatttgttttgcccagccatcactcttttttgtgaggagcctaaatacattcttcctggggtccagagtccccattcaaggcagtcaagttaagacactaacttggccctttcctgatggaaatatttcctccatagcagaagttgtgttctgacaagactgagagagttacatgttgggaaaaaaaagaagcattaacttagtagaactgaaccaggagcattaagttctgaaattttgaatcatctctgaaatgaagcaggtgtagcctgccctctcatcaatccgtctgggtgccagaactcaaggttcagtggacacatccccctgttagagaccctcatgggctaggacttttcatctaggatagattcaagacctttacctcagaattatgtaaactgtgattgtgttttagaaaaattattatttgctaaaaccatttaagtctttgtatatgtgtaaatgatcacaaaaatgtattttataaaatgttctgtacaataaagttacacctcaaagtgtactcttggaatggattctttcctgtaaagtcttatctgcgactctgtctcg

SEQ ID NO: 34160 - DNA, 1374 bp, Homo sapiens
  source 1..1374: mol_type = unassigned DNA
aaagcagtggtgttttaccactctgcagagaaagctaaggttgctaaccaaacaaaataactttacactgacaatgccaatttttacatttctttcagaacaagggacactcaaactaccagaggtttaccaaagatgcaggtcattaggaactattctggaacaccacccccagctctgcatgaaggaccccctttacagctccaggccggggataccgttgaacttctgaaaggagatgcacacagtctgttttggcagggcagaaatttagcatctggagaggttggattttttccaagtgatgcagtcaagccttgcccatgtgtgcccaaaccagtagattattcttgccaaccctggtatgctggagcaatggaaagattgcaagcagagaccgaacttattaatagggtaaatagtacttaccttgtgaggcacaggaccaaagagtcaggagaatatgcaattagcattaagtacaataatgaagcaaagcacatcaagattttaacaagagatggcttttttcacattgcagaaaatagaaaatttaaaagtttaatggaacttgtggagtactacaagcatcattctctcaaggaagggttcagaaccttagatacaactctgcagtttccatacaaggagccagaacattcagctggacagaggggtaatagagcaggcaacagcttgttaagtccaaaagtgctgggcattgccatcgctcggtatgacttctgtgcaagagatatgagagagttgtccttgttgaaaggagatgtggtgaagatttacacaaagatgagtgcaaatggctggtggagaggagaagtaaatggcagggtgggctggtttccatccacatatgtggaagaggatgaataaattcaaatcccgtgttgcaccctgcaccaaaaatttcagagaagggataaatagaagcctgcacagcatcgtgaattaactgaagtgtttaaaaagctgcatttctggctgttcaacatcctccctccttagcccctcctaagtcttaatgctgagatttctaaagatgctggtactgacagattaatggcttgcctagagctgtgcaagaaacagcctgccagtctgtcattgtcagggaccagggcaaaaccaagagctgttcttcccagaagagccctgcaaacacattggttcgtgcttccctttacttcttctggtcagataccatgaatgccagtcatcagtaaatcttaatacacttttgctttattctcacatgccattcaccagattatttgatggtacaaagaagcagaagtgtaattttccttttcccagcatgacgaaaaattggagttctgccatttgagcagcttactg

SEQ ID NO: 34161 - DNA, 5325 bp, Homo sapiens
  source 1..5325: mol_type = unassigned DNA
cggagggggaggtggctgccgcttctcccgcgtccgccattttgttgctgtggctattgggaacaagctgggcaaaagcaccccggaggcgcgacgctccttcgagttcggtgcctcgtgtgacggcgggggtcggtgaagacccgtcgagctgcggcgccggcgcgttccaggccgggagtcactggaggcacccctgggacgccgagcagcccgagaaccccggggtggcctccgctgcggctcgggtttgcctgccccgaccccccggctctgccgtgcattcccgggcggctctctccgtgtggcggccccggagcaggcgggcggcgtcggaggatgctgcgggcccggagccgagaggaaagtgctggcccagccctctgagcgctcctcgaggtgtgcgagaggcccttcctcggccccaaagccgtctgccgggctaaggcgtgcagagcaggcgaggacagccgccgcccctaccgccgcagagtccccggtccaacaccatgtcctccgccaggttcgactcctcggaccgctccgcctggtatatggggccggtgtctcgccaggaggcgcagacccggctccagggccagcgccacggtatgttcctcgtccgcgattcttccacctgccctggggactatgtgctgtcggtgtccgagaactcgcgggtctcccactacatcatcaactcgctgcccaaccgccgttttaagatcggggaccaggaatttgaccatttgccggccctgctggagttttacaagatccactacctggacaccaccaccctcatcgagcctgcgcccaggtatccaagcccaccaatgggatctgtctcagcacccaacctgcctacagcagaagataacctggaatatgtacggactctgtatgattttcctgggaatgatgccgaagacctgccctttaaaaagggtgagatcctagtgataatagagaagcctgaagaacagtggtggagtgcccggaacaaggatggccgggttgggatgattcctgtcccttatgtcgaaaagcttgtgagatcctcaccacacggaaagcatggaaataggaattccaacagttatgggatcccagaacctgctcatgcatacgctcaacctcagaccacaactcctctacctgcagtttccggttctcctggggcagcaatcacccctttgccatccacacagaatggacctgtctttgcgaaagcaatccagaaaagagtaccctgtgcttatgacaagactgccttggcattagaggttggtgacatcgtgaaagtcacaaggatgaatataaatggccagtgggaaggcgaagtgaacgggcgcaaagggcttttcccctttacgcacgtcaaaatctttgaccctcaaaacccagatgaaaacgagtgattgctgttgccctgtttcctgctgctttgttgttctgcctgtcctagtctcctttgaagtgggaaagcattttctctcataggcaagtcacactgcattgccgaagtccagctttctgcagactggcagtcgcacacacatttggaatgcacacagcggctgcctcctgatgtttgtatcatagtcgtattgtcaaagagtagccgattttagagttcttttggatcataaactggaaatactgatggaagcacacaagtggagagaagttgacatggaaagggtcttccttctcattgctgcccgtttgtacatgggactgattctgttgtgttcaccagagaaagcttgaggccatggcgagatactgcatgtttgctgttccacaaagcagtggcttagctgccatcttgcttttctttggacaacaggaagtgaaccttaaggaagagagaattctgttctaaaactccaaaatctggcttttttttttcttttgttttggtttggttttggaaaactaattaattagacttgtgtgggggtttttttttgttttgttttgtttgttttgttttgtttttttgagacggtgtctcgctgcatcacccaggctggagtgcagtggcgcaatctcgccttcctgcagtctccgcctcctgagttcaagcgattctcctgcctcagcctcccaagtagctgggactgcaggcgcgcacaccacgcccagctaatttttgtatttttagtagagacggggtttcatcatgttgaccaggctggtctcaaactcctgacttcaggtgatccacccgccttcagcctcccaacgtgctgggattacagccgtgagccgccgcgcctggcctagacttgtgtgttctaaacaggttaagtagcaggttgggtttttatgatagtgcaaggaatgactcatgcctctgagcttctaaactgaagctgctgtaactaaaggaatctgaaaagaacaaccctgaagcagaggcctttattgtcttggttgccagtagtaccttgttttgccatgtagcagacaacacacaaaataatgcagttgtggtgtgccatgctatgtgcacagccccttggattactttgttttaaaaagcatcagagttgggggtactttagggaaacctttgcttaccttgttttgccagtgataagagcagtgggttggagggcacttggccagttttctgttcagcttttcagtgaatgtacccctttaaggttcagacttaaacttccttaaaaagtggcgttgttcatagaatcgttggactcattaatgaatcgttcaactccactcactgaagcccagacctccgtgcccaggcccaatctcgtcaggctgccagagaaagttggtgctgctcatactggtctcacagtctaagtaagtgtctgtgatgctcccaagcaaaggaaatgcaagctctggaaattcgttaatgtatttgatgtcttagtgttttagtgactagggagaccattaactagtttatcattaaccacttatcagtgtattgatgttaaagcatttccctgttagctaaaagaggcctgttcatacaagccaactggtatatacgtgtggttcatccatcatctgctgcacatagcagactagaattctgggaaccctgtgcaattcagtctgctctcccttgtggaccctggtaaagaaaagcctcagctcatagtgaacacagcagacctagaaatgtagcagcagcctactgagtagctttcatttactgatcatctgctgtgactgtggccctgtctggaggttcctaggttttgagatttagagcaatgcattctggagacagaaccagcagaacagccatttttcaatttttctttaaatcagtattccatcaggcagataactgctgtattcatgaatcttgagagtgttcctgagacagaattaatggtcatttgggaaaactatcgccatggcttcccatctgtggttttcctctaaaagccttggagattagcccttccttgccagtgagaacggtgaccgcctcctgctctgcacggtctgcggcagttgccgcttctggttaggtgtgtcaggttggcttattttgggttcaggcctggcgtagcacccacaagtggcagacatatcacaagagtccccagactctgcctagaaacagtgtttgccctttggccagtgacgtggttcatcccggcccatgttgagccatgagtggagtttccaacagagggaggaatgtgtgccttgttcaaggagggcacgacccttaggcctttttcaaccagatttagctgaagggcttgacacctttgaattacagcagttgactcagagtgcaagaagtctggccattttggaaagcaaggtttcctttcagccctgtctactgaccaataccccgactcaccttgtgtggcgcacttcagaatcagatatacctagagtatacctgtggtttggttttataattaatcagctcgttacttcagcccatgaaaatggcatccagggctgccaggagattcagagctcaaaacaaggcgagcttgagttctgcactccagatatgtgccaaaactagtaaaacttaacggacttacaaccttgtcagtttttttaatgaggcagggatactctgtttttcacactaaacatatgaatgcagcactgctgcctcagctcagcttcgtgcctgggttccccactggtctgggaagactgttgtgctccatagagcagtgcacatctgacccagagggtgggtgttcataactgctacttgctctgctctaccatgtttaaagaaatatttggatgttaaattaactcactatggtttttcacctgggaaggaaacaaattacgtactagagggcattgactggttaaaaacttgtgtatcccgggaaggacctgcggtacaggagtcagccatgtctgtgctgtgtggaaccacctgatgacatggttaacgaggaagacgatgtgttgaccggctgccgtttgaggactttggtcacccagactagacaccttctgtgctcatgtttggaaagctgaaagggaaggacagctgtgccctcctgggagctcatgtgtccctggcgctgtgctagctttcctttacagctgtttacagacaaggcaggcctgaggcagatggccactgctcttgtgatgtttgctcagaggaatatgaacattttatttttgaaaagggatgatgtggttttttgccaggtgtttataattaatcctttaatattatggttattaacctcttaaacatgaatgaattcttgattgttttaacacagtacctaagactaatgctttctgtggacaccactgagctctgcctcaactccaccctctgcgaccggaggactatgcccctagtaactgctgtcggtgtggacgctgtgctggttctgttttctaaaggagcagaaggacaggtctctgagacaggatcgttgtccctacaggaggaacagtggccttgcttcttagacggtcttcactgtgtgttttaaaacaacaacaacaacaacaacaacaacataaaactcttttgacctgtaacttaaagatcataaacttcaggcaataatattttctgtgtaagcttttaaaattatttttggggatcatagcttgttttattttgtgctataaaattaacagtattaaatgacttatattcttagaatacatcgagtgtcttttcttaacagattagtgcctttttatttttgtattccgttttacgttactggtcccagcatcaaaacccttgtttccatggcctgtttgtatattgtctcaataaaacttgcatcagccggtggtggcggcagc

SEQ ID NO: 34162 - DNA, 2037 bp, Homo sapiens
  source 1..2037: mol_type = unassigned DNA
gaggtggctgccgcttctcccgcgtccgccattttgttgctgtggctattgggaacaagctgggcaaaagcaccccggaggcgcgacgctccttcgagttcggtgcctcgtgtgacggcgggggtcggtgaagacccgtcgagctgcggcgccggcgcgttccaggccgggagtcactggaggcacccctgggacgccgagcagcccgagaaccccggggtggcctccgctgcggctcgggtttgcctgccccgaccccccggctctgccgtgcattcccgggcggctctctccgtgtggcggccccggagcaggcgggcggcgtcggaggatgctgcgggcccggagccgagaggaaagtgctggcccagccctctgagcgctcctcgaggtgtgcgagaggcccttcctcggccccaaagccgtctgccgggctaaggcgtgcagagcaggcgaggacagccgccgcccctaccgccgcagagtccccggtccaacaccatgtcctccgccaggttcgactcctcggaccgctccgcctggtatatggggccggtgtctcgccaggaggcgcagacccggctccagggccagcgccacggtatgttcctcgtccgcgattcttccacctgccctggggactatgtgctgtcggtgtccgagaactcgcgggtctcccactacatcatcaactcgctgcccaaccgccgttttaagatcggggaccaggaatttgaccatttgccggccctgctggagttttacaagatccactacctggacaccaccaccctcatcgagcctgcgcccaggtatccaagcccaccaatgggatctgtctcagcacccaacctgcctacagcagaagataacctggaatatgtacggactctgtatgattttcctgggaatgatgccgaagacctgccctttaaaaagggtgagatcctagtgataatagagaagcctgaagaacagtggtggagtgcccggaacaaggatggccgggttgggatgattcctgtcccttatgtcgaaaagcttgtgagatcctcaccacacggaaagcatggaaataggaattccaacagttatgggatcccagaacctgctcatgcatacgctcaacctcagaccacaactcctctacctgcagtttccggttctcctggggcagcaatcacccctttgccatccacacagaatggacctgtctttgcgaaagcaatccagaaaagagtaccctgtgcttatgacaagactgccttggcattagaggttggtgacatcgtgaaagtcacaaggatgaatataaatggccagtgggaaggcgaagtgaacgggcgcaaagggcttttcccctttacgcacgtcaaaatctttgaccctcaaaacccagatgaaaacgagtgattgctgttgccctgtttcctgctgctttgttgttctgcctgtcctagtctcctttgaagtgggaaagcattttctctcatagtacctaagactaatgctttctgtggacaccactgagctctgcctcaactccaccctctgcgaccggaggactatgcccctagtaactgctgtcggtgtggacgctgtgctggttctgttttctaaaggagcagaaggacaggtctctgagacaggatcgttgtccctacaggaggaacagtggccttgcttcttagacggtcttcactgtgtgttttaaaacaacaacaacaacaacaacaacaacataaaactcttttgacctgtaacttaaagatcataaacttcaggcaataatattttctgtgtaagcttttaaaattatttttggggatcatagcttgttttattttgtgctataaaattaacagtattaaatgacttatattcttagaatacatcgagtgtcttttcttaacagattagtgcctttttatttttgtattccgttttacgttactggtcccagcatcaaaacccttgtttccatggcctgtttgtatattgtctcaataaaacttgcatcagccggtggtggcggca

SEQ ID NO: 34163 - DNA, 1147 bp, Homo sapiens
  source 1..1147: mol_type = unassigned DNA
ccgccgtagaggggttggcagtggcggtcagcatgggcgatgggggcgccgagcgcgaccggggccccgcgcgccgggcggagtctggtggcggcggtgggcgctgcggagaccgcagcggagcgggggacttgcgagctgatggcggtggccacagcccaacggaggtggccgggacctcagcctccagtcccgcaggctccagggagagtggagccgacagcgacgggcagcccgggcccggcgaggcagaccactgccgccgcatactggtgcgagatgccaaagggacaattcgggaaattgtcctgcctaagggcctggacctggaccggcccaagcggacacgtacatccttcactgccgagcagctgtaccgcctggagatggagttccagcgctgccagtatgtggtgggccgcgagcgcactgagctggcccgccagctgaacctctccgagacccaggtgaaggtctggttccagaaccgccgcaccaagcagaagaaagaccagagcagagacctggagaagcgggcgtcctcctcagcctccgaggcctttgccacctccaacattctgcggctgctggagcagggccggctgctctctgtgcccagggcccctagcctcctggcgctgacccctagcctgccaggcctacctgccagccacaggggcacctccttaggtgaccccaggaactcctccccacgcctcaacccgctgtcctcggcctcagcgtcccccccactgccgccccctctgccagctgtctgcttttcctcggccccgctcctggatctgcctgccggctacgaactgggttcctcggccttcgagccatacagctggctagaacggaaagtgggcagcgccagcagctgcaagaaagctaacacttaagactcccaccctgtgacactgagtcccgagcacagcaccttcccagtctcctgtgccccagcggacagcactgagcaggccccggagaggaggggctgcagccacacactcttccccacctgccccccagctcagagactcgtgaccaaatggccttggtcccgcagcttgtgtgcgtgagtgcagtgtgagtgtgtgtgtctctcactgaaataaaaggaaaacaatgacaagaagggaaa

SEQ ID NO: 34164 - DNA, 4202 bp, Homo sapiens
  source 1..4202: mol_type = unassigned DNA
ggcagctcagggagacgcggctgcagcccacaggactgggcagcagctgcaaggctgcctctgagcatggtcatgggtcccagctgcagtgctctaaagatcaaggattttgccttctattttctatgaccagagattcctgtgcaaagagagagtgtcaatgaagacctcaaagtctggagaaaaatgacctttcatggaataagaagtatacctccttctacatgtttttgtcttactgacctctgataactggaacacatgactctgggtctgtagaaagtcaactgatcaaactcatcctcaccatgcatcaactgttcagactggttttgggacaaaaagatctttcacgagctggggacctcttctccttagatgactctgagattgaagacagccttacagaagctttggagcaaattaagataattagctcatcttcagattaccaaaccaataacaatgaccaggcagtagttgaaatctgtatcacaagaatcacaacagccatcagagagaccgagtccattgaaaagcatgcaaaggcccttgtggggctctgggactcctgcttggaacataacctgagaccctttgggaaagacgaagacactcctcatgcaaaaatcgcatctgatatcatgagttgcattttacagaattacaaccgacccccagtgatggcattagccatccccattgcagtgaaattcctccacagaggcaacaaggaactgtgcaggaatatgtctaactacctgtctctggctgcaattaccaaggcagatctcctggctgatcacacggaagttatagtaaagagcatactccaaggtaacaccatgttgttgagagtgttacctgctgtgtatgaaaagcagcctcagccaattaatagacacctgacagaactcctggccttgatgtctcagctggaacagccagaacagtaccatctactacggcttttgcatgtagcagcaaagaaaaaacaactcgaggtagttcagaagtgtattcctttcctaattgggcatttgaaggattcaacccataatgacatcatcctaaacatcctcatagagatagcagtctatgagccagtggctttgaacagttttcttccaatgctgaaagagattggtgagagattcccctacctcactggacagatggcaaggatttatggagctgttgggcatgtggatgaagagagagccaggagctgcctgacatacctggtgagccaactggccaacatggagcattcgtttcaccatattctcctgctggagattaaaagcatcaccgacaccttctcctcaatcttgggccctcagagcagagacatcttccgcatgagcaacagcttcaccgccattgctaaactccttacccgacaactggaaaataccaaggctggaagtggcaggagaaaaatcagcactgaaattgaattccctgagaaactggaagaaaccaagctcatagtaactgaaaatgaagaccatgaaaaactccaagttaaaatccaggcttttgaagacaagataaatgcagggagcaatacccctggctctatcagaagatatagtctgggccaagtttctaaagaagaaagaaaaaacattagatttaacaggtcaaaaagtttggctttccacactatgctcacaaagggtgtgggttcagatgacggcgaagatgaaaacaggggagacataccagccagcatctctctttcagaaatagacccacttggccaaggaaatgacaagctgccgtttaagacagacactgagagatcacagctgggggagtcttcagtttcatacccaaatattatacatatagactcagagaatttgtcagaaactgttaaagaaaactcccaggaagaaactccagagacaactgcaagtcctatagaataccaagataagctctacttgcacttaaaaaaaaacctcagcaaagtgaaagcatatgccatggaaattggaaagaagattccagtccctgatcagtgtaccattgaagacactgtgagaagttgtgtagcaaagttgttcttcacctgctccctgaagggtcattactgcctatacagtaagtccagttttattctcatcagccaagaacctcagccatggatccagatcatgtttctatttcagcagagcctgtttcctgaacccctgtccattcagagtcattctgtgcaattcctcagagctctgtgggagaagacccaggcagggggtgctcacagctttgaaactgccatgatggagtccacgtttccacagcagaaggatctggaccaggtacagctccatctggaagaagtgaggttctttgacgtgtttggcttcagtgaaacagcaggagcatggcaatgcttcatgtgcaacaatcctgagaaagcaactgttgtaaatcaagatggccagcctctcatagaaggaaaacttaaagagaagcaagtcagatggaagttcatcaaaaggtggaaaacacgctattttacactggctggaaatcaacttctgtttcaaaaaggaaagtctaaagatgaccctgacgactgcccaatagaactcagcaaagtacagagtgtgaaggctgtggccaagaaacgcagggaccgctctctcccccgggctttcgaaatcttcacagacaataaaacctatgtctttaaggccaaggatgagaagaatgcagaagaatggctccagtgcatcaacgtggcagttgcccaagccaaagaaagggaaagtagagaagtaaccacatatctgtagggatttataagtcagccatgacaattatacaccacaggcattgtattatcattgccaatgtcaagaaaaagagctaaatttaccaagccatgttgttttttactaaataccaatggaattgttgtcctttaagaagaagggcctaaaatggcaggattcttagtaaatgtcatactctaacagctttagtattgacttcagaatatatctgatgcccacaaaaataaaataaaataaaaggagctacagagtatgccctcagatagtgtggggccaggaagggaaaagtcactgataaaagaacttctgtagatatgtcatttaaaactgtgagaaaacaacatgaaaagatgcctgaactctccatcctgaggaaagattagcacttctgatgaaaatcacagtctgtcaaaggtattaaaagaaaactttaaaaaaaaaaacctttagaaacgttgaactaatgtacactgagaaaaaccatataacttacttatagacatataattacatgatcctctcttactacaactgaggctaacacatggtaaaatggttcccaaatcaagccagttatgtcattaaatacttgtctttcagaattacttatttaattattccatttaagttcatataatataatctacagtttagatacttggacatatatcctgcccaaggcactaagtgtaatataggaaaaggatagaaagccattttctctatcttcaaaataatgtgccatctccgttaaaattaagactttaaagttctataattttttctttgtattcaactttttaatacctccaaattacaaacatctatttttttcactacatagatatataattacactatgatagacagaattctagagtgattctcaataatccatgccttggtataatcctctcccccattgagtgtgggtgggacatgtaacctgcttctaaccaacagaatatggcaaaagtgatgggatcatctctcccatattatgttatgttatataacaaaagtgaagagaagttgcagatatacataaggtttctaatcagctgactttgagttaatcaaagagatcccctgggtgggcctgacctaatcagactagtcctttaaaagagagtgaaccagtcagagactctctctcctattagccttaaataagcaagctgccatgagctctacggctgcaaggaaataagttttgtgaacaaccatgtgatcttggaagaagcatctgaacctcagataaaagcccagccccagccaacgccttgcttgcagctttgtgaaactctgagcagaggacccagctaaatcacgtttggactcctgacccacagaaactttcagataataaatgtatgctgttttaaatctaaa

SEQ ID NO: 34165 - DNA, 3044 bp, Homo sapiens
  source 1..3044: mol_type = unassigned DNA
attcttccacccggcaccggctccgcaatgaacaacttcaggttcactgagctgagcggattccactcgctgtgccctcggagcctgcctgaatctcccgcccagtctcaaaccatgcagctgagtaactgcaagggcgcctttgaggagtagcacgcagagagtgtcaatgaagacctcaaagtctggagaaaaatgacctttcatggaataagaagtatacctccttctacatgtttttgtcttactgacctctgataactggaacacatgactctgggtctgtagaaagtcaactgatcaaactcatcctcaccatgcatcaactgttcagactggttttgggacaaaaagatctttcacgagctggggacctcttctccttagatgactctgagattgaagacagccttacagaagctttggagcaaattaagataattagctcatcttcagattaccaaaccaataacaatgaccaggcagtagttgaaatctgtatcacaagaatcacaacagccatcagagagaccgagtccattgaaaagcatgcaaaggcccttgtggggctctgggactcctgcttggaacataacctgagaccctttgggaaagacgaagacactcctcatgcaaaaatcgcatctgatatcatgagttgcattttacagaattacaaccgacccccagtgatggcattagccatccccattgcagtgaaattcctccacagaggcaacaaggaactgtgcaggaatatgtctaactacctgtctctggctgcaattaccaaggcagatctcctggctgatcacacggaagttatagtaaagagcatactccaaggtaacaccatgttgttgagagtgttacctgctgtgtatgaaaagcagcctcagccaattaatagacacctgacagaactcctggccttgatgtctcagctggaacagccagaacagtaccatctactacggcttttgcatgtagcagcaaagaaaaaacaactcgaggtagttcagaagtgtattcctttcctaattgggcatttgaaggattcaacccataatgacatcatcctaaacatcctcatagagatagcagtctatgagccagtggctttgaacagttttcttccaatgctgaaagagattggtgagagattcccctacctcactggacagatggcaaggatttatggagctgttgggcatgtggatgaagagagagccaggagctgcctgacatacctggtgagccaactggccaacatggagcattcgtttcaccatattctcctgctggagattaaaagcatcaccgacaccttctcctcaatcttgggccctcagagcagagacatcttccgcatgagcaacagcttcaccgccattgctaaactccttacccgacaactggaaaataccaaggctggaagtggcaggagaaaaatcagcactgaaattgaattccctgagaaactggaagaaaccaagctcatagtaactgaaaatgaagaccatgaaaaactccaagttaaaatccaggcttttgaagacaagataaatgcagggagcaatacccctggctctatcagaagatatagtctgggccaagtttctaaagaagaaagaaaaaacattagatttaacaggtcaaaaagtttggctttccacactatgctcacaaagggtgtgggttcagatgacggcgaagatgaaaacaggggagacataccagccagcatctctctttcagaaatagacccacttggccaaggaaatgacaagctgccgtttaagacagacactgagagatcacagctgggggagtcttcagtttcatacccaaatattatacatatagactcagagaatttgtcagaaactgttaaagaaaactcccaggaagaaactccagagacaactgcaagtcctatagaataccaagataagctctacttgcacttaaaaaaaaacctcagcaaagtgaaagcatatgccatggaaattggaaagaagattccagtccctgatcagtgtaccattgaagacactgtgagaagttgtgtagcaaagttgttcttcacctgctccctgaagggtcattactgcctatacagtaagtccagttttattctcatcagccaagaacctcagccatggatccagatcatgtttctatttcagcagagcctgtttcctgaacccctgtccattcagagtcattctgtgcaattcctcagagctctgtgggagaagacccaggcagggggtgctcacagctttgaaactgccatgatggagtccacgtttccacagcagaaggatctggaccaggtacagctccatctggaagaagtgaggttctttgacgtgtttggcttcagtgaaacagcaggagcatggcaatgcttcatgtgcaacaatcctgagaaagcaactgttgtaaatcaagatggccagcctctcatagaaggaaaacttaaagagaagcaagtcagatggaagttcatcaaaaggtggaaaacacgctattttacactggctggaaatcaacttctgtttcaaaaaggaaagtctaaagatgaccctgacgactgcccaatagaactcagcaaagtacagagtgtgaaggctgtggccaagaaacgcagggaccgctctctcccccgggctttcgaaatcttcacagacaataaaacctatgtctttaaggccaaggatgagaagaatgcagaagaatggctccagtgcatcaacgtggcagttgcccaagccaaagaaagggaaagtagagaagtaaccacatatctgtagggatttataagtcagccatgacaattatacaccacaggcattgtattatcattgccaatgtcaagaaaaagagctaaatttaccaagccatgttgttttttactaaataccaatggaattgttgtcctttaagaagaagggcctaaaatggcaggattcttagtaaatgtcatactctaacagctttagtattgacttcagaatatatctgatgcccacaaaaat

SEQ ID NO: 34166 - DNA, 3979 bp, Homo sapiens
  source 1..3979: mol_type = unassigned DNA
gtgctctaaagatcaaggattttgccttctattttctatgaccagagattcctgtgcaaagagagagtgtcaatgaagacctcaaagtctggagaaaaatgacctttcatggaataagaagtatacctccttctacatgtttttgtcttactgacctctgataactggaacacatgactctgggtctgtagaaagtcaactgatcaaactcatcctcaccatgcatcaactgttcagactggttttgggacaaaaagatctttcacgagctggggacctcttctccttagatgactctgagattgaagacagccttacagaagctttggagcaaattaagataattagctcatcttcagattaccaaaccaataacaatgaccaggcagtagttgaaatctgtatcacaagaatcacaacagccatcagagagaccgagtccattgaaaagcatgcaaaggcccttgtggggctctgggactcctgcttggaacataacctgagaccctttgggaaagacgaagacactcctcatgcaaaaatcgcatctgatatcatgagttgcattttacagaattacaaccgacccccagtgatggcattagccatccccattgcagtgaaattcctccacagaggcaacaaggaactgtgcaggaatatgtctaactacctgtctctggctgcaattaccaaggcagatctcctggctgatcacacggaagttatagtaaagagcatactccaaggtaacaccatgttgttgagagtgttacctgctgtgtatgaaaagcagcctcagccaattaatagacacctgacagaactcctggccttgatgtctcagctggaacagccagaacagtaccatctactacggcttttgcatgtagcagcaaagaaaaaacaactcgaggtagttcagaagtgtattcctttcctaattgggcatttgaaggattcaacccataatgacatcatcctaaacatcctcatagagatagcagtctatgagccagtggctttgaacagttttcttccaatgctgaaagagattggtgagagattcccctacctcactggacagatggcaaggatttatggagctgttgggcatgtggatgaagagagagccaggagctgcctgacatacctggtgagccaactggccaacatggagcattcgtttcaccatattctcctgctggagattaaaagcatcaccgacaccttctcctcaatcttgggccctcagagcagagacatcttccgcatgagcaacagcttcaccgccattgctaaactccttacccgacaactggaaaataccaaggctggaagtggcaggagaaaaatcagcactgaaattgaattccctgagaaactggaagaaaccaagctcatagtaactgaaaatgaagaccatgaaaaactccaagttaaaatccaggcttttgaagacaagataaatgcagggagcaatacccctggctctatcagaagatatagtctgggccaagtttctaaagaagaaagaaaaaacattagatttaacaggtcaaaaagtttggctttccacactatgctcacaaagggtgtgggttcagatgacggcgaagatgaaaacaggggagacataccagccagcatctctctttcagaaatagacccacttggccaaggaaatgacaagctgccgtttaagacagacactgagagatcacagctgggggagtcttcagtttcatacccaaatattatacatatagactcagagaatttgtcagaaactgttaaagaaaactcccaggaagaaactccagagacaactgcaagtcctatagaataccaagataagctctacttgcacttaaaaaaaaacctcagcaaagtgaaagcatatgccatggaaattggaaagaagattccagtccctgatcagtgtaccattgaagacactgtgagaagttgtgtagcaaagttgttcttcacctgctccctgaagggtcattactgcctatacagtaagtccagttttattctcatcagccaagaacctcagccatggatccagatcatgtttctatttcagcaggatctggaccaggtacagctccatctggaagaagtgaggttctttgacgtgtttggcttcagtgaaacagcaggagcatggcaatgcttcatgtgcaacaatcctgagaaagcaactgttgtaaatcaagatggccagcctctcatagaaggaaaacttaaagagaagcaagtcagatggaagttcatcaaaaggtggaaaacacgctattttacactggctggaaatcaacttctgtttcaaaaaggaaagtctaaagatgaccctgacgactgcccaatagaactcagcaaagtacagagtgtgaaggctgtggccaagaaacgcagggaccgctctctcccccgggctttcgaaatcttcacagacaataaaacctatgtctttaaggccaaggatgagaagaatgcagaagaatggctccagtgcatcaacgtggcagttgcccaagccaaagaaagggaaagtagagaagtaaccacatatctgtagggatttataagtcagccatgacaattatacaccacaggcattgtattatcattgccaatgtcaagaaaaagagctaaatttaccaagccatgttgttttttactaaataccaatggaattgttgtcctttaagaagaagggcctaaaatggcaggattcttagtaaatgtcatactctaacagctttagtattgacttcagaatatatctgatgcccacaaaaataaaataaaataaaaggagctacagagtatgccctcagatagtgtggggccaggaagggaaaagtcactgataaaagaacttctgtagatatgtcatttaaaactgtgagaaaacaacatgaaaagatgcctgaactctccatcctgaggaaagattagcacttctgatgaaaatcacagtctgtcaaaggtattaaaagaaaactttaaaaaaaaaaacctttagaaacgttgaactaatgtacactgagaaaaaccatataacttacttatagacatataattacatgatcctctcttactacaactgaggctaacacatggtaaaatggttcccaaatcaagccagttatgtcattaaatacttgtctttcagaattacttatttaattattccatttaagttcatataatataatctacagtttagatacttggacatatatcctgcccaaggcactaagtgtaatataggaaaaggatagaaagccattttctctatcttcaaaataatgtgccatctccgttaaaattaagactttaaagttctataattttttctttgtattcaactttttaatacctccaaattacaaacatctatttttttcactacatagatatataattacactatgatagacagaattctagagtgattctcaataatccatgccttggtataatcctctcccccattgagtgtgggtgggacatgtaacctgcttctaaccaacagaatatggcaaaagtgatgggatcatctctcccatattatgttatgttatataacaaaagtgaagagaagttgcagatatacataaggtttctaatcagctgactttgagttaatcaaagagatcccctgggtgggcctgacctaatcagactagtcctttaaaagagagtgaaccagtcagagactctctctcctattagccttaaataagcaagctgccatgagctctacggctgcaaggaaataagttttgtgaacaaccatgtgatcttggaagaagcatctgaacctcagataaaagcccagccccagccaacgccttgcttgcagctttgtgaaactctgagcagaggacccagctaaatcacgtttggactcctgacccacagaaactttcagataataaatgtatgctgttttaaatctaaa

SEQ ID NO: 34167 - DNA, 730 bp, Homo sapiens
  source 1..730: mol_type = unassigned DNA
tggatgcaattgtttaggagaagagtgaaggagaagagaagagagcccgaaactaaacagggaggaatccaccatttagaagtctggcaggcaaagaggacaaggctttgtgtttcacctcaggaaacagagcgttgcactgggaggtaactccgctgggtgaggtgcagcctgtcacctgaccggtctctggggctgccggtggcatcaggctgcattccttgaattcttccacccggcaccggctccgcaatgaacaacttcaggttcactgagctgagcggattccactcgctgtgccctcggagcctgcctgaatctcccgcccagtctcaaaccatgcagctgagtaactgcaagggcgcctttgaggagtagcacgcagagagtgtcaatgaagacctcaaagtctggagaaaaatgacctttcatggaataagaagtatacctccttctacatgtttttgtcttactgacctctgataactggaacacatgactctgggtctgtagaaagtcaactgatcaaactcatcctcaccatgcatcaactgttcagactggttttgggacaaaaagatctttcacgagctggggacctcttctccttagatgactctgagattgaagacagccttacagaagctttggagcaaattaagataattagctcatcttcagattaccaaaccaataacaatgaccaggcagtagttgaaatctgtatcac

SEQ ID NO: 34168 - DNA, 1401 bp, Homo sapiens
  source 1..1401: mol_type = unassigned DNA
ggttgttaggcaaatctaattctttcaaactacagatctgctcagagaaatctgtaaatctagtgtagaaataagtgaagctttgcgtcaattgttaggtctaagcagaagtttgggagagagaagaaaagttactcatttgcctgattccgcacgagagtgtcaatgaagacctcaaagtctggagaaaaatgacctttcatggaataagaagtatacctccttctacatgtttttgtcttactgacctctgataactggaacacatgactctgggtctgtagaaagtcaactgatcaaactcatcctcaccatgcatcaactgttcagactggttttgggacaaaaagatctttcacgagctggggacctcttctccttagatgactctgagattgaagacagccttacagaagctttggagcaaattaagataattagctcatcttcagattaccaaaccaataacaatgaccaggcagtagttgaaatctgtatcacaagaatcacaacagccatcagagagaccgagtccattgaaaagcatgcaaaggcccttgtggggctctgggactcctgcttggaacataacctgagaccctttgggaaagacgaagacactcctcatgcaaaaatcgcatctgatatcatgagttgcattttacagaattacaaccgacccccagtgatggcattagccatccccattgcagtgaaattcctccacagaggcaacaaggaactgtgcaggaatatgtctaactacctgtctctggctgcaattaccaaggcagatctcctggctgatcacacggaagttatagtaaagagcatactccaaggtatggtgcgaaagttgagcttggggacatgttttgggagatatttaaaagtattttcatcaagcatttatggtttgtgggaagcaagacctagagtattagaagcaaattaatttctctgttttgctgccagttgacctgtgaacatgcaaaaggttacttaatctggctgtctgtgtcccttcccaaggcagatgaattacttagactcattaaaagaattgtaagcattcttccaaatctgtgtttctcagtttgaagaactgcatttccgtgcttctggtcacctgttcaactaccaactgtggagatcttatctctgtgtactgagtggaacacgtcactcagtggggtatgaaaaacctgtcttcatttgcttccaaaagcaagaaatgtcttttgttagataaaatacatcagaaaatgtgtaatgacttcttaaatgtgaacatgatttggataacaagcataaatactagcataaaaagccaaatagtacacctctgttaattgttacaacatttgaatgaataagaagctcaaattagttcatgcaaaa

SEQ ID NO: 34169 - DNA, 746 bp, Homo sapiens
  source 1..746: mol_type = unassigned DNA
tgtttaggagaagagtgaaggagaagagaagagagcccgaaactaaacagggaggaatccaccatttagaagtctggcaggcaaagaggacaagagagtgtcaatgaagacctcaaagtctggagaaaaatgacctttcatggaataagaagtatacctccttctacatgtttttgtcttactgacctctgataactggaacacatgactctgggtctgtagaaagtcaactgatcaaactcatcctcaccatgcatcaactgttcagactggttttgggacaaaaagatctttcacgagctggggacctcttctccttagatgactctgagattgaagacagccttacagaagctttggagcaaattaagataattagctcatcttcagattaccaaaccaataacaatgaccaggcagtagttgaaatctgtatcacaagaatcacaacagccatcagagagaccgagtccattgaaaagcatgcaaaggcccttgtggggctctgggactcctgcttggaacataacctgagaccctttgggaaagacgaagacactcctcatgcaaaaatcgcatctgatatcatgagttgcattttacagaattacaaccgacccccagtgatggcattagccatccccattgcagtgaaattcctccacagaggcaacaaggaactgtgcaggaatatgtctaactacctgtctctggctgcaattaccaaggcagatctcctggctgat

SEQ ID NO: 34170 - DNA, 557 bp, Homo sapiens
  source 1..557: mol_type = unassigned DNA
gatgcaattgtttaggagaagagtgaaggagaagagaagagagcccgaaactaaacagggaggaatccaccatttagaagtctggcaggcaaagaggacaaggtgtaatatctggttgctgttgccattctgccaccaagaaacctgatgacttcatttgggcctcttcaaccagctgcccctaaagctagcaagctccacccttcagtgtccactgataaattccttaatagcagagtgtcaatgaagacctcaaagtctggagaaaaatgacctttcatggaataagaagtatacctccttctacatgtttttgtcttactgacctctgataactggaacacatgactctgggtctgtagaaagtcaactgatcaaactcatcctcaccatgcatcaactgttcagactggttttgggacaaaaagatctttcacgagctggggacctcttctccttagatgactctgagattgaagacagccttacagaagctttggagcaaattaagataattagctcatcttcagattaccaaaccaataacaatgaccagg

SEQ ID NO: 34171 - DNA, 1714 bp, Homo sapiens
  source 1..1714: mol_type = unassigned DNA
tgtaaatctagtgtagaaataagtgaagctttgcgtcaattgttaggtctaagcagaagtttgggagagagaagaaaagttactcatttgcctgattccgcacggaaacagagcgttgcactgggaggtaactccgctgggtgaggtgcagcctgtcacctgaccggtctctggggctgccggtggcatcaggctgcattccttgaattcttccacccggcaccggctccgcaatgaacaacttcaggttcactgagctgagcggattccactcgctgtgccctcggagcctgcctgaatctcccgcccagtctcaaaccatgcagctgagtaactgcaagggcgcctttgaggagtagcacgcagagagtgtcaatgaagacctcaaagtctggagaaaaatgacctttcatggaataagaagtatacctccttctacatgtttttgtcttactgacctctgataactggaacacatgactctgggtctgtagaaagtcaactgatcaaactcatcctcaccatgcatcaactgttcagactggttttgggacaaaaagatctttcacgagctggggacctcttctccttagatgactctgagattgaagacagccttacagaagctttggagcaaattaagataattagctcatcttcagattaccaaaccaataacaatgaccaggcagtagttgaaatctgtatcacaagaatcacaacagccatcagagagaccgagtccattgaaaagcatgcaaaggcccttgtggggctctgggactcctgcttggaacataacctgagaccctttgggaaagacgaagacactcctcatgcaaaaatcgcatctgatatcatgagttgcattttacagaattacaaccgacccccagtgatggcattagccatccccattgcagtgaaattcctccacagaggcaacaaggaactgtgcaggaatatgtctaactacctgtctctggctgcaattaccaaggcagatctcctggctgatcacacggaagttatagtaaagagcatactccaaggtatggtgcgaaagttgagcttggggacatgttttgggagatatttaaaagtattttcatcaagcatttatggtttgtgggaagcaagacctagagtattagaagcaaattaatttctctgttttgctgccagttgacctgtgaacatgcaaaaggttacttaatctggctgtctgtgtcccttcccaaggcagatgaattacttagactcattaaaagaattgtaagcattcttccaaatctgtgtttctcagtttgaagaactgcatttccgtgcttctggtcacctgttcaactaccaactgtggagatcttatctctgtgtactgagtggaacacgtcactcagtggggtatgaaaaacctgtcttcatttgcttccaaaagcaagaaatgtcttttgttagataaaatacatcagaaaatgtgtaatgacttcttaaatgtgaacatgatttggataacaagcataaatactagcataaaaagccaaatagtacacctctgttaattgttacaacatttgaatgaataagaagctcaaattagttcatgcaaaatattctccttgtcttcttttattttctttggtttcagatcaatcaaaaaacatgtttttgaacttgaagtcagagaacaatacatgatattaattgatgtgca

SEQ ID NO: 34172 - DNA, 992 bp, Homo sapiens
  source 1..992: mol_type = unassigned DNA
agagtgtcaatgaagacctcaaagtctggagaaaaatgacctttcatggaataagaagtatacctccttctacatgtttttgtcttactgacctctgataactggaacacatgactctgggtctgtagaaagtcaactgatcaaactcatcctcaccatgcatcaactgttcagactggttttgggacaaaaagatctttcacgagctggggacctcttctccttagatgactctgagattgaagacagccttacagaagctttggagcaaattaagataattagctcatcttcagattaccaaaccaataacaatgaccaggcagtagttgaaatctgtatcacaagaatcacaacagccatcagagagaccgagtccattgaaaagcatgcaaaggcccttgtggggctctgggactcctgcttggaacataacctgagaccctttgggaaagacgaagacactcctcatgcaaaaatcgcatctgatatcatgagttgcattttacagaattacaaccgacccccagtgatggcattagccatccccattgcagtgaaattcctccacagaggcaacaaggaactgtgcaggaatatgtctaactacctgtctctggctgcaattaccaaggcagatctcctggctgatcacacggaagttatagtaaagagcatactccaagtttgaagaactgcatttccgtgcttctggtcacctgttcaactaccaactgtggagatcttatctctgtgtactgagtggaacacgtcactcagtggggtatgaaaaacctgtcttcatttgcttccaaaagcaagaaatgtcttttgttagataaaatacatcagaaaatgtgtaatgacttcttaaatgtgaacatgatttggataacaagcataaatactagcataaaaagccaaatagtacacctctgttaattgttacaacatttgaatgaataagaagctcaaattagttcatgcaaaat

SEQ ID NO: 34173 - DNA, 4178 bp, Homo sapiens
  source 1..4178: mol_type = unassigned DNA
gaaacagagcgttgcactgggaggtaactccgctgggtgaggtgcagcctgtcacctgaccggtctctggggctgccggtggcatcaggctgcattccttgaattcttccacccggcaccggctccgcaatgaacaacttcaggttcactgagctgagcggattccactcgctgtgccctcggagcctgcctgaatctcccgcccagtctcaaaccatgcagctgagtaactgcaagggcgcctttgaggagtagcacgcagagagtgtcaatgaagacctcaaagtctggagaaaaatgacctttcatggaataagaagtatacctccttctacatgtttttgtcttactgacctctgataactggaacacatgactctgggtctgtagaaagtcaactgatcaaactcatcctcaccatgcatcaactgttcagactggttttgggacaaaaagatctttcacgagctggggacctcttctccttagatgactctgagattgaagacagccttacagaagctttggagcaaattaagataattagctcatcttcagattaccaaaccaataacaatgaccaggcagtagttgaaatctgtatcacaagaatcacaacagccatcagagagaccgagtccattgaaaagcatgcaaaggcccttgtggggctctgggactcctgcttggaacataacctgagaccctttgggaaagacgaagacactcctcatgcaaaaatcgcatctgatatcatgagttgcattttacagaattacaaccgacccccagtgatggcattagccatccccattgcagtgaaattcctccacagaggcaacaaggaactgtgcaggaatatgtctaactacctgtctctggctgcaattaccaaggcagatctcctggctgatcacacggaagttatagtaaagagcatactccaaggtaacaccatgttgttgagagtgttacctgctgtgtatgaaaagcagcctcagccaattaatagacacctgacagaactcctggccttgatgtctcagctggaacagccagaacagtaccatctactacggcttttgcatgtagcagcaaagaaaaaacaactcgaggtagttcagaagtgtattcctttcctaattgggcatttgaaggattcaacccataatgacatcatcctaaacatcctcatagagatagcagtctatgagccagtggctttgaacagttttcttccaatgctgaaagagattggtgagagattcccctacctcactggacagatggcaaggatttatggagctgttgggcatgtggatgaagagagagccaggagctgcctgacatacctggtgagccaactggccaacatggagcattcgtttcaccatattctcctgctggagattaaaagcatcaccgacaccttctcctcaatcttgggccctcagagcagagacatcttccgcatgagcaacagcttcaccgccattgctaaactccttacccgacaactggaaaataccaaggctggaagtggcaggagaaaaatcagcactgaaattgaattccctgagaaactggaagaaaccaagctcatagtaactgaaaatgaagaccatgaaaaactccaagttaaaatccaggcttttgaagacaagataaatgcagggagcaatacccctggctctatcagaagatatagtctgggccaagtttctaaagaagaaagaaaaaacattagatttaacaggtcaaaaagtttggctttccacactatgctcacaaagggtgtgggttcagatgacggcgaagatgaaaacaggggagacataccagccagcatctctctttcagaaatagacccacttggccaaggaaatgacaagctgccgtttaagacagacactgagagatcacagctgggggagtcttcagtttcatacccaaatattatacatatagactcagagaatttgtcagaaactgttaaagaaaactcccaggaagaaactccagagacaactgcaagtcctatagaataccaagataagctctacttgcacttaaaaaaaaacctcagcaaagtgaaagcatatgccatggaaattggaaagaagattccagtccctgatcagtgtaccattgaagacactgtgagaagttgtgtagcaaagttgttcttcacctgctccctgaagggtcattactgcctatacagtaagtccagttttattctcatcagccaagaacctcagccatggatccagatcatgtttctatttcagcaggatctggaccaggtacagctccatctggaagaagtgaggttctttgacgtgtttggcttcagtgaaacagcaggagcatggcaatgcttcatgtgcaacaatcctgagaaagcaactgttgtaaatcaagatggccagcctctcatagaaggaaaacttaaagagaagcaagtcagatggaagttcatcaaaaggtggaaaacacgctattttacactggctggaaatcaacttctgtttcaaaaaggaaagtctaaagatgaccctgacgactgcccaatagaactcagcaaagtacagagtgtgaaggctgtggccaagaaacgcagggaccgctctctcccccgggctttcgaaatcttcacagacaataaaacctatgtctttaaggccaaggatgagaagaatgcagaagaatggctccagtgcatcaacgtggcagttgcccaagccaaagaaagggaaagtagagaagtaaccacatatctgtagggatttataagtcagccatgacaattatacaccacaggcattgtattatcattgccaatgtcaagaaaaagagctaaatttaccaagccatgttgttttttactaaataccaatggaattgttgtcctttaagaagaagggcctaaaatggcaggattcttagtaaatgtcatactctaacagctttagtattgacttcagaatatatctgatgcccacaaaaataaaataaaataaaaggagctacagagtatgccctcagatagtgtggggccaggaagggaaaagtcactgataaaagaacttctgtagatatgtcatttaaaactgtgagaaaacaacatgaaaagatgcctgaactctccatcctgaggaaagattagcacttctgatgaaaatcacagtctgtcaaaggtattaaaagaaaactttaaaaaaaaaaacctttagaaacgttgaactaatgtacactgagaaaaaccatataacttacttatagacatataattacatgatcctctcttactacaactgaggctaacacatggtaaaatggttcccaaatcaagccagttatgtcattaaatacttgtctttcagaattacttatttaattattccatttaagttcatataatataatctacagtttagatacttggacatatatcctgcccaaggcactaagtgtaatataggaaaaggatagaaagccattttctctatcttcaaaataatgtgccatctccgttaaaattaagactttaaagttctataattttttctttgtattcaactttttaatacctccaaattacaaacatctatttttttcactacatagatatataattacactatgatagacagaattctagagtgattctcaataatccatgccttggtataatcctctcccccattgagtgtgggtgggacatgtaacctgcttctaaccaacagaatatggcaaaagtgatgggatcatctctcccatattatgttatgttatataacaaaagtgaagagaagttgcagatatacataaggtttctaatcagctgactttgagttaatcaaagagatcccctgggtgggcctgacctaatcagactagtcctttaaaagagagtgaaccagtcagagactctctctcctattagccttaaataagcaagctgccatgagctctacggctgcaaggaaataagttttgtgaacaaccatgtgatcttggaagaagcatctgaacctcagataaaagcccagccccagccaacgccttgcttgcagctttgtgaaactctgagcagaggacccagctaaatcacgtttggactcctgacccacagaaactttcagataataaatgtatgctgttttaaatctaaa

SEQ ID NO: 34174 - DNA, 4624 bp, Homo sapiens
  source 1..4624: mol_type = unassigned DNA
ggaggaggtggaggaggagggctgcttgaggaagtataagaatgaagttgtgaagctgagattcccctccattgggaccggagaaaccaggggagccccccgggcagccgcgcgccccttcccacggggccctttactgcgccgcgcgcccggcccccacccctcgcagcaccccgcgccccgcgccctcccagccgggtccagccggagccatggggccggagccgcagtgagcaccatggagctggcggccttgtgccgctgggggctcctcctcgccctcttgccccccggagccgcgagcacccaagtgtgcaccggcacagacatgaagctgcggctccctgccagtcccgagacccacctggacatgctccgccacctctaccagggctgccaggtggtgcagggaaacctggaactcacctacctgcccaccaatgccagcctgtccttcctgcaggatatccaggaggtgcagggctacgtgctcatcgctcacaaccaagtgaggcaggtcccactgcagaggctgcggattgtgcgaggcacccagctctttgaggacaactatgccctggccgtgctagacaatggagacccgctgaacaataccacccctgtcacaggggcctccccaggaggcctgcgggagctgcagcttcgaagcctcacagagatcttgaaaggaggggtcttgatccagcggaacccccagctctgctaccaggacacgattttgtggaaggacatcttccacaagaacaaccagctggctctcacactgatagacaccaaccgctctcgggcctgccacccctgttctccgatgtgtaagggctcccgctgctggggagagagttctgaggattgtcagagcctgacgcgcactgtctgtgccggtggctgtgcccgctgcaaggggccactgcccactgactgctgccatgagcagtgtgctgccggctgcacgggccccaagcactctgactgcctggcctgcctccacttcaaccacagtggcatctgtgagctgcactgcccagccctggtcacctacaacacagacacgtttgagtccatgcccaatcccgagggccggtatacattcggcgccagctgtgtgactgcctgtccctacaactacctttctacggacgtgggatcctgcaccctcgtctgccccctgcacaaccaagaggtgacagcagaggatggaacacagcggtgtgagaagtgcagcaagccctgtgcccgagtgtgctatggtctgggcatggagcacttgcgagaggtgagggcagttaccagtgccaatatccaggagtttgctggctgcaagaagatctttgggagcctggcatttctgccggagagctttgatggggacccagcctccaacactgccccgctccagccagagcagctccaagtgtttgagactctggaagagatcacaggttacctatacatctcagcatggccggacagcctgcctgacctcagcgtcttccagaacctgcaagtaatccggggacgaattctgcacaatggcgcctactcgctgaccctgcaagggctgggcatcagctggctggggctgcgctcactgagggaactgggcagtggactggccctcatccaccataacacccacctctgcttcgtgcacacggtgccctgggaccagctctttcggaacccgcaccaagctctgctccacactgccaaccggccagaggacgagtgtgtgggcgagggcctggcctgccaccagctgtgcgcccgagggcactgctggggtccagggcccacccagtgtgtcaactgcagccagttccttcggggccaggagtgcgtggaggaatgccgagtactgcaggggctccccagggagtatgtgaatgccaggcactgtttgccgtgccaccctgagtgtcagccccagaatggctcagtgacctgttttggaccggaggctgaccagtgtgtggcctgtgcccactataaggaccctcccttctgcgtggcccgctgccccagcggtgtgaaacctgacctctcctacatgcccatctggaagtttccagatgaggagggcgcatgccagccttgccccatcaactgcacccactcctgtgtggacctggatgacaagggctgccccgccgagcagagagccagccctctgacgtccatcatctctgcggtggttggcattctgctggtcgtggtcttgggggtggtctttgggatcctcatcaagcgacggcagcagaagatccggaagtacacgatgcggagactgctgcaggaaacggagctggtggagccgctgacacctagcggagcgatgcccaaccaggcgcagatgcggatcctgaaagagacggagctgaggaaggtgaaggtgcttggatctggcgcttttggcacagtctacaagggcatctggatccctgatggggagaatgtgaaaattccagtggccatcaaagtgttgagggaaaacacatcccccaaagccaacaaagaaatcttagacgaagcatacgtgatggctggtgtgggctccccatatgtctcccgccttctgggcatctgcctgacatccacggtgcagctggtgacacagcttatgccctatggctgcctcttagaccatgtccgggaaaaccgcggacgcctgggctcccaggacctgctgaactggtgtatgcagattgccaaggggatgagctacctggaggatgtgcggctcgtacacagggacttggccgctcggaacgtgctggtcaagagtcccaaccatgtcaaaattacagacttcgggctggctcggctgctggacattgacgagacagagtaccatgcagatgggggcaaggtgcccatcaagtggatggcgctggagtccattctccgccggcggttcacccaccagagtgatgtgtggagttatggtgtgactgtgtgggagctgatgacttttggggccaaaccttacgatgggatcccagcccgggagatccctgacctgctggaaaagggggagcggctgccccagccccccatctgcaccattgatgtctacatgatcatggtcaaatgttggatgattgactctgaatgtcggccaagattccgggagttggtgtctgaattctcccgcatggccagggacccccagcgctttgtggtcatccagaatgaggacttgggcccagccagtcccttggacagcaccttctaccgctcactgctggaggacgatgacatgggggacctggtggatgctgaggagtatctggtaccccagcagggcttcttctgtccagaccctgccccgggcgctgggggcatggtccaccacaggcaccgcagctcatctaccaggagtggcggtggggacctgacactagggctggagccctctgaagaggaggcccccaggtctccactggcaccctccgaaggggctggctccgatgtatttgatggtgacctgggaatgggggcagccaaggggctgcaaagcctccccacacatgaccccagccctctacagcggtacagtgaggaccccacagtacccctgccctctgagactgatggctacgttgcccccctgacctgcagcccccagcctgaatatgtgaaccagccagatgttcggccccagcccccttcgccccgagagggccctctgcctgctgcccgacctgctggtgccactctggaaaggcccaagactctctccccagggaagaatggggtcgtcaaagacgtttttgcctttgggggtgccgtggagaaccccgagtacttgacaccccagggaggagctgcccctcagccccaccctcctcctgccttcagcccagccttcgacaacctctattactgggaccaggacccaccagagcggggggctccacccagcaccttcaaagggacacctacggcagagaacccagagtacctgggtctggacgtgccagtgtgaaccagaaggccaagtccgcagaagccctgatgtgtcctcagggagcagggaaggcctgacttctgctggcatcaagaggtgggagggccctccgaccacttccaggggaacctgccatgccaggaacctgtcctaaggaaccttccttcctgcttgagttcccagatggctggaaggggtccagcctcgttggaagaggaacagcactggggagtctttgtggattctgaggccctgcccaatgagactctagggtccagtggatgccacagcccagcttggccctttccttccagatcctgggtactgaaagccttagggaagctggcctgagaggggaagcggccctaagggagtgtctaagaacaaaagcgacccattcagagactgtccctgaaacctagtactgccccccatgaggaaggaacagcaatggtgtcagtatccaggctttgtacagagtgcttttctgtttagtttttactttttttgttttgtttttttaaagatgaaataaagacccagggggagaatgggtgttgtatggggaggcaagtgtggggggtccttctccacacccactttgtccatttgcaaatatattttggaaaacagcta

SEQ ID NO: 34175 - DNA, 4806 bp, Homo sapiens
  source 1..4806: mol_type = unassigned DNA
gttcccggatttttgtgggcgcctgccccgcccctcgtccccctgctgtgtccatatatcgaggcgatagggttaagggaaggcggacgcctgatgggttaatgagcaaactgaagtgttttccatgatcttttttgagtcgcaattgaagtaccacctcccgagggtgattgcttccccatgcggggtagaacctttgctgtcctgttcaccactctacctccagcacagaatttggcttatgccaaatccgaaaatattgtgaccaggaaccattctgtccaactcttctatttcaggtggcaaagcaaagctatattcaagaccacatgcaaagctactccctgagcaaagagtcacagataaaacgggggcaccagtagaatggccaggacaaacgcagtgcagcacagagactcagaccctggcagccatgcctgcgcaggcagtgatgagagtgacatgtactgttgtggacatgcacaaaagtgagtgtgcaccggcacagacatgaagctgcggctccctgccagtcccgagacccacctggacatgctccgccacctctaccagggctgccaggtggtgcagggaaacctggaactcacctacctgcccaccaatgccagcctgtccttcctgcaggatatccaggaggtgcagggctacgtgctcatcgctcacaaccaagtgaggcaggtcccactgcagaggctgcggattgtgcgaggcacccagctctttgaggacaactatgccctggccgtgctagacaatggagacccgctgaacaataccacccctgtcacaggggcctccccaggaggcctgcgggagctgcagcttcgaagcctcacagagatcttgaaaggaggggtcttgatccagcggaacccccagctctgctaccaggacacgattttgtggaaggacatcttccacaagaacaaccagctggctctcacactgatagacaccaaccgctctcgggcctgccacccctgttctccgatgtgtaagggctcccgctgctggggagagagttctgaggattgtcagagcctgacgcgcactgtctgtgccggtggctgtgcccgctgcaaggggccactgcccactgactgctgccatgagcagtgtgctgccggctgcacgggccccaagcactctgactgcctggcctgcctccacttcaaccacagtggcatctgtgagctgcactgcccagccctggtcacctacaacacagacacgtttgagtccatgcccaatcccgagggccggtatacattcggcgccagctgtgtgactgcctgtccctacaactacctttctacggacgtgggatcctgcaccctcgtctgccccctgcacaaccaagaggtgacagcagaggatggaacacagcggtgtgagaagtgcagcaagccctgtgcccgagtgtgctatggtctgggcatggagcacttgcgagaggtgagggcagttaccagtgccaatatccaggagtttgctggctgcaagaagatctttgggagcctggcatttctgccggagagctttgatggggacccagcctccaacactgccccgctccagccagagcagctccaagtgtttgagactctggaagagatcacaggttacctatacatctcagcatggccggacagcctgcctgacctcagcgtcttccagaacctgcaagtaatccggggacgaattctgcacaatggcgcctactcgctgaccctgcaagggctgggcatcagctggctggggctgcgctcactgagggaactgggcagtggactggccctcatccaccataacacccacctctgcttcgtgcacacggtgccctgggaccagctctttcggaacccgcaccaagctctgctccacactgccaaccggccagaggacgagtgtgtgggcgagggcctggcctgccaccagctgtgcgcccgagggcactgctggggtccagggcccacccagtgtgtcaactgcagccagttccttcggggccaggagtgcgtggaggaatgccgagtactgcaggggctccccagggagtatgtgaatgccaggcactgtttgccgtgccaccctgagtgtcagccccagaatggctcagtgacctgttttggaccggaggctgaccagtgtgtggcctgtgcccactataaggaccctcccttctgcgtggcccgctgccccagcggtgtgaaacctgacctctcctacatgcccatctggaagtttccagatgaggagggcgcatgccagccttgccccatcaactgcacccactcctgtgtggacctggatgacaagggctgccccgccgagcagagagccagccctctgacgtccatcatctctgcggtggttggcattctgctggtcgtggtcttgggggtggtctttgggatcctcatcaagcgacggcagcagaagatccggaagtacacgatgcggagactgctgcaggaaacggagctggtggagccgctgacacctagcggagcgatgcccaaccaggcgcagatgcggatcctgaaagagacggagctgaggaaggtgaaggtgcttggatctggcgcttttggcacagtctacaagggcatctggatccctgatggggagaatgtgaaaattccagtggccatcaaagtgttgagggaaaacacatcccccaaagccaacaaagaaatcttagacgaagcatacgtgatggctggtgtgggctccccatatgtctcccgccttctgggcatctgcctgacatccacggtgcagctggtgacacagcttatgccctatggctgcctcttagaccatgtccgggaaaaccgcggacgcctgggctcccaggacctgctgaactggtgtatgcagattgccaaggggatgagctacctggaggatgtgcggctcgtacacagggacttggccgctcggaacgtgctggtcaagagtcccaaccatgtcaaaattacagacttcgggctggctcggctgctggacattgacgagacagagtaccatgcagatgggggcaaggtgcccatcaagtggatggcgctggagtccattctccgccggcggttcacccaccagagtgatgtgtggagttatggtgtgactgtgtgggagctgatgacttttggggccaaaccttacgatgggatcccagcccgggagatccctgacctgctggaaaagggggagcggctgccccagccccccatctgcaccattgatgtctacatgatcatggtcaaatgttggatgattgactctgaatgtcggccaagattccgggagttggtgtctgaattctcccgcatggccagggacccccagcgctttgtggtcatccagaatgaggacttgggcccagccagtcccttggacagcaccttctaccgctcactgctggaggacgatgacatgggggacctggtggatgctgaggagtatctggtaccccagcagggcttcttctgtccagaccctgccccgggcgctgggggcatggtccaccacaggcaccgcagctcatctaccaggagtggcggtggggacctgacactagggctggagccctctgaagaggaggcccccaggtctccactggcaccctccgaaggggctggctccgatgtatttgatggtgacctgggaatgggggcagccaaggggctgcaaagcctccccacacatgaccccagccctctacagcggtacagtgaggaccccacagtacccctgccctctgagactgatggctacgttgcccccctgacctgcagcccccagcctgaatatgtgaaccagccagatgttcggccccagcccccttcgccccgagagggccctctgcctgctgcccgacctgctggtgccactctggaaaggcccaagactctctccccagggaagaatggggtcgtcaaagacgtttttgcctttgggggtgccgtggagaaccccgagtacttgacaccccagggaggagctgcccctcagccccaccctcctcctgccttcagcccagccttcgacaacctctattactgggaccaggacccaccagagcggggggctccacccagcaccttcaaagggacacctacggcagagaacccagagtacctgggtctggacgtgccagtgtgaaccagaaggccaagtccgcagaagccctgatgtgtcctcagggagcagggaaggcctgacttctgctggcatcaagaggtgggagggccctccgaccacttccaggggaacctgccatgccaggaacctgtcctaaggaaccttccttcctgcttgagttcccagatggctggaaggggtccagcctcgttggaagaggaacagcactggggagtctttgtggattctgaggccctgcccaatgagactctagggtccagtggatgccacagcccagcttggccctttccttccagatcctgggtactgaaagccttagggaagctggcctgagaggggaagcggccctaagggagtgtctaagaacaaaagcgacccattcagagactgtccctgaaacctagtactgccccccatgaggaaggaacagcaatggtgtcagtatccaggctttgtacagagtgcttttctgtttagtttttactttttttgttttgtttttttaaagatgaaataaagacccagggggagaatgggtgttgtatggggaggcaagtgtggggggtccttctccacacccactttgtccatttgcaaatatattttggaaaacagcta

SEQ ID NO: 34176 - DNA, 3238 bp, Homo sapiens
  source 1..3238: mol_type = unassigned DNA
gcgcttgctcccaatcacaggagaaggaggaggtggaggaggagggctgcttgaggaagtataagaatgaagttgtgaagctgagattcccctccattgggaccggagaaaccaggggagccccccgggcagccgcgcgccccttcccacggggccctttactgcgccgcgcgcccggcccccacccctcgcagcaccccgcgccccgcgccctcccagccgggtccagccggagccatggggccggagccgcagtgagcaccatggagctggcggccttgtgccgctgggggctcctcctcgccctcttgccccccggagccgcgagcacccaagacaactacctttctacggacgtgggatcctgcaccctcgtctgccccctgcacaaccaagaggtgacagcagaggatggaacacagcggtgtgagaagtgcagcaagccctgtgcccgagtgtgctatggtctgggcatggagcacttgcgagaggtgagggcagttaccagtgccaatatccaggagtttgctggctgcaagaagatctttgggagcctggcatttctgccggagagctttgatggggacccagcctccaacactgccccgctccagccagagcagctccaagtgtttgagactctggaagagatcacaggttacctatacatctcagcatggccggacagcctgcctgacctcagcgtcttccagaacctgcaagtaatccggggacgaattctgcacaatggcgcctactcgctgaccctgcaagggctgggcatcagctggctggggctgcgctcactgagggaactgggcagtggactggccctcatccaccataacacccacctctgcttcgtgcacacggtgccctgggaccagctctttcggaacccgcaccaagctctgctccacactgccaaccggccagaggacgagtgtgtgggcgagggcctggcctgccaccagctgtgcgcccgagggcactgctggggtccagggcccacccagtgtgtcaactgcagccagttccttcggggccaggagtgcgtggaggaatgccgagtactgcaggggctccccagggagtatgtgaatgccaggcactgtttgccgtgccaccctgagtgtcagccccagaatggctcagtgacctgttttggaccggaggctgaccagtgtgtggcctgtgcccactataaggaccctcccttctgcgtggcccgctgccccagcggtgtgaaacctgacctctcctacatgcccatctggaagtttccagatgaggagggcgcatgccagccttgccccatcaactgcacccactcctgtgtggacctggatgacaagggctgccccgccgagcagagagccagccctctgacgtccatcatctctgcggtggttggcattctgctggtcgtggtcttgggggtggtctttgggatcctcatcaagcgacggcagcagaagatccggaagtacacgatgcggagactgctgcaggaaacggagctggtggagccgctgacacctagcggagcgatgcccaaccaggcgcagatgcggatcctgaaagagacggagctgaggaaggtgaaggtgcttggatctggcgcttttggcacagtctacaagggcatctggatccctgatggggagaatgtgaaaattccagtggccatcaaagtgttgagggaaaacacatcccccaaagccaacaaagaaatcttagacgaagcatacgtgatggctggtgtgggctccccatatgtctcccgccttctgggcatctgcctgacatccacggtgcagctggtgacacagcttatgccctatggctgcctcttagaccatgtccgggaaaaccgcggacgcctgggctcccaggacctgctgaactggtgtatgcagattgccaaggggatgagctacctggaggatgtgcggctcgtacacagggacttggccgctcggaacgtgctggtcaagagtcccaaccatgtcaaaattacagacttcgggctggctcggctgctggacattgacgagacagagtaccatgcagatgggggcaaggtgcccatcaagtggatggcgctggagtccattctccgccggcggttcacccaccagagtgatgtgtggagttatggtgtgactgtgtgggagctgatgacttttggggccaaaccttacgatgggatcccagcccgggagatccctgacctgctggaaaagggggagcggctgccccagccccccatctgcaccattgatgtctacatgatcatggtcaaatgttggatgattgactctgaatgtcggccaagattccgggagttggtgtctgaattctcccgcatggccagggacccccagcgctttgtggtcatccagaatgaggacttgggcccagccagtcccttggacagcaccttctaccgctcactgctggaggacgatgacatgggggacctggtggatgctgaggagtatctggtaccccagcagggcttcttctgtccagaccctgccccgggcgctgggggcatggtccaccacaggcaccgcagctcatctaccaggagtggcggtggggacctgacactagggctggagccctctgaagaggaggcccccaggtctccactggcaccctccgaaggggctggctccgatgtatttgatggtgacctgggaatgggggcagccaaggggctgcaaagcctccccacacatgaccccagccctctacagcggtacagtgaggaccccacagtacccctgccctctgagactgatggctacgttgcccccctgacctgcagcccccagcctgaatatgtgaaccagccagatgttcggccccagcccccttcgccccgagagggccctctgcctgctgcccgacctgctggtgccactctggaaaggcccaagactctctccccagggaagaatggggtcgtcaaagacgtttttgcctttgggggtgccgtggagaaccccgagtacttgacaccccagggaggagctgcccctcagccccaccctcctcctgccttcagcccagccttcgacaacctctattactgggaccaggacccaccagagcggggggctccacccagcaccttcaaagggacacctacggcagagaacccagagtacctgggtctggacgtgccagtgtgaaccagaaggccaagtccgcagaagccctgatgtgt

SEQ ID NO: 34177 - DNA, 2147 bp, Homo sapiens
  source 1..2147: mol_type = unassigned DNA
gaatgcacagggtgggcctagtcagaagaagcctttcccctgaaatccctctacttcccaagcacgcaagctttctcctgctgttaaacctgcagtgtgcaagggacatgggcggaggggtccttcagtcaggcttctccctgtctgagtgtgcaccggcacagacatgaagctgcggctccctgccagtcccgagacccacctggacatgctccgccacctctaccagggctgccaggtggtgcagggaaacctggaactcacctacctgcccaccaatgccagcctgtccttcctgcaggatatccaggaggtgcagggctacgtgctcatcgctcacaaccaagtgaggcaggtcccactgcagaggctgcggattgtgcgaggcacccagctctttgaggacaactatgccctggccgtgctagacaatggagacccgctgaacaataccacccctgtcacaggggcctccccaggaggcctgcgggagctgcagcttcgaagcctcacagagatcttgaaaggaggggtcttgatccagcggaacccccagctctgctaccaggacacgattttgtggaaggacatcttccacaagaacaaccagctggctctcacactgatagacaccaaccgctctcgggcctgccacccctgttctccgatgtgtaagggctcccgctgctggggagagagttctgaggattgtcagagcctgacgcgcactgtctgtgccggtggctgtgcccgctgcaaggggccactgcccactgactgctgccatgagcagtgtgctgccggctgcacgggccccaagcactctgactgcctggcctgcctccacttcaaccacagtggcatctgtgagctgcactgcccagccctggtcacctacaacacagacacgtttgagtccatgcccaatcccgagggccggtatacattcggcgccagctgtgtgactgcctgtccctacaactacctttctacggacgtgggatcctgcaccctcgtctgccccctgcacaaccaagaggtgacagcagaggatggaacacagcggtgtgagaagtgcagcaagccctgtgcccgagtgtgctatggtctgggcatggagcacttgcgagaggtgagggcagttaccagtgccaatatccaggagtttgctggctgcaagaagatctttgggagcctggcatttctgccggagagctttgatggggacccagcctccaacactgccccgctccagccagagcagctccaagtgtttgagactctggaagagatcacaggttacctatacatctcagcatggccggacagcctgcctgacctcagcgtcttccagaacctgcaagtaatccggggacgaattctgcacaatggcgcctactcgctgaccctgcaagggctgggcatcagctggctggggctgcgctcactgagggaactgggcagtggactggccctcatccaccataacacccacctctgcttcgtgcacacggtgccctgggaccagctctttcggaacccgcaccaagctctgctccacactgccaaccggccagaggacgagtgtgtgggcgagggcctggcctgccaccagctgtgcgcccgagggcactgctggggtccagggcccacccagtgtgtcaactgcagccagttccttcggggccaggagtgcgtggaggaatgccgagtactgcaggggctccccagggagtatgtgaatgccaggcactgtttgccgtgccaccctgagtgtcagccccagaatggctcagtgacctgttttggaccggaggctgaccagtgtgtggcctgtgcccactataaggaccctcccttctgcgtggcccgctgccccagcggtgtgaaacctgacctctcctacatgcccatctggaagtttccagatgaggagggcgcatgccagccttgccccatcaactgcacccactcgtgagtccaacggtcttttctgcagaaaggaggactttcctttcaggggtctttctggggctcttactataaaaggggaccaactctccctttgtcatatcttgtttctgatgacaaaaataacacattgttaaaattgtaaaattaaaacatgaaatataaattaatgccct

SEQ ID NO: 34178 - DNA, 4624 bp, Homo sapiens; identical to SEQ ID NO: 34174
  source 1..4624: mol_type = unassigned DNA

SEQ ID NO: 34179 - DNA, 4341 bp, Homo sapiens
  source 1..4341: mol_type = unassigned DNA
atgccccgggggtcctggaagccacaagtgtgcaccggcacagacatgaagctgcggctccctgccagtcccgagacccacctggacatgctccgccacctctaccagggctgccaggtggtgcagggaaacctggaactcacctacctgcccaccaatgccagcctgtccttcctgcaggatatccaggaggtgcagggctacgtgctcatcgctcacaaccaagtgaggcaggtcccactgcagaggctgcggattgtgcgaggcacccagctctttgaggacaactatgccctggccgtgctagacaatggagacccgctgaacaataccacccctgtcacaggggcctccccaggaggcctgcgggagctgcagcttcgaagcctcacagagatcttgaaaggaggggtcttgatccagcggaacccccagctctgctaccaggacacgattttgtggaaggacatcttccacaagaacaaccagctggctctcacactgatagacaccaaccgctctcgggcctgccacccctgttctccgatgtgtaagggctcccgctgctggggagagagttctgaggattgtcagagcctgacgcgcactgtctgtgccggtggctgtgcccgctgcaaggggccactgcccactgactgctgccatgagcagtgtgctgccggctgcacgggccccaagcactctgactgcctggcctgcctccacttcaaccacagtggcatctgtgagctgcactgcccagccctggtcacctacaacacagacacgtttgagtccatgcccaatcccgagggccggtatacattcggcgccagctgtgtgactgcctgtccctacaactacctttctacggacgtgggatcctgcaccctcgtctgccccctgcacaaccaagaggtgacagcagaggatggaacacagcggtgtgagaagtgcagcaagccctgtgcccgagtgtgctatggtctgggcatggagcacttgcgagaggtgagggcagttaccagtgccaatatccaggagtttgctggctgcaagaagatctttgggagcctggcatttctgccggagagctttgatggggacccagcctccaacactgccccgctccagccagagcagctccaagtgtttgagactctggaagagatcacaggttacctatacatctcagcatggccggacagcctgcctgacctcagcgtcttccagaacctgcaagtaatccggggacgaattctgcacaatggcgcctactcgctgaccctgcaagggctgggcatcagctggctggggctgcgctcactgagggaactgggcagtggactggccctcatccaccataacacccacctctgcttcgtgcacacggtgccctgggaccagctctttcggaacccgcaccaagctctgctccacactgccaaccggccagaggacgagtgtgtgggcgagggcctggcctgccaccagctgtgcgcccgagggcactgctggggtccagggcccacccagtgtgtcaactgcagccagttccttcggggccaggagtgcgtggaggaatgccgagtactgcaggggctccccagggagtatgtgaatgccaggcactgtttgccgtgccaccctgagtgtcagccccagaatggctcagtgacctgttttggaccggaggctgaccagtgtgtggcctgtgcccactataaggaccctcccttctgcgtggcccgctgccccagcggtgtgaaacctgacctctcctacatgcccatctggaagtttccagatgaggagggcgcatgccagccttgccccatcaactgcacccactcctgtgtggacctggatgacaagggctgccccgccgagcagagagccagccctctgacgtccatcatctctgcggtggttggcattctgctggtcgtggtcttgggggtggtctttgggatcctcatcaagcgacggcagcagaagatccggaagtacacgatgcggagactgctgcaggaaacggagctggtggagccgctgacacctagcggagcgatgcccaaccaggcgcagatgcggatcctgaaagagacggagctgaggaaggtgaaggtgcttggatctggcgcttttggcacagtctacaagggcatctggatccctgatggggagaatgtgaaaattccagtggccatcaaagtgttgagggaaaacacatcccccaaagccaacaaagaaatcttagacgaagcatacgtgatggctggtgtgggctccccatatgtctcccgccttctgggcatctgcctgacatccacggtgcagctggtgacacagcttatgccctatggctgcctcttagaccatgtccgggaaaaccgcggacgcctgggctcccaggacctgctgaactggtgtatgcagattgccaaggggatgagctacctggaggatgtgcggctcgtacacagggacttggccgctcggaacgtgctggtcaagagtcccaaccatgtcaaaattacagacttcgggctggctcggctgctggacattgacgagacagagtaccatgcagatgggggcaaggtgcccatcaagtggatggcgctggagtccattctccgccggcggttcacccaccagagtgatgtgtggagttatggtgtgactgtgtgggagctgatgacttttggggccaaaccttacgatgggatcccagcccgggagatccctgacctgctggaaaagggggagcggctgccccagccccccatctgcaccattgatgtctacatgatcatggtcaaatgttggatgattgactctgaatgtcggccaagattccgggagttggtgtctgaattctcccgcatggccagggacccccagcgctttgtggtcatccagaatgaggacttgggcccagccagtcccttggacagcaccttctaccgctcactgctggaggacgatgacatgggggacctggtggatgctgaggagtatctggtaccccagcagggcttcttctgtccagaccctgccccgggcgctgggggcatggtccaccacaggcaccgcagctcatctaccaggagtggcggtggggacctgacactagggctggagccctctgaagaggaggcccccaggtctccactggcaccctccgaaggggctggctccgatgtatttgatggtgacctgggaatgggggcagccaaggggctgcaaagcctccccacacatgaccccagccctctacagcggtacagtgaggaccccacagtacccctgccctctgagactgatggctacgttgcccccctgacctgcagcccccagcctgaatatgtgaaccagccagatgttcggccccagcccccttcgccccgagagggccctctgcctgctgcccgacctgctggtgccactctggaaaggcccaagactctctccccagggaagaatggggtcgtcaaagacgtttttgcctttgggggtgccgtggagaaccccgagtacttgacaccccagggaggagctgcccctcagccccaccctcctcctgccttcagcccagccttcgacaacctctattactgggaccaggacccaccagagcggggggctccacccagcaccttcaaagggacacctacggcagagaacccagagtacctgggtctggacgtgccagtgtgaaccagaaggccaagtccgcagaagccctgatgtgtcctcagggagcagggaaggcctgacttctgctggcatcaagaggtgggagggccctccgaccacttccaggggaacctgccatgccaggaacctgtcctaaggaaccttccttcctgcttgagttcccagatggctggaaggggtccagcctcgttggaagaggaacagcactggggagtctttgtggattctgaggccctgcccaatgagactctagggtccagtggatgccacagcccagcttggccctttccttccagatcctgggtactgaaagccttagggaagctggcctgagaggggaagcggccctaagggagtgtctaagaacaaaagcgacccattcagagactgtccctgaaacctagtactgccccccatgaggaaggaacagcaatggtgtcagtatccaggctttgtacagagtgcttttctgtttagtttttactttttttgttttgtttttttaaagatgaaataaagacccagggggagaatgggtgttgtatggggaggcaagtgtggggggtccttctccacacccactttgtccatttgcaaatatattttggaaaacagcta

SEQ ID NO: 34180 - DNA, 2905 bp, Homo sapiens
  source 1..2905: mol_type = unassigned DNA
cggcggcggcggcggcaccatccaggcgggcaccatgggcacgtccgcgctctgggcgctctggctgctgctcgcgctgtgctgggcgccccgggagagcggcgccaccggaaccgggagaaaagccaaatgtgaaccctcccaattccagtgcacaaatggtcgctgtattacgctgttgtggaaatgtgatggggatgaagactgtgttgacggcagtgatgagctggactgtgccccgccaacctgtggcgcccatgagttccagtgcagcacctcctcctgcatccccatcagctgggtatgcgacgatgatgcagactgctccgaccaatctgatgagtccctggagcagtgtggccgtcagccagtcatacacaccaagtgtccagccagcgaaatccagtgcggctctggcgagtgcatccataagaagtggcgatgtgatggggaccctgactgcaaggatggcagtgatgaggtcaactgtccctctcgaacttgccgacctgaccaatttgaatgtgaggatggcagctgcatccatggcagcaggcagtgtaatggtatccgagactgtgtcgatggttccgatgaagtcaactgcaaaaatgtcaatcagtgcttgggccctggaaaattcaagtgcagaagtggagaatgcatagatatcagcaaagtatgtaaccaggagcaggactgcagggactggagtgatgagcccctgaaagagtgtcatataaacgaatgcttggtaaataatggtggatgttctcatatctgcaaagacctagttataggctacgagtgtgactgtgcagctgggtttgaactgatagataggaaaacctgtggagatattgatgaatgccaaaatccaggaatctgcagtcaaatttgtatcaacttaaaaggcggttacaagtgtgaatgtagtcgtggctatcaaatggatcttgctactggcgtgtgcaaggcagtaggcaaagagccaagtctgatcttcactaatcgaagagacatcaggaagattggcttagagaggaaagaatatatccaactagttgaacagctaagaaacactgtggctctcgatgctgacattgctgcccagaaactattctgggccgatctaagccaaaaggctatcttcagtgcctcaattgatgacaaggttggtagacatgttaaaatgatcgacaatgtctataatcctgcagccattgctgttgattgggtgtacaagaccatctactggactgatgcggcttctaagactatttcagtagctaccctagatggaaccaagaggaagttcctgtttaactctgacttgcgagagcctgcctccatagctgtggacccactgtctggctttgtttactggtcagactggggtgaaccagctaaaatagaaaaagcaggaatgaatggattcgatagacgtccactggtgacagcggatatccagtggcctaacggaattacacttgaccttataaaaagtcgcctctattggcttgattctaagttgcacatgttatccagcgtggacttgaatggccaagatcgtaggatagtactaaagtctctggagttcctagctcatcctcttgcactaacaatatttgaggatcgtgtctactggatagatggggaaaatgaagcagtctatggtgccaataaattcactggatcagagctagccactctagtcaacaacctgaatgatgcccaagacatcattgtctatcatgaacttgtacagccatcaggtaaaaattggtgtgaagaagacatggagaatggaggatgtgaatacctatgcctgccagcaccacagattaatgatcactctccaaaatatacctgttcctgtcccagtgggtacaatgtagaggaaaatggccgagactgtcaaagtactgcaactactgtgacttacagtgagacaaaagatacgaacacaacagaaatttcagcaactagtggactagttcctggagggatcaatgtgaccacagcagtatcagaggtcagtgttcccccaaaagggacttctgccgcatgggccattcttcctctcttgctcttagtgatggcagcagtaggtggctacttgatgtggcggaattggcaacacaagaacatgaaaagcatgaactttgacaatcctgtgtacttgaaaaccactgaagaggacctctccatagacattggtagacacagtgcttctgttggacacacgtacccagcaatatcagttgtaagcacagatgatgatctagcttgacttctgtgacaaatgttgacctttgaggtctaaacaaataatacccccgtcggaatggtaaccgagccagcagctgaagtctctttttcttcctctcggctggaagaacatcaagatacctttgcgtggatcaagcttgtgtacttgaccgtttttatattacttttgtaaatattcttgtccacattctacttcagctttggatgtggttaccgagtatctgtaacccttgaatttctagacagtattgccacctctggccaaatatgcactttccctagaaagccatattccagcagtgaaacttgtgctatagtgtataccacctgtacatacattgtataggccatctgtaaatatcccagagaacaatcactattcttaagcactttgaaaatatttctatgtaaattattgtaaactttttcaatggttgggacaatggcaataggacaaaacgggttactaagatgaaattgccaaaaaaatttataaactaattttgtacgtatgaatgatatctttgacctcaatggaggtttgcaaagactgagtgttcaaactactgtacattttttttcaagtgctaaaaaattaaaccaagcagcttaa

SEQ ID NO: 34181 - DNA, 736 bp, Homo sapiens
  source 1..736: mol_type = unassigned DNA
ggtggctgggtgggtggggaggagactgtgcaagttgtaggggagggggtgccctcttcttccccgctcccttcccccgccaactccttcccctccttctccccctttcccctccccgcccccaccttcttcctcctttcggaaggactggtaacttgtcgtgcggagcgaacggcggcggcggcggcggcggcggcaccatccaggcgggcaccatgggcacgtccgcgctctgggcgctctggctgctgctcgcgctgtgctgggcgccccgggagagcggcgccaccggaaccgggagaaaagccaaatgtgaaccctcccaattccagtgcacaaatggtcgctgtattacgctgttgtggaaatgtgatggggatgaagactgtgttgacggcagtgatgaaaagaactgtgtaaagaagacgtgtgctgaatctgacttcgtgtgcaacaatggccagtgtgttcccagccgatggaagtgtgatggagatcctgactgcgaagatggttcagatgaaagcccagaacagtgccgcaatataacatgtagtcccgacgagttcacctgctccagtggccgctgcatctccaggaactttgtatgcaatggccaggatgactgcagcgatggcagtgatgagctggactgtgccccgccaacctgtggcgcccatgagttccagtgcagcacctcctcctgcatccccatcagctgggtatgcgacgatga

SEQ ID NO: 34182 - DNA, 3240 bp, Homo sapiens
  source 1..3240: mol_type = unassigned DNA
cttcttcctcctttcggaaggactggtaacttgtcgtgcggagcgaacggcggcggcggcggcggcggcggcaccatccaggcgggcaccatgggcacgtccgcgctctgggcgctctggctgctgctcgcgctgtgctgggcgccccgggagagcggcgccaccggaaccgggagaaaagccaaatgtgaaccctcccaattccagtgcacaaatggtcgctgtattacgctgttgtggaaatgtgatggggatgaagactgtgttgacggcagtgatgaaaagaactgtgtaaagaagacgtgtgctgaatctgacttcgtgtgcaacaatggccagtgtgttcccagccgatggaagtgtgatggagatcctgactgcgaagatggttcagatgaaagcccagaacagtgccatatgagaacatgccgcatacatgaaatcagctgtggcgcccattctactcagtgtatcccagtgtcctggagatgtgatggtgaaaatgattgtgacagtggagaagatgaagaaaactgtggcaatataacatgtagtcccgacgagttcacctgctccagtggccgctgcatctccaggaactttgtatgcaatggccaggatgactgcagcgatggcagtgatgagctggactgtgccccgccaacctgtggcgcccatgagttccagtgcagcacctcctcctgcatccccatcagctgggtatgcgacgatgatgcagactgctccgaccaatctgatgagtccctggagcagtgtggccgtcagccagtcatacacaccaagtgtccagccagcgaaatccagtgcggctctggcgagtgcatccataagaagtggcgatgtgatggggaccctgactgcaaggatggcagtgatgaggtcaactgtccctctcgaacttgccgacctgaccaatttgaatgtgaggatggcagctgcatccatggcagcaggcagtgtaatggtatccgagactgtgtcgatggttccgatgaagtcaactgcaaaaatgtcaatcagtgcttgggccctggaaaattcaagtgcagaagtggagaatgcatagatatcagcaaagtatgtaaccaggagcaggactgcagggactggagtgatgagcccctgaaagagtgtcatataaacgaatgcttggtaaataatggtggatgttctcatatctgcaaagacctagttataggctacgagtgtgactgtgcagctgggtttgaactgatagataggaaaacctgtggagatattgatgaatgccaaaatccaggaatctgcagtcaaatttgtatcaacttaaaaggcggttacaagtgtgaatgtagtcgtggctatcaaatggatcttgctactggcgtgtgcaaggcagtaggcaaagagccaagtctgatcttcactaatcgaagagacatcaggaagattggcttagagaggaaagaatatatccaactagttgaacagctaagaaacactgtggctctcgatgctgacattgctgcccagaaactattctgggccgatctaagccaaaaggctatcttcagtgcctcaattgatgacaaggttggtagacatgttaaaatgatcgacaatgtctataatcctgcagccattgctgttgattgggtgtacaagaccatctactggactgatgcggcttctaagactatttcagtagctaccctagatggaaccaagaggaagttcctgtttaactctgacttgcgagagcctgcctccatagctgtggacccactgtctggctttgtttactggtcagactggggtgaaccagctaaaatagaaaaagcaggaatgaatggattcgatagacgtccactggtgacagcggatatccagtggcctaacggaattacacttgaccttataaaaagtcgcctctattggcttgattctaagttgcacatgttatccagcgtggacttgaatggccaagatcgtaggatagtactaaagtctctggagttcctagctcatcctcttgcactaacaatatttgaggatcgtgtctactggatagatggggaaaatgaagcagtctatggtgccaataaattcactggatcagagctagccactctagtcaacaacctgaatgatgcccaagacatcattgtctatcatgaacttgtacagccatcaggtaaaaattggtgtgaagaagacatggagaatggaggatgtgaatacctatgcctgccagcaccacagattaatgatcactctccaaaatatacctgttcctgtcccagtgggtacaatgtagaggaaaatggccgagactgtcaaaggatcaatgtgaccacagcagtatcagaggtcagtgttcccccaaaagggacttctgccgcatgggccattcttcctctcttgctcttagtgatggcagcagtaggtggctacttgatgtggcggaattggcaacacaagaacatgaaaagcatgaactttgacaatcctgtgtacttgaaaaccactgaagaggacctctccatagacattggtagacacagtgcttctgttggacacacgtacccagcaatatcagttgtaagcacagatgatgatctagcttgacttctgtgacaaatgttgacctttgaggtctaaacaaataatacccccgtcggaatggtaaccgagccagcagctgaagtctctttttcttcctctcggctggaagaacatcaagatacctttgcgtggatcaagcttgtgtacttgaccgtttttatattacttttgtaaatattcttgtccacattctacttcagctttggatgtggttaccgagtatctgtaacccttgaatttctagacagtattgccacctctggccaaatatgcactttccctagaaagccatattccagcagtgaaacttgtgctatagtgtataccacctgtacatacattgtataggccatctgtaaatatcccagagaacaatcactattcttaagcactttgaaaatatttctatgtaaattattgtaaactttttcaatggttgggacaatggcaataggacaaaacgggttactaagatgaaattgccaaaaaaatttataaactaattttgtacgtatgaatgatatctttgacctcaatggaggtttgcaaagactgagtgttcaaactactgtacattttttttcaagtgctaaaaaattaaaccaagcagcttaa

SEQ ID NO: 34183 - DNA, 3590 bp, Homo sapiens
  source 1..3590: mol_type = unassigned DNA
ctctccgttctgtgctctcttctgctctcggctccccaccccctctcccttccctcctctccccttgcctcccctcctctgcagcgcctgcattattttctgcccgcaggctcggcttgcactgctgctgcagcccggggaggtggctgggtgggtggggaggagactgtgcaagttgtaggggagggggtgccctcttcttccccgctcccttcccccgccaactccttcccctccttctccccctttcccctccccgcccccaccttcttcctcctttcggaaggactggtaacttgtcgtgcggagcgaacggcggcggcggcggcggcggcggcaccatccaggcgggcaccatgggcacgtccgcgctctgggcgctctggctgctgctcgcgctgtgctgggcgccccgggagagcggcgccaccggaaccgggagaaaagccaaatgtgaaccctcccaattccagtgcacaaatggtcgctgtattacgctgttgtggaaatgtgatggggatgaagactgtgttgacggcagtgatgaaaagaactgtgtaaagaagacgtgtgctgaatctgacttcgtgtgcaacaatggccagtgtgttcccagccgatggaagtgtgatggagatcctgactgcgaagatggttcagatgaaagcccagaacagtgccatatgagaacatgccgcatacatgaaatcagctgtggcgcccattctactcagtgtatcccagtgtcctggagatgtgatggtgaaaatgattgtgacagtggagaagatgaagaaaactgtggcaatataacatgtagtcccgacgagttcacctgctccagtggccgctgcatctccaggaactttgtatgcaatggccaggatgactgcagcgatggcagtgatgagctggactgtgccccgccaacctgtggcgcccatgagttccagtgcagcacctcctcctgcatccccatcagctgggtatgcgacgatgatgcagactgctccgaccaatctgatgagtccctggagcagtgtggccgtcagccagtcatacacaccaagtgtccagccagcgaaatccagtgcggctctggcgagtgcatccataagaagtggcgatgtgatggggaccctgactgcaaggatggcagtgatgaggtcaactgtccctctcgaacttgccgacctgaccaatttgaatgtgaggatggcagctgcatccatggcagcaggcagtgtaatggtatccgagactgtgtcgatggttccgatgaagtcaactgcaaaaatgtcaatcagtgcttgggccctggaaaattcaagtgcagaagtggagaatgcatagatatcagcaaagtatgtaaccaggagcaggactgcagggactggagtgatgagcccctgaaagagtgtcatataaacgaatgcttggtaaataatggtggatgttctcatatctgcaaagacctagttataggctacgagtgtgactgtgcagctgggtttgaactgatagataggaaaacctgtggagatattgatgaatgccaaaatccaggaatctgcagtcaaatttgtatcaacttaaaaggcggttacaagtgtgaatgtagtcgtggctatcaaatggatcttgctactggcgtgtgcaaggcagtaggcaaagagccaagtctgatcttcactaatcgaagagacatcaggaagattggcttagagaggaaagaatatatccaactagttgaacagctaagaaacactgtggctctcgatgctgacattgctgcccagaaactattctgggccgatctaagccaaaaggctatcttcagtgcctcaattgatgacaaggttggtagacatgttaaaatgatcgacaatgtctataatcctgcagccattgctgttgattgggtgtacaagaccatctactggactgatgcggcttctaagactatttcagtagctaccctagatggaaccaagaggaagttcctgtttaactctgacttgcgagagcctgcctccatagctgtggacccactgtctggctttgtttactggtcagactggggtgaaccagctaaaatagaaaaagcaggaatgaatggattcgatagacgtccactggtgacagcggatatccagtggcctaacggaattacacttgaccttataaaaagtcgcctctattggcttgattctaagttgcacatgttatccagcgtggacttgaatggccaagatcgtaggatagtactaaagtctctggagttcctagctcatcctcttgcactaacaatatttgaggatcgtgtctactggatagatggggaaaatgaagcagtctatggtgccaataaattcactggatcagagctagccactctagtcaacaacctgaatgatgcccaagacatcattgtctatcatgaacttgtacagccatcaggtaaaaattggtgtgaagaagacatggagaatggaggatgtgaatacctatgcctgccagcaccacagattaatgatcactctccaaaatatacctgttcctgtcccagtgggtacaatgtagaggaaaatggccgagactgtcaaagtactgcaactactgtgacttacagtgagacaaaagatacgaacacaacagaaatttcagcaactagtggactagttcctggagggatcaatgtgaccacagcagtatcagaggtcagtgttcccccaaaagggacttctgccgcatgggccattcttcctctcttgctcttagtgatggcagcagtaggtggctacttgatgtggcggaattggcaacacaagaacatgaaaagcatgaactttgacaatcctgtgtacttgaaaaccactgaagaggacctctccatagacattggtagacacagtgcttctgttggacacacgtacccagcaatatcagttgtaagcacagatgatgatctagcttgacttctgtgacaaatgttgacctttgaggtctaaacaaataatacccccgtcggaatggtaaccgagccagcagctgaagtctctttttcttcctctcggctggaagaacatcaagatacctttgcgtggatcaagcttgtgtacttgaccgtttttatattacttttgtaaatattcttgtccacattctacttcagctttggatgtggttaccgagtatctgtaacccttgaatttctagacagtattgccacctctggccaaatatgcactttccctagaaagccatattccagcagtgaaacttgtgctatagtgtataccacctgtacatacattgtataggccatctgtaaatatcccagagaacaatcactattcttaagcactttgaaaatatttctatgtaaattattgtaaactttttcaatggttgggacaatggcaataggacaaaacgggttactaagatgaaattgccaaaaaaatttataaactaattttgtacgtatgaatgatatctttgacctcaatggaggtttgcaaagactgagtgttcaaactactgtacattttttttcaagtgctaaaaaattaaaccaagcagcttaa

SEQ ID NO: 34184 - DNA, 787 bp, Homo sapiens
  source 1..787: mol_type = unassigned DNA
gccttccccagctgtgcactctccatccagctgtgcgctctcgtcgggagtcccagccatgtccgacgagagagaggtagccgaggcagcgaccggggaagacgcctcttcgccgcctccgaaaaccgaggcagcgagcgacccccagcatcccgcggcctccgaaggggccgccgccgccgccgcctcgccgccactgctgcgctgcctagtgctcaccggctttggaggctacgacaaggtgaagctgcagagccggccggcagcgcccccggcccctgggcccggccagctgacgctgcgtctgcgggcctgcgggctcaacttcgcagacctcatggctaggcaggggctgtacgaccgtctcccgcctctgcctgtcactccgggcatggagggcgcgggtgttgtgatcgcagtgggcgagggagtcagcgaccgcaaggcaggagaccgggtgatggtgttgaaccggtcagggatgtggcaggaagaggtgactgtgccctcggtccagaccttcctgattcctgaggccatgacctttgaggaagctgctgccttgctcgtcaattacattacagcctacatggtcctctttgacttcggcaacctacagcctggccacagcgtcttggtacacatggctgcagggggtgtgggtatggctgccgtgcagctgccgtacagtggagaatgtgacagtgttcggaacggcctcggccagcaagcacgaggcactgaaggagaatggggtcacacatcccatcgactatcacacgactga

SEQ ID NO: 34185 - DNA, 2758 bp, Homo sapiens
  source 1..2758: mol_type = unassigned DNA
ctcgcccggcgccccgcccctcccgctggatcccgcagccgcggctcttcccgacgcgttccgccttccccagctgtgcactctccatccagctgtgcgctctcgtcgggagtcccagccatgtccgacgagagagaggtagccgaggcagcgaccggggaagacgcctcttcgccgcctccgaaaaccgaggcagcgagcgacccccagcatcccgcggcctccgaaggggccgccgccgccgccgcctcgccgccactgctgcgctgcctagtgctcaccggctttggaggctacgacaaggtgaagctgcagagccggccggcagcgcccccggcccctgggcccggccagctgacgctgcgtctgcgggcctgcgggctcaacttcgcagacctcatggctaggcaggggctgtacgaccgtctcccgcctctgcctgtcactccgggcatggagggcgcgggtgttgtgatcgcagtgggcgagggagtcagcgaccgcaaggcaggagaccgggtgatggtgttgaaccggtcagggatgtggcaggaagaggtgactgtgccctcggtccagaccttcctgattcctgaggccatgacctttgaggaagctgctgccttgctcgtcaattacattacagcctacatggtcctctttgacttcggcaacctacagcctggccacagcgtcttggtacacatggctgcagggggtgtgggtatggctgccgtgcagctgtgccgtacagtggagaatgtgacagtgttcggaacggcctcggccagcaagcacgaggcactgaaggagaatggggtcacacatcccatcgactatcacacgactgactacgtggatgagatcaagaagatttcccctaaaggagtggacattgtcatggaccctctgggtgggtcagatactgccaagggctacaacctcctgaaacccatgggcaaagtcgtcacctatggaatggccaacctgctgacgggccccaaacggaacctgatggccctggcccggacatggtggaatcagttcagcgtgacagctctgcagctgctgcaggccaaccgggctgtgtgtggcttccacctgggctacctggatggtgaggtggagctggtcagtggtgtggtggcccgcctcctggctctgtacaaccagggccacatcaagccccacattgactcagtctggcccttcgagaaggtggctgatgccatgaaacagatgcaggagaagaagaatgtgggcaaggtcctcctggttccagggccagagaaggagaactagggcaagtggctgtgagaccctagagaccagcgaagggagaagttgggaagctacgttctgttggccaccagacttgcatttcagcctctgtcataatgctctgccctccctcccccgaaggtctctgtggtgatgaccgctctcccctgcccctccccgcttcctgacctctgaagaggttgggaagtgaccatttggatgtctgggccctgccaaggcgacagggagggtcagagggaggccggctgcttcctgcccccaccctttccccgggcctgctgtgctgcttttgtgccaaggttagccagtcccccctgttgtgttccatgtgctttcacctctgcctcatctttcctcccgtccctgccccgccacctccccaaagaattgaaacgtcagctcaggatatggggccaatctctgtgagtccagcatgtacctgtctctccctagtgtcccttcagcctgggctgaccagtgcccgcctctgggcttgaccagttcccaatctcgtcctctgtccccaacttcttaagcacaattgggcttcttccatctccaggttttctgccattcttaaccaaggctgcctcttccaacagggcgggaatcagacctactcccctaggtcacaactctgggaaggatacagagcccccacccttcactgagttctctggatttgttctcagtgccttagcaacgaaaacctgtgcttgtgtgtgtgtggcggcggggagggaggatcctgtttcccacctccttctcctcccctgtactccccagtgccttccttgttctggtggagctggggtttctctcctccccagtcccacaacactgccaaaaatctgtgtatgtgccattgggtggggcagccccaagcctcctggggaggcagggcaaaaacaggtgccctcatcgtggtctgtgccatgtcccgtctctatggtggttgaggagaaaggcggggaagcttcctcagccttgcagatatgtgtggcatttactagccagagctctgaaaggcagtgctgtctgtttcttgtactgggaccaaagtaaaaatccaagcacattccccttgcagttaggggaggccctactgccttctcaaagcagagaggcagcttatcaaactcagcccaaaactctgtttacatgggtggggagatggagcagggaagtacagagtgggatggtcaggacctgggccattgcaaccaaaatggggacttcctgggtagggaggtcactccctctactcactgagctaggattagggagggttattgccccaaccattgcaatgggaggtggagggacaggctcagcctcctcattgtctaaatgaggcctaaatgtgtgaagtgcgatttctgcttttgtgtaccccaccaccccattaccacagctgcctttgtgtgtttgtgtcaataaaaagccaaaccctggg

SEQ ID NO: 34186 - DNA, 1007 bp, Homo sapiens
  source 1..1007: mol_type = unassigned DNA
tcctggtgtctgggttggggaggggtcatggccctgatttggatggcctgagggttagcatgagccagggcaggagaccgggtgatggtgttgaaccggtcagggatgtggcaggaagaggtgactgtgccctcggtccagaccttcctgattcctgaggccatgacctttgaggaagctgctgccttgctcgtcaattacattacagcctacatggtcctctttgacttcggcaacctacagcctggccacagcgtcttggtacacatggctgcagggggtgtgggtatggctgccgtgcagctgtgccgtacagtggagaatgtgacagtgttcggaacggcctcggccagcaagcacgaggcactgaaggagaatggggtcacacatcccatcgactatcacacgactgactacgtggatgagatcaagaagatttcccctaaaggagtggacattgtcatggaccctctgggtgggtcagatactgccaagggctacaacctcctgaaacccatgggcaaagtcgtcacctatggaatggccaacctgctgacgggccccaaacggaacctgatggccctggcccggacatggtggaatcagttcagcgtgacagctctgcagctgctgcaggccaaccgggctgtgtgtggcttccacctgggctacctggatggtgaggtggagctggtcagtggtgtggtggcccgcctcctggctctgtacaaccagggccacatcaagccccacattgactcagtctggcccttcgagaaggtggctgatgccatgaaacagatgcaggagaagaagaatgtgggcaaggtcctcctggttccagggccagagaaggagaactagggcaagtggctgtgagaccctagagaccagcgaagggagaagttgggaagctacgttctgttggccaccagacttgcatttcagcctctgtcataatgctctgccctccctcccccgaaggtctctgtggtgatgaccgctct

SEQ ID NO: 34187 - DNA, 2583 bp, Homo sapiens
  source 1..2583: mol_type = unassigned DNA
actctccatccagctgtgcgctctcgtcgggagtcccagccatgtccgacgagagagaggtagccgaggcagcgaccggggaagacgcctcttcgccgcctccgaaaaccgaggcagcgagcgacccccagcatcccgcggcctccgaaggggccgccgccgccgccgcctcgccgccactgctgcgctgcgtctgcgggcctgcgggctcaacttcgcagacctcatggctaggcaggggctgtacgaccgtctcccgcctctgcctgtcactccgggcatggagggcgcgggtgttgtgatcgcagtgggcgagggagtcagcgaccgcaaggcaggagaccgggtgatggtgttgaaccggtcagggatgtggcaggaagaggtgactgtgccctcggtccagaccttcctgattcctgaggccatgacctttgaggaagctgctgccttgctcgtcaattacattacagcctacatggtcctctttgacttcggcaacctacagcctggccacagcgtcttggtacacatggctgcagggggtgtgggtatggctgccgtgcagctgtgccgtacagtggagaatgtgacagtgttcggaacggcctcggccagcaagcacgaggcactgaaggagaatggggtcacacatcccatcgactatcacacgactgactacgtggatgagatcaagaagatttcccctaaaggagtggacattgtcatggaccctctgggtgggtcagatactgccaagggctacaacctcctgaaacccatgggcaaagtcgtcacctatggaatggccaacctgctgacgggccccaaacggaacctgatggccctggcccggacatggtggaatcagttcagcgtgacagctctgcagctgctgcaggccaaccgggctgtgtgtggcttccacctgggctacctggatggtgaggtggagctggtcagtggtgtggtggcccgcctcctggctctgtacaaccagggccacatcaagccccacattgactcagtctggcccttcgagaaggtggctgatgccatgaaacagatgcaggagaagaagaatgtgggcaaggtcctcctggttccagggccagagaaggagaactagggcaagtggctgtgagaccctagagaccagcgaagggagaagttgggaagctacgttctgttggccaccagacttgcatttcagcctctgtcataatgctctgccctccctcccccgaaggtctctgtggtgatgaccgctctcccctgcccctccccgcttcctgacctctgaagaggttgggaagtgaccatttggatgtctgggccctgccaaggcgacagggagggtcagagggaggccggctgcttcctgcccccaccctttccccgggcctgctgtgctgcttttgtgccaaggttagccagtcccccctgttgtgttccatgtgctttcacctctgcctcatctttcctcccgtccctgccccgccacctccccaaagaattgaaacgtcagctcaggatatggggccaatctctgtgagtccagcatgtacctgtctctccctagtgtcccttcagcctgggctgaccagtgcccgcctctgggcttgaccagttcccaatctcgtcctctgtccccaacttcttaagcacaattgggcttcttccatctccaggttttctgccattcttaaccaaggctgcctcttccaacagggcgggaatcagacctactcccctaggtcacaactctgggaaggatacagagcccccacccttcactgagttctctggatttgttctcagtgccttagcaacgaaaacctgtgcttgtgtgtgtgtggcggcggggagggaggatcctgtttcccacctccttctcctcccctgtactccccagtgccttccttgttctggtggagctggggtttctctcctccccagtcccacaacactgccaaaaatctgtgtatgtgccattgggtggggcagccccaagcctcctggggaggcagggcaaaaacaggtgccctcatcgtggtctgtgccatgtcccgtctctatggtggttgaggagaaaggcggggaagcttcctcagccttgcagatatgtgtggcatttactagccagagctctgaaaggcagtgctgtctgtttcttgtactgggaccaaagtaaaaatccaagcacattccccttgcagttaggggaggccctactgccttctcaaagcagagaggcagcttatcaaactcagcccaaaactctgtttacatgggtggggagatggagcagggaagtacagagtgggatggtcaggacctgggccattgcaaccaaaatggggacttcctgggtagggaggtcactccctctactcactgagctaggattagggagggttattgccccaaccattgcaatgggaggtggagggacaggctcagcctcctcattgtctaaatgaggcctaaatgtgtgaagtgcgatttctgcttttgtgtaccccaccaccccattaccacagctgcctttgtgtgtttgtgtcaataaaaagccaaaccctg

SEQ ID NO: 34188 - DNA, 4131 bp, Homo sapiens
  source 1..4131: mol_type = unassigned DNA
ccgttctgctctcgggggcaccttccggggttcctaagccgcggggcccctcgctgcccctcgaggccctttccctgacctaggctttggcctgggctactcgttccggagccgccatgtcgtccgacttcgaaggttacgagcaggacttcgcggtgctcactgcagagatcaccagcaagattgcgagggtcccacgactcccgcctgatgaaaagaaacagatggttgcaaatgtggagaaacagcttgaagaagcgaaagaactgcttgaacagatggatttggaagtccgagagataccaccccaaagtcgagggatgtacagcaacagaatgagaagctacaaacaagaaatgggaaaactcgaaacagattttaaaaggtcacggatcgcctacagtgacgaagtacggaatgagctcctgggggatgatgggaattcctcagagaaccagagggcacatctgctcgataacacagagaggctggaaaggtcatctcggagactagaggctggataccaaatagcagtggaaaccgagcaaattggtcaggagatgttggaaaaccttagtcatgacagagaaaagatacagcgagcacgtgaaagacttcgggaaacagatgctaatttgggaaaaagctccaggattctgacagggatgttgcgaagaatcatccagaaccgcatcctgctcgtcatcctagggatcatcgtggtcatcaccatcctgatggcgatcactttttctgtcagaagacactgatgtatctgctctcccttgataaacagcaacaacagcttgttctgagtaattaagacaaaatggtcacatgaatcattctgttgcgctgacaggccccaggtgaccctctctctccctcaccgccgttgggctgaagtgcaaagagtgtaaaaatattttctattcctgtttgcatgtgggttggtttccttttcgaggtttgtcttcacccagattcgttttttagaggggaaggtgaatgtttatttacctttttgctaatgtcatcaactagccaaaatagccccagtgacactcctagccctctggacgtgtcaagggccgtggtttgggagaggacatgatgagtcagtcacgagagcttctgtttgtcacccgcctcttgttgctgaaaagctcttctgtgatgtctgaggataaaaatgcagcaaaaagcaggggatggagtcagtgaccccgtccagcaagccagccctgttcctacacaggcctcatgaatatagtcatcaacctgcctgagtgctttcattgtaaaggtcggtatttaatgtcggttgtacaggaaattgacttagcactttccctgtttttctattgcataattttttttttaacccaaagatattttttttgctgagcctgcccagtattcactgttcacaactttgattactggctacaagaaatattttcttgccttccccaaatcccatactccccagaatctgctggcaaagtgagccctggtacaggatttaattgtgacctcgtcttccctgacctgtgtaagcatctctgtatcctttcggttttaatatctgcactgccaaaagcagtcctcatacttgcaaaaggtctgacaaggttctctccacatacattccagtatgtaaagagaccatgaatatttcagtaagagcaagaacatgactccatcagtgtgaaatttcaaatgtgattataaatatgggagagtcctataggagggtccaccagagataaacttcacggaaaacgttccctaacctcctttaaaagaatagaggatggcagattgttccaaaaggaatggcttgggtttttaactaacaaatgttagcaagcctttcttgaattcactatgtattcaaacttctaatatgctttgtgatttttttctttcatttctttctgtctgaggtaaccaggaattgcgttcaaaatgagctcatttgtgatcaggcttaaaagttgcccaagctgaggtcgtttccccccagtcacaaagcagaatgtttttctcaagacttcataggcacttactggtccgtactatctttggaatataattagaagctttgaatccttgaaaagcaaacctgttctcttcatcaaaaatgctaaccacctgtgcccgtggatcaatatcacctggatgtagtgcttgatatttttcccaactcagaagaaaaccattatggtttagagaggaaatgcagaatggcagaatccaccagagaaattgcacttatcgaaacaggccaaggcctgcatgtgttcggataaatcatttagtattgtgtaaataaagctgcagcctttacttcggagggatggtgtgggattttggccgagggaagcaggacagagaaggagcaggaagctatgctaattttcctgtcagcttaagggatccgtctcagcaagaatcttgtattctgataacggaatgctgtacgtgctgaccacatctaagaaccattaaaaagcaaggaaacaaacaaacaacccttttctcattccgacacacgaatagtcatcgagtattacaccagcccctctggtggcttccttcaaaactgttgatcttagctaaagtgtataaccagttaccagctgcacttcgcacggccatcccgtccacaatgcagcagactcttcccaaggccacctagcaagcaaggttgatcggatcatctaaactggccgcctcctgaatatttcactgaatcctggcgttcatgttgaagcagacaaaatgagaaaggaggagggcattgctcacctctcaatagcttttttcgttcaagttctatgtctttatcagctcttgcctgtgattttaccccaattcaaccttgggagtgggaagaatatgaacagataacccttggcctaacagctccatcaaacctccttgagagcaactacctaggccaggctagtgagtgctttgtgaggaagctggtcagaaggttccctcaactccttcctggtcctcctggacactgcagaaaagacttaggggatccccagcagaggccaattgctctccttccttccctgccccaccaggaaaggaataacgtccacagacttgaagcagatagtgaagtagatctgtgagaggttctaggtacttagtgtgtagactttgacgaatatttctcaagttgggagcccttgttaaaaatgatgtttaagggagtggttggggggaagatgaaggcatggaggaggaagaagagaaggaagcccttgccatataaaattcatgcagactaaacagtttccctgacagaataaataaagtggatgctaccccactccagaatcaaaagcaatttaattaaagtctcttaagttgtaaagagttttaaatgatccgtgttgaaggcgaatgcctgcaaatgcagtgggtctgacgtcagctgccgggcctgggctgggaggccatttgctattctgtttaaggcaggctggattgtcttattttggaaccagcttggtggggggtttgctttgctactgcttctgagccctgagcttcaaaggctgaaattaatggtgaacaaaattgtgcggctctggccatcccatgcggggcaagcccattgagggttatcattaagtaaagaaataaagagggggaaaaaagcctgcctgttccaaaaacctcatcagataatgacctcagtgattgggttttcattaccaaacagcatccagagattatcaacccatagaagaagggaggggaaaaaaaagaaagaaaggaaaagcaactgtctttctctccctctctttctcctttttttttgcacatcttttctttaaaactgtcagatcatttcagtatttcaaatccgaggaaaacagcctgcctgctgctgtatttgaagttgtaatggtgtcaaaaagtcacgactgactgacagccgtcagtcccagaggggctcattaaatcataaaaacttgacaaggaaataattgcgcattgccagcaacttggcgcctgtttagacgtttttattttctttcattattagtccccaccattacgttcattaacaaattgcattaaacaactgttaagggctaa

SEQ ID NO: 34189 - DNA, 1738 bp, Homo sapiens
  source 1..1738: mol_type = unassigned DNA
ccgttctgctctcgggggcaccttccggggttcctaagccgcggggcccctcgctgcccctcgaggccctttccctgacctaggctttggcctgggctactcgttccggagccgccatgtcgtccgacttcgaaggttacgagcaggacttcgcggtgctcactgcagagatcaccagcaagattgcgagggtcccacgactcccgcctgatgaaaagaaacagatggttgcaaatgtggagaaacagcttgaagaagcgaaagaactgcttgaacagatggatttggaagtccgagagataccaccccaaagtcgagggatgtacagcaacagaatgagaagctacaaacaagaaatgggaaaactcgaaacagattttaaaaggtcacggatcgcctacagtgacgaagtacggaatgagctcctgggggatgatgggaattcctcagagaaccagagggcacatctgctcgataacacagagaggctggaaaggtcatctcggagactagaggctggataccaaatagcagtggaaaccgagcaaattggtcaggagatgttggaaaaccttagtcatgacagagaaaagatacagcgagcacgtgaaagacttcgggaaacagatgctaatttgggaaaaagctccaggattctgacagggatgttgcgaaggggttgttctgtgaaaaaacaatgtaacctgtctctggccccaaaggcttgaaccagaaccagccagtggaaattactcaaacacgtattgtgccttcaatgagaagccttctcactgaaagagctgccctggacggaaaatgagtagtgagatgatgctggtggaagtatttatagatgcgcagtgcatgagtacttggcaaggatgctatcaaaggggaaactgacatcaaatgtgctgtggttctgggtgatttatctggtcccttcccatcccagagctttatgattctgtaataatcaagggagaaacccattacatagtggacaattttttttctttttttttctttttctttttttttttgagacagagtcttgccctgtcgcctggctggagtggagtggcacaatcttggctcactgcaacctccacctcccaggtccaagcgattctcttgcctcagcctcccaagtagctgggactacaggcacacaccaccacgcccagctaatttttgtatttctttttttttttttttgtagagatggagtttcaccatgttggccaggatggtctcgatctcttaaccttgtgagccaccgtgcccaaccctaacaattatttttaaaaggaggaatttaaatgagctgtggattattcattttgtcccataagaagataattaaaaaatgacaaaaatgaactgaacaaaaaagttctaacaaaataataaggctgaatttttaaagtctcttccgcatcttctgttccctgggatgccttagacggggtgtgcagtattttaggtacatcgtgagcaaggagcctgcattcccagggggcggcagggacagcatgtaaggtcttagtccagctctgtgatctgaaggcaaagcctctatgtgtgaaacacaggggtacctcaaaaatagaacaagagcactccatccatgtgcggatgactgtcaaggtcactgagacctacagtgatctggaaaattaaagctctctggccgcctttcctctcaggacatacttctggagatcaaaaaaaaaaa

SEQ ID NO: 34190 - DNA, 970 bp, Homo sapiens
  source 1..970: mol_type = unassigned DNA
agtaagttccagcgcagctagaccgcggggtagtcggcgcgaggcggagcttggcagttccgtccacttcagccgcagcgtccctcaccgggtgtctcgccgcagcctccggagaggaacagaccctcactctctctgtcagaaaaatgtctgctccagctcagccacctgctgaagggacagaagggactgccccaggtgggggtccccctggccctcctcctaacatgaccagtaacagacgactacagcaaacccaggcacaagtggaggaggtggtggacatcatacgtgtgaacgtggacaaggtcctggagagggaccagaagctgtcagagctggatgaccgagctgatgccttgcaggcaggagcatcacaatttgagagcagtgctgccaagctaaagaggaagtattggtggaaaaactgcaagatgatgatcatgctgggaagatggcagctcactcagtactgcctggtcatgtggagctttccttcctggaccaggcctgaagagggtcctgggggtggaccaaagtccaacttggtttcagtgcagtacccttttcgaaagtaaaaacttgttttttgtagttatttctaatctgttcgtccaggattttccgtgtctttggggatcttacaactttactttgttctccagaggcctggagaacacttagggattgtgaaaatagcaggacttgtttccatcctagaagcagtcccatgtgcttctagctggaaggagctttctcttctttacattttctacagcattctgtatgagggcaccaaataaatccatctagctggtagttttatctagccaaataatttaacctagctcccagttaattgttggcataaagagagagattgcctgttagttatagagaaacagtgagtcaagtgcttaatttgaaagtaacaagctcagaggaagccactccttgccctcgttaaaga

SEQ ID NO: 34191 - DNA, 3449 bp, Homo sapiens
  source 1..3449: mol_type = unassigned DNA
accacaaatgcctaacaaactgctgaagcgccctccgaagggacagacctcatctccaccccgccccgtccctccgccagactggagcgcaaactatggtcgcattgatcactgaaggatcctcacagcaaccgctcctttccggagtcggatgagaggagagttgtgactggcaattggcaggggcggggcgggctaggcctgtagcgctgggcgaccgtcctgggcatggattgggccgcggggttgtcaccgttatccgggaggcgtggtcagcactaataaaggcggaggccggcgcggcagctgcagtaagttccagcgcagctagaccgcggggtagtcggcgcgaggcggagcttggcagttccgtccacttcagccgcagcgtccctcaccgggtgtctcgccgcagcctccggagaggaacagaccctcactctctctgtcagaaaaatgtctgctccagctcagccacctgctgaagggacagaagggactgccccaggtgggggtccccctggccctcctcctaacatgaccagtaacagacgactacagcaaacccaggcacaagtggaggaggtggtggacatcatacgtgtgaacgtggacaaggtcctggagagggaccagaagctgtcagagctggatgaccgagctgatgccttgcaggcaggagcatcacaatttgagagcagtgctgccaagctaaagaggaagtattggtggaaaaactgcaagatgatgatcatgctgggagccatctgtgccatcatcgtggtagttattgtaagtaagtatcgctgaagttgctggtggggtgaagaggtgggaaggtcctggagtcttctccctgcctgcctgcctgcctggggagtggggctgctctgactgaggtatggagaccgctgctatgggatcgtcacctggttcgggacgggggaagggcagagacaagggatttctttgatggacaagccttccccctgcaacgcattgcagggagatggcgcctcctgttctgaggaagtggggctatgctgtgtgtcactggcttgggttggagggagaccatggggatggggcacttaacaatggagagacctgaatgtctggtaacttggtgtaattcaccctcttgttttctcctgtctctttctcttttccgtctgggacttcctgattcctgtgtccagtctacttttttacttgagaatgtaccaccccttccctgttgtccattgccatccacattcatgtcctctgccctctgtttgctctctcaacacacttccccacccaccgtcctccattccagcccaggcttctccatcacccattcctcctttttcgttgcgttcatttgcactctgtccctcaacactagaaatgctgctcgtggcacaatctaagtcattacccgaagagcaacagctggcgcctcctccctgcctgctttttctgtactctcaagttcccccaaagccccaaagagttggaggccaagggaaggggcagggaggggagtggctgaggcgaagtacccatgaagctgcccagacttgggaggagaagagtatcggtgcccatggtgacttctagaaaacctggccactggtaggagctagggaggggctgggaagatggcagctcactcagtactgcctggtcatgtggagctttccttcctggaccaggcctgaagagggtcctgggggtggaccaaagtccaacttggtttcagtgcagtacccttttcgaaagtaaaaacttgttttttgtagttatttctaatctgttcgtccaggattttccgtgtctttggggatcttacaactttactttgttctccagaggcctggagaacacttagggattgtgaaaatagcaggacttgtttccatcctagaagcagtcccatgtgcttctagctggaaggagctttctcttctttacattttctacagcattctgtatgagggcaccaaataaatccatctagctggtagttttatctagccaaataatttaacctagctcccagttaattgttggcataaagagagagattgcctgttagttatagagaaacagtgagtcaagtgcttaatttgaaagtaacaagctcagaggaagccactccttgccctcgttaaagagggtcctgttcctctcttcctgttgatgaaggagcgtgagggtgttagcagtgtgagatctttggacacccatggaatcctttcctccacaccacccgtgcacttgccaaagacagggatgaggcaagtggttcttcctggggcccggccgatcctcaggatgcagagaagtcatgtagacccaccagccccaccttggggggaggcgtgccagcctgtgtcaggtgtgcttgtgtattgctgtgctgtcatggggccctctccttgagagccgcctctctgttcttcctgtagtatattcccctttgaaccaccctttcctgtctgaattctactttgcctcctttctcttcctcctctttgcatggtttgtgtgtatagacagtggaacctgaggatgggatctgctcagcctatcttcggggcaattgctgagcttcaggatgggctattaatgtgggataagcccaggtgcaaggggaggagggcaggctgggaacagagcggagaatgcccatggccctttattccttcttccctcggtccacgaacaggaagaggctgaggccatgctgggcagggtctggatgcccactttccatgcagcagcatttcattgctcaaaaccatccttcctttcctttcgcccttgtttcccacattcccttcgtcctgcccaagggcgggactgaagagctggaagaaagcagtcagtaccctcccaacggcccccctcgaaggtctccactctcctctgggctcctccttgcctaatgcagggggtcaccgctggagaagaaccaccactgtcctcgatgtgtcccaagcctggagcgaatccgtcctcttggctctcccagccctatcacaggaatcattcctgggtttctgtccctctgaggctcaccaggtgtagttggccttgttctttgggggtattagcccttctactttctttctcacccaccctgtaccctcttctgtgtgtctctgctatccccctttcctcccaccacccatgtgcatgagcaaatgtgcaacaaaaccctgggactttgcagtcaaatgaagctgagcttcccacatcccgttcttcggtttgccatgagacgatgtggggtttccactgtgtgtctgtcatcacctctttgtctttttttcctaaccctgatctcatacttgtatagagtaataacaacagttgtacttccaccaaaggcatgtggcatatttaccaatgtcatgtattctgaacaaaggcaaaaaatacaaattcctaccattaaa

SEQ ID NO: 34192 - DNA, 1113 bp, Homo sapiens
  source 1..1113: mol_type = unassigned DNA
agtaagttccagcgcagctagaccgcggggtagtcggcgcgaggcggagcttggcagttccgtccacttcagccgcagcgtccctcaccgggtgtctcgccgcagcctccggagaggaacagaccctcactctctctgtcagaaaaatgtctgctccagctcagccacctgctgaagggacagaagggactgccccaggtgggggtccccctggccctcctcctaacatgaccagtaacagacgactacagcaaacccaggcacaagtggaggaggtggtggacatcatacgtgtgaacgtggacaaggtcctggagagggaccagaagctgtcagagctggatgaccgagctgatgccttgcaggcaggagcatcacaatttgagagcagtgctgccaagctaaagaggaagtattggtggaaaaactgcaagatgatgatcatgctgggagccatctgtgccatcatcgtggtagttattgtaatctacttttttacttgagaatgtaccaccccttccctgttgtccattgccatccacattcatgtcctctgccctctgtttgctctctcaacacacttccccacccaccgtcctccattccagcccaggcttctccatcacccattcctcctttttcgttgcgttcatttgcactctgtccctcaacactagaaatgctgctcgtggcacaatctaagtcattacccgaagagcaacagctggcgcctcctccctgcctgctttttctgtactctcaagttcccccaaagccccaaagagttggaggccaagggaaggggcagggaggggagtggctgaggcgaagtacccatgaagctgcccagacttgggaggagaagagtatcggtgcccatggtgacttctagaaaacctggccactggtaggagctagggaggggctgggaagatggcagctcactcagtactgcctggtcatgtggagctttccttcctggaccaggcctgaagagggtcctgggggtggaccaaagtccaacttggtttcagtgcagtacccttttcgaaagtaaaaacttgttttttgtagttatttctaatctgttcgtccaggattttccgtgtcttt

SEQ ID NO: 34193 - DNA, 1111 bp, Homo sapiens
  source 1..1111: mol_type = unassigned DNA
agtaagttccagcgcagctagaccgcggggtagtcggcgcgaggcggagcttggcagttccgtccacttcagccgcagcgtccctcaccgggtgtctcgccgcagcctccggagaggaacagaccctcactctctctgtcagaaaaatgtctgctccagctcagccacctgctgaagggacagaagggactgccccaggtgggggtccccctggccctcctcctaacatgaccagtaacagacgactacagcaaacccaggcacaagtggaggaggtggtggacatcatacgtgtgaacgtggacaaggtcctggagagggaccagaagctgtcagagctggatgaccgagctgatgccttgcaggcaggagcatcacaatttgagagcagtgctgccaagctaaagaggaagtattggtggaaaaactgcaagatgatgatcatgctgggagccatctgtgccatcatcgtggtagttattgtaatctacttttacttgagaatgtaccaccccttccctgttgtccattgccatccacattcatgtcctctgccctctgtttgctctctcaacacacttccccacccaccgtcctccattccagcccaggcttctccatcacccattcctcctttttcgttgcgttcatttgcactctgtccctcaacactagaaatgctgctcgtggcacaatctaagtcattacccgaagagcaacagctggcgcctcctccctgcctgctttttctgtactctcaagttcccccaaagccccaaagagttggaggccaagggaaggggcagggaggggagtggctgaggcgaagtacccatgaagctgcccagacttgggaggagaagagtatcggtgcccatggtgacttctagaaaacctggccactggtaggagctagggaggggctgggaagatggcagctcactcagtactgcctggtcatgtggagctttccttcctggaccaggcctgaagagggtcctgggggtggaccaaagtccaacttggtttcagtgcagtacccttttcgaaagtaaaaacttgttttttgtagttatttctaatctgttcgtccaggattttccgtgtcttt

SEQ ID NO: 34194 - DNA, 1068 bp, Homo sapiens
  source 1..1068: mol_type = unassigned DNA
gcggggtagtcggcgcgaggcggagcttggcagttccgtccacttcagccgcagcgtccctcaccgggtgtctcgccgcagcctccggagaggaacagaccctcactctctctgtcagaaaaatgtctgctccagctcagccacctgctgaagggacagaagggactgccccaggtgggggtccccctggccctcctcctaacatgaccagtaacagacgactacagcaaacccaggcacaagtggaggaggtggtggacatcatacgtgtgaacgtggacaaggtcctggagagggaccagaagctgtcagagctggatgaccgagctgatgccttgcaggcaggagcatcacaatttgagagcagtgctgccaagctaaagaggaagtattggtggaaaaactgcaagatgatgatcatgctgggagccatctgtgccatcatcgtggtagttattgtaaggcgggactgaagagctggaagaaagcagtcagtaccctcccaacggcccccctcgaaggtctccactctcctctgggctcctccttgcctaatgcagggggtcaccgctggagaagaaccaccactgtcctcgatgtgtcccaagcctggagcgaatccgtcctcttggctctcccagccctatcacaggaatcattcctgggtttctgtccctctgaggctcaccaggtgtagttggccttgttctttgggggtattagcccttctactttctttctcacccaccctgtaccctcttctgtgtgtctctgctatccccctttcctcccaccacccatgtgcatgagcaaatgtgcaacaaaaccctgggactttgcagtcaaatgaagctgagcttcccacatcccgttcttcggtttgccatgagacgatgtggggtttccactgtgtgtctgtcatcacctctttgtctttttttcctaaccctgatctcatacttgtatagagtaataacaacagttgtacttccaccaaaggcatgtggcatatttaccaatgtcatgtattctgaacaaaggcaaaaaatacaaattcctaccattaaa

SEQ ID NO: 34195 - DNA, 2153 bp, Homo sapiens
  source 1..2153: mol_type = unassigned DNA
atctttccgtcccgggcagccagcgccagtcggagccagcgcgagccgccgccgccatcactgccgctgccaagtcctccacccgctgcccccgccatgtctgctaccgctgccacggccccccctgctgccccggctggggagggtggtccccctgcaccccctccaaacctcaccagtaacaggagactgcagcagacccaggcccaggtggatgaggtggtggacatcatgagggtgaacgtggacaaggtcctggagcgagaccagaagctgtcggagctggacgaccgtgcagatgcactccaggcgggggcctcccagtttgaaacaagcgcagccaagctcaagcgcaaatactggtggaaaaacctcaagatgatgatcatcttgggagtgatttgcgccatcatcctcatcatcatcatagtttacttcagcacttaaatccccgaggagtctgccctgcctagagaagggcctctcccccaaccctcagccgttcctccacctctcagccatatctttcagcccccactcccctggatccgtgtgtgtgtgtgtccgtgtgtgtgtccccctgtaaatagccagctgttatttatacatatataatattatatatatttggtctgtttgtagttttattactagatgatttttccggttgtccttaacaccccttcctgaggttcccttcacccctctctcttgccttccttccctttccctttcttcctgactagccccaagtcccttcatttgcatctgctatgcaatagtccctctcctttccttcttcttccctcagatttagctgatccttcctcccaccctggccttcctttcctctttcctcctcactctccccgtcatgctccctctgccccgccctcaaaaaaaaaaaaaaaaaaaaaaaaacaacagcacctgtccaggcttccttaggtacatcttctttgtatccattgggaggctctgagactggccccacttggtcctaagaatcccaaggtctttgggagcgtccagcatgttaattagcgtatcattacatactgctatccctttccatttctttttgttccatcactcttctctcaacctgtgtttctttttttactgaggagttagtccccattagttcttgtatcacattttcatttgcacgacattactcgcaggtggtggggagcctgggcttttggggaaccaggctgctctggtccccagcattgcctcctcctagcccctctagtccagtttgcctcccttaccctcattttccaaacctcttgtaccctcctctccctcccccagctggtatgtaagtgtcttgaagttcagtatgttatgatggaccaataattctgccacttcgggtttctccctacattcctgctccccagttttcatgtggggtactcaactgacattcccatggggtttccctcccatctgcctgatccacctcctcctcccaccaggagagttgggggttggccacaattgatctcttgtgagaggggtggctaccagtgtgtgtgtgggggtcatcactgccttggggaggagtggggcagggcagagaatccccccaattcctgcctgaaatctctggcctcacccctgctgggggttggactgaaaaccctcctccccaatttggggggtgttgccccatcactgcccagctcctctgactgccccccctgaatttagggtgggggtactagtcactgccaatgtgtgtatgggacttgctggaaaacggggatgcttgcccctctccaggactattgagcccagagagagctgtcctctcattgggtgaactgattgaggaagggtctattgtctttttaaatggcacaattttaagggtttgagggtacagtcccttaacctgccacgggagggggcccccaaactttcttccccccacacttctggttttctgtgtggagggggagcagggatatctaagctgtggtgtgaaagggtaggagagatgctggaggtgggggtgctgtgttttagaccccccatattatcccagtgtcccctgcccccctcttcccccaccccatgcccccaattctgtggcgcatccagattgtgaaaatgtacaataaatgtgtaatgagtaacca

SEQ ID NO: 34196 - DNA, 2205 bp, Homo sapiens
  source 1..2205: mol_type = unassigned DNA
agtgacgtctttgccccgcgccgcgccgtcccacccatctccctggcctccggtcccaacttcgcttctctgctgaccctctctcgtcgccgctgccgccgccgcagctgccaaaatgtctacaggtccaactgctgccactggcagtaatcgaagacttcagcagacacaaaatcaagtagatgaggtggtggacataatgcgagttaacgtggacaaggttctggaaagagaccagaagctctctgagttagacgaccgtgcagacgcactgcaggcaggcgcttctcaatttgaaacgagcgcagccaagttgaagaggaaatattggtggaagaattgcaagatgtgggcaatcgggattactgttctggttatcttcatcatcatcatcatcgtgtgggttgtctcttcatgaagaaccagcggaactcaaaactgctgttcaagaaacctcttcaagacttttgacttagaacctgctatattatcaagcttacctactgttatctctaaaattttttttgtgttaatgtaaagttgaatttctaggaaacgtgcctttgttttttaatatgcactccaaattagaaggccggccccgtccacattttgcacagtgcctttacagatttacgtatgggctgatgaagaggccttcttaagttccagagtgctataatctagatgtaatgttgtcactaattaattgccattactcccagttagttacccttgtcatttggcattattttcagaaccacattttaaacctttgggtaatcagatttccaacttatgccttccagaaaaaaacactactgcctaacacaaatctgtgataacaacaggctgtgccttattttgataattttctgattccctagaagagaaccctctactttttgtaagcactactgactctcgctgtatttaagatgctggtgaagagcttttgctcttgcattagatttgaagatgtttacattgttgttattgttatgtatcacttgctaaaaatattgttttaatcagagataacctctttaaaaaaatttttaaagaactatggctatgaccaaagcttctattttgccaaaaagttaaataccgataaaatggccttaagtgtattcctgacagttaaattcagaaacgtgccaaatggaactcaaggtgccccttcagaattaaaatcattaccttgtgtgtgaaccttctacatcttcataggcctttcttccttttgaaaggctgtagacagtgtggctccccttctgattcagtattttgcatgggggttagagaaggtttgaggtagactctgaccgtctcataaaagagttctacccagcagttggcagattatcagctgtggactccagcatgtttctgataattatgcaagcaacaattctgtagcctcaagtaagaccacctgtgaacttgatcattatctggcccaaatatgaagataaactataactttggagtttgtttcctatttgtattcacattctgcttcctaaatcagttttctaaattatgcctgcaattaggcattggtcaggggtgaatggctcttttcacagagagtagccaaccagagacctttgctttgatatcatcaactgcagagaatgctgttgatgggaatgctggaagcagaaactttgtcatcggaaaaacttttcttgtatgcatgagactcaacatcaggatccacagcttaaagatgggaattcaggtatgaaagaaaacaggcaaggaggcactgagggagaaagacacagactttatcgctctgtggctcattgttactggaatattctaaaactcttgttcacatgctattatgacttataaagcagcaacagctgaggcgcaccaggacacagcttccatttctttaacgtctgttcccttaacatcgctgaaatgatttactgttgaagagatgccttgcggtgtggccagctgtgaggagaaagcagctggcagtgttaggacattagtccaccttcagcgcagggtctctggccgggtctgactcagaaaccttggtactcgccccttggccacagtgcccagacccatgtaacccactggctcctgcattaacccagaaatacctcgcttctatctgtgcacttagctgggaacttacccactgtaatcacctaaataaagtgtttataaacatga

SEQ ID NO: 34197 - DNA, 689 bp, Homo sapiens
  source 1..689: mol_type = unassigned DNA
gctcttcctccggggccgctggcactgcggccgctccgcaggcagagaagccgggagcgggcgaggcggcggcggcagcagcgatggcaggaatagagttggagcggtgccagcagcaggcgaacgaggtgacggaaattatgcgtaacaacttcggcaaggtcctggagcgtggtgtgaagctggccgaactgcagcagcgttcagaccaactcctggatatgagctcaaccttcaacaagactacacagaacctggcccagaagaagtgctgggagaacatccgttaccggatctgcgtggggctggtggtggttggtgtcctgctcatcatcctgattgtgctgctggtcgtctttctccctcagagcagtgacagcagtagtgccccacggacccaggatgcaggcattgcctcagggcctgggaactgacccagctggtcctgaaggagaagccaaatggctgcactggccgattctggtctccagaggaccttggtgtttgctctcccttgacccaccccagtgagtgccaaagggcagccccaacatgtgcacccctgcatttcctgtcatgccacagactggcccttgagggcagcctgctgtactggccatgctgggccagccccacctggagctcagtaaaaactgctgtttgattaaaagctggtatctgtgtgtgaa

SEQ ID NO: 34198 - DNA, 2496 bp, Homo sapiens
  source 1..2496: mol_type = unassigned DNA
ggcagttggcgaccctgcactgacccgcgtccctccgtcccgagcccgcgcgccctcagagggtgcccggacagactgaagccatggcgattctttttgctgttgttgccagggggaccactatccttgccaaacatgcttggtgtggaggaaacttcctggaggtgacagagcagattctggctaagataccttctgaaaataacaaactaacgtactcacatggcaattatttgtttcattacatctgccaagacaggattgtatatctttgtatcactgatgatgattttgaacgttcccgagcctttaattttctgaatgagataaagaagaggttccagactacttacggttcaagagcacagacagcacttccatatgccatgaatagcgagttctcaagtgtcttagctgcacagctgaagcatcactctgagaataagggcctagacaaagtgatggagactcaagcccaagtggatgaactgaaaggaatcatggtcagaaacatagtctgtcaccttcaaaactaccagcagaaatcttgctcgagccatgtgtatgaagaacctcaagctcactattatcatcatcatcgtatcaattgtgttcatctatatcattgtttcacctctctgtggtggatttacatggccaagctgtgtgaagaaataggaaagaagaagttaccattaaccaaggatatgagagaacaaggagttaaaagcaatccatgtgactcaagcctttcacatactgacagatggtatctgccagtctcttcaaccctcttctcactttttaaaatcttgttccatgcctccaggtttatctttgtcttatctaccagtttattcctgtgaacttcagattgaaccattcattgcagcagtagccttaaaaaggcttttgtttatttctttggtttgttaactagtgtcatctatttagagaaacatttttgtttttaattgctcaaagctgtcgccgctagtcttatgagctatctactaaaactatggagaaactttgtatgtgcacacaaaagtattcaagagacagtattgctaacatctcatcttaatgtcttttgttattgagaagttttaggtgcttcaaaacaatataaatggataatagttgttatttggggaattgtaatgatgttggtgctgcttccttctaagagctcagacaagtaaagtatgaaacattcttatttcagttagatggggaacattttgctagcccattagaagcacacagaattatccttgtcctcctaatattgactttcaggaataaagttcagtgtgctgatcattcacaatacagtggatagcttgatatcttctgttttcccattgcagttgatttgagaagatgaaggtttaaatattgttgaaagttgcagttttttaaatgtgttcctttttcttctgtgaatatttagggcaatcgtgtcgctaatagaatatgtagtagagggggtggggaggtaaattcctctgacttgccaaagaaaaagaagggaaccacagtggatatgctagcattttagctgtgcaaagggaggtagtgtgggaaaagtgtttccattctgggaaaagcccaaaccgaatacggtcagcagtcaactccagggtttgggcttgattcctgttgaataatagttttgagcattctttgtggttaaataaattcttaaatctgcctagttttgatgaattcttttgtgaaacttgaaagagaatagacagtatgacatatagaattaatacaaaacagtttaacaaccatttaactgcagtgtaagaaaattggactgtaatcatatcgctactggcatctgttatctagtatgcatttctggtgtgtatctgaaaggaagacattttctaccctagatccaattgcatttatttatcaataagtgccattaaattgaaattatattacattttacactttctcaatgaatgaacaaattagtctgtagaatctagccacctgtttagcctagtcatgtgccttgaacatatatgtgtcccataatctggctcatggtacctgttcttctatccaaacctttcaattcatgctacctgattcatttatttgacatagatcttaggcccacttgaactcttttcttgtttatctagcatagcacaaacgtttttccagtcttctttatcaacactaatgcctcttaattgcatcagtatttcctattggaaaatacatctgttccagaaaaacatttggcattcctgaataatttccaaatgtttttaatccaaagaaaaaggtttaaagcttatttccctttcttatacacacctgaataaaattgatgtgcatgttttagggatcaattacctaactgttccttggtctatttatgtataagaatgctttttaaagcacatgtctcattttaaatgacgcacaaactgaagatgttaataaaatttaagagtaatacaatga

SEQ ID NO: 34199 - DNA, 2646 bp, Homo sapiens
  source 1..2646: mol_type = unassigned DNA
tcccactcccaagaggccacgcgtagacggggcgcttcatgcggaagtcagcggcgtccggtcccagcctcctctgggagcgggcagttggcgaccctgcactgacccgcgtccctccgtcccgagcccgcgcgccctcagagggtgcccggacagactgaagccatggcgattctttttgctgttgttgccagggggaccactatccttgccaaacatgcttggtgtggaggaaacttcctggaggtgacagagcagattctggctaagataccttctgaaaataacaaactaacgtactcacatggcaattatttgtttcattacatctgccaagacaggattgtatatctttgtatcactgatgatgattttgaacgttcccgagcctttaattttctgaatgagataaagaagaggttccagactacttacggttcaagagcacagacagcacttccatatgccatgaatagcgagttctcaagtgtcttagctgcacagctgaagcatcactctgagaataagggcctagacaaagtgatggagactcaagcccaagtggatgaactgaaaggaatcatggtcagaaacatagatctggtagctcagcgaggagaaagattggaattattgattgacaaaacagaaaatcttgtggattcttctgtcaccttcaaaactaccagcagaaatcttgctcgagccatgtgtatgaagaacctcaagctcactattatcatcatcatcgtatcaattgtgttcatctatatcattgtttcacctctctgtggtggatttacatggccaagctgtgtgaagaaataggaaagaagaagttaccattaaccaaggatatgagagaacaaggagttaaaagcaatccatgtgactcaagcctttcacatactgacagatggtatctgccagtctcttcaaccctcttctcactttttaaaatcttgttccatgcctccaggtttatctttgtcttatctaccagtttattcctgtgaacttcagattgaaccattcattgcagcagtagccttaaaaaggcttttgtttatttctttggtttgttaactagtgtcatctatttagagaaacatttttgtttttaattgctcaaagctgtcgccgctagtcttatgagctatctactaaaactatggagaaactttgtatgtgcacacaaaagtattcaagagacagtattgctaacatctcatcttaatgtcttttgttattgagaagttttaggtgcttcaaaacaatataaatggataatagttgttatttggggaattgtaatgatgttggtgctgcttccttctaagagctcagacaagtaaagtatgaaacattcttatttcagttagatggggaacattttgctagcccattagaagcacacagaattatccttgtcctcctaatattgactttcaggaataaagttcagtgtgctgatcattcacaatacagtggatagcttgatatcttctgttttcccattgcagttgatttgagaagatgaaggtttaaatattgttgaaagttgcagttttttaaatgtgttcctttttcttctgtgaatatttagggcaatcgtgtcgctaatagaatatgtagtagagggggtggggaggtaaattcctctgacttgccaaagaaaaagaagggaaccacagtggatatgctagcattttagctgtgcaaagggaggtagtgtgggaaaagtgtttccattctgggaaaagcccaaaccgaatacggtcagcagtcaactccagggtttgggcttgattcctgttgaataatagttttgagcattctttgtggttaaataaattcttaaatctgcctagttttgatgaattcttttgtgaaacttgaaagagaatagacagtatgacatatagaattaatacaaaacagtttaacaaccatttaactgcagtgtaagaaaattggactgtaatcatatcgctactggcatctgttatctagtatgcatttctggtgtgtatctgaaaggaagacattttctaccctagatccaattgcatttatttatcaataagtgccattaaattgaaattatattacattttacactttctcaatgaatgaacaaattagtctgtagaatctagccacctgtttagcctagtcatgtgccttgaacatatatgtgtcccataatctggctcatggtacctgttcttctatccaaacctttcaattcatgctacctgattcatttatttgacatagatcttaggcccacttgaactcttttcttgtttatctagcatagcacaaacgtttttccagtcttctttatcaacactaatgcctcttaattgcatcagtatttcctattggaaaatacatctgttccagaaaaacatttggcattcctgaataatttccaaatgtttttaatccaaagaaaaaggtttaaagcttatttccctttcttatacacacctgaataaaattgatgtgcatgttttagggatcaattacctaactgttccttggtctatttatgtataagaatgctttttaaagcacatgtctcattttaaatgacgcacaaactgaagatgttaataaaatttaagagtaatacaatga

SEQ ID NO: 34200 - DNA, 658 bp, Homo sapiens
  source 1..658: mol_type = unassigned DNA
agttggcgaccctgcactgacccgcgtccctccgtcccgagcccgcgcgccctcagagggtgcccggacagactgaagccatggcgattctttttgctgttgttgccagggggaccactatccttgccaaacatgcttggtgtggaggaaacttcctggaggattttgaacgttcccgagcctttaattttctgaatgagataaagaagaggttccagactacttacggttcaagagcacagacagcacttccatatgccatgaatagcgagttctcaagtgtcttagctgcacagctgaagcatcactctgagaataagggcctagacaaagtgatggagactcaagcccaagtggatgaactgaaaggaatcatggtcagaaacatagatctggtagctcagcgaggagaaagattggaattattgattgacaaaacagaaaatcttgtggattcttctgtcaccttcaaaactaccagcagaaatcttgctcgagccatgtgtatgaagaacctcaagctcactattatcatcatcatcgtatcaattgtgttcatctatatcattgtttcacctctctgtggtggatttacatggccaagctgtgtgaagaaataggaaagaagaagttaccattaaccaaggatatgagagaa

SEQ ID NO: 34201 - DNA, 774 bp, Homo sapiens
  source 1..774: mol_type = unassigned DNA
ggaaacctgagttaggtgtggctggagcgactcgagatgcgaggtgggcgggggcaggctgaaagttggagcaagcaggaagtgaactgagggccaccctgggaggaagccgactaggcgaattcacttactgaccggcctgggctgctctgagacatggaggaagccagtgaaggtggaggaaatgatcgtgtgcggaacctgcaaagtgaggtggagggagttaagaatattatgacccagaatgtggagcggatcctggcccggggggaaaacttggaacatctccgcaacaagacagaggatctggaagccacatctgagcacttcaagacgacatcgcagaaggtggctcgaaaattctggtggaagaacgtgaagatgattgtccttatctgcgtgattgtttttatcatcatcctcttcattgtgctctttgccactggtgccttctcttaagtaacagggaacctctcccacctgcccttctcttcagggacaaccctccataaatgtgtgccaagagggtctcctttcctgtcttcctctacagagaatgctgctcggtcctcctacccctcttcccgaggccctgctgccatgttgtatgccccagaaggtaccttggtcccccggaaggagagaaaaaagagagatggactgtggctgcatttcttgggtccttagagtgggctggagagacctagagggcccagcatgtggctgggaaactgttggtggccagtgggtaataaagacctttcagtatcccta

SEQ ID NO: 34202 - DNA, 1215 bp, Homo sapiens
  source 1..1215: mol_type = unassigned DNA
ctagaggggcggaaagtaacaaggaggtgggggtacaaatcctcagctcctgcttccgcaagcactaacctgctctgaagtgagccaggcagctctggccatcttttcccagccacagaatcaggtgatggtccagaattaagagctgtcacctgtgtcattcactcacaatggaagaaatgaagaagactgccatccggctgcccaaaggcaaacagaagcctataaagacggaatggaattcccggtgtgtccttttcacctacttccaaggggacatcagcagcgtagtggatgaacacttctccagagctctgagcaatatcaagagcccccaggaattgaccccctcgagtcagagtgaaggtgtgatgctgaaaaacgatgatagcatgtctccaaatcagtggcgttactcgtctccatggacaaagccacaaccagaagtacctgtcacaaaccgtgccgccaactgcaacttgcatgtgcctggtcccatggctgtgaatcagttctcaccgtccctggctaggagggcctctgttcggcctggggagctgtggcatttctcctccctggcgggcaccagctccttagagcctggctactctcatcccttccccgctcggcacctggttccagagccccagcctgatgggaaacgtgagcctctcctaagtctcctccagcaagacagatgcctagcccgtcctcaggaatctgccgccagggagaatggcaaccctggccagatagctggaagcacagggttgctcttcaacctgcctcccggctcagttcactataagaaactatatgtatctcgtggatctgccagtaccagccttccaaatgaaactctttcagagttagagacacctgggaaatactcacttacaccaccaaaccactggggccacccacatcgatacctgcagcatctttagtcaagttggaggagaaagacaacacttggtctaagacacggcagcaagacatccctgcatattgttccagataaaaatgaaagctgctcacacccacttgcctccccaatctgttaaacagcttcgtgtctagtatgagctcagtacttgccctgtgaaaatcccagaagcccccgctgtcaatgttccccatccacaccctgcttgctcctgtgtaacagctcagatgatgaataataataaaactgtacttttttggatggtgcta

SEQ ID NO: 34203 - DNA, 794 bp, Homo sapiens
  source 1..794: mol_type = unassigned DNA
ctagaggggcggaaagtaacaaggaggtgggggtacaaatcctcagctcctgcttccgcaagcactaacctgctctgaagtgagccaggcagctctggccatcttttcccagccacagaatcaggtgatggtccagaattaagagctgtcacctgtgtcattcactcacaatggaagaaatgaagaagactgccatccggctgcccaaaggcaaacagaagcctataaagacggaatggaattcccggtgtgtccttttcacctacttccaaggggacatcagcagcgtagtggatgaacacttctccagagctctgagcaatatcaagagcccccaggaattgaccccctcgagtcagagtgaaggtgtgatgctgaaaaacgataagaaactatatgtatctcgtggatctgccagtaccagccttccaaatgaaactctttcagagttagagacacctgggaaatactcacttacaccaccaaaccactggggccacccacatcgatacctgcagcatctttagtcaagttggaggagaaagacaacacttggtctaagacacggcagcaagacatccctgcatattgttccagataaaaatgaaagctgctcacacccacttgcctccccaatctgttaaacagcttcgtgtctagtatgagctcagtacttgccctgtgaaaatcccagaagcccccgctgtcaatgttccccatccacaccctgcttgctcctgtgtaacagctcagatgatgaataataataaaactgtacttttttggatggtgct

SEQ ID NO: 34204 - DNA, 486 bp, Homo sapiens
  source 1..486: mol_type = unassigned DNA
catcagcagcgtagtggatgaacacttctccagagctctgagcaatatcaagagcccccaggaattgaccccctcgagtcagagtgaaggtgtgatgctgaaaaacgatgatagcatgtctccaaatcagtggcgttactcgtctccatggacaaagccacaaccagaagtacctgtcacaaaccgtgccgccaactgcaacttgcatgtgcctggtcccatggctgtgaatcagttctcaccgtccctggctaggagggcctctgttcggcctggggagctgtggcatttctcctccctggcgggcaccagctccttagagcctggctactctcatcccttccccgctcggcacctggttccagagccccagcctgatgggaaacataagaaactatatgtatctcgtggatctgccagtaccagccttccaaatgaaactctttcagagttagagacacctgggaaatactcacttacaccacc

SEQ ID NO: 34205 - DNA, 451 bp, Homo sapiens
  source 1..451: mol_type = unassigned DNA
accccctcgagtcagagtgaaggtgtgatgctgaaaaacgataagaaactatatgtatctcgtggatctgccagtaccagccttccaaatgaaactctttcagagttagagacacctgggaaatactcacttacaccaccaaaccactggggccacccacatcgatacctgcagcatctttagtcaagttggaggagaaagacaacacttggtctaagacacggcagcaagacatccctgcatattgttccagataaaaatgaaagctgctcacacccacttgcctccccaatctgttaaacagcttcgtgtctagtatgagctcagtacttgccctgtgaaaatcccagaagcccccgctgtcaatgttccccatccacaccctgcttgctcctgtgtaacagctcagatgatgaataataataaaactgtacttttttggatggtgcta

SEQ ID NO: 34206 - DNA, 2212 bp, Homo sapiens
  source 1..2212: mol_type = unassigned DNA
gcggtcgggagtaaaatcgcaggagtgggagggtagcgagccagctggattccgagccgcggagcgcgctggctttgctccgcctgatgactccagagcgcgggtccaagcgccgcccatgcagcacccctgagctccggggaaggagagttaatgaaaaaacacttaaccgtctccgctgcggagagtcatgagctgtctggatgttatgtaccaagtctatggtcctccgcagccctacttcgcagccgcctacaccccctaccaccagaaactagcctattattccaaaatgcaggaagcgcaggagtgcaatgccagccccagcagcagtggcagcggcagctcctcattttccagccaaaccccagccagtataaaagaggaagaaggcagcccagagaaagagcgcccaccagaggcagagtacatcaactcccgctgcgtcctcttcacttatttccagggggacatcagctccgtggtggatgaacatttcagcagggccctgagccaacccagcagctactctcctagctgtaccagcagcaaagcaccaaggagctctgggccctggcgagactgctccttcccgatgagccagcgcagcttccccgcctccttctggaatagcgcgtaccaggcgccagtgcccccgccgctgggcagccctctggccaccgcgcactcggagctgcccttcgccgccgccgacccctactcgcccgccgcgctgcatggccacctgcaccagggcgccacggagccctggcaccacgcgcacccgcaccacgcgcacccgcatcacccctacgccctgggcggcgccctcggcgcccaggccgccccctacccgcgccccgccgccgtgcacgaagtctacgcgccgcacttcgacccgcgctatgggccgctgctgatgccagccgcctcggggcgcccggcccgcctcgcaaccgccccggcgcccgcgcccggcagtcctccctgcgagctctccggcaaaggcgagccggcgggcgccgcgtgggccgggcccgggggacccttcgcgagcccctcgggggacgtggcccagggtctgggcctcagcgtggactcagctcgtcgttattccctctgtggtgcatccctcctgagctgatctgctgacccagggtttccccttccccttcccttctgaccagccttggaggctcagcatctgtgcctctcactccgtggatgaggacatgggggaaggcagagacttcagacttctcagtgtgttgggaaaaccaaaaaccacaactacagaaattcatctaaaaataagtcctgctgctgaaagagcaaatccaaagactgagttatgtttaatgacttttggccgaatcactggaaatatctgtggtgagattgctgagtcaggtgatgtgatatcataagctttcttggaacgggggaaagaaaatgaaactttttggtgtgaatattttttatgctgatgtgaattattttgttaggtagtgtgattatagcactactactgtcagattttaaattgtatgtgtacttgcatctaagactgtggtagagaagtaaagagaagtcaattccttcttcctcacctctcagcctccagatcccttcctgcccatcccttccctacaatgcccactccagacgcaaagatacacttttttcctttggactgtgaacatggaagcctcagcctgaatgtgagtggcaagtggcttatctggagccacctgcccaagtcttactaaaatgcagctgttgttagacaactgttgaaaactccagaaatacatcacccaaggtggcagttctcagtatttggcagaacaattgcaattgcactgggtatattatatatatatatgtatgcatatatatcatattttttacaaggaacattttatgatgaaagaagaaacccttctctgccttctctcccacgaattctgtccctgtatcctctggatgtaaaaagcaaggagagaccccaactgtctccatggagaagaactaggaatcaccacaaggggaagaaatgtacatgaagtctccattacctcgaatttttttctcagtctcactggttgtgatttggtcactttagtgttgggacaggggaaagggtctgtgcgtgggcaaagctgaaggtgatgaggaagaagagacgaacattaaagatgtctatttacta

SEQ ID NO: 34207 - DNA, 1709 bp, Homo sapiens
  source 1..1709: mol_type = unassigned DNA
gcttctgccctggagcgcggtcgggagtaaaatcgcaggagtgggagggtagcgagccagctggattccgagccgcggagcgcgctggctttgctccgcctgatgactccagagcgcgggtccaagcgccgcccatgcagcacccctgagctccggggaaggagagttaatgaaaaaacacttaaccgtctccgctgcggagagtcatgagctgtctggatgttatgtaccaagtctatggtcctccgcagccctacttcgcagccgcctacaccccctaccaccagaaactagcctattattccaaaatgcaggaagcgcaggagtgcaatgccagccccagcagcagtggcagcggcagctcctcattttccagccaaaccccagccagtataaaagaggaagaaggcagcccagagaaagagcgcccaccagaggcagagtacatcaactcccgctgcgtcctcttcacttatttccagggggacatcagctccgtggtggatgaacatttcagcagggccctgagccaacccagcagctactctcctagctgtaccagcagcaaagcaccaaggagctctgggccctggcgagctcgtcgttattccctctgtggtgcatccctcctgagctgatctgctgacccagggtttccccttccccttcccttctgaccagccttggaggctcagcatctgtgcctctcactccgtggatgaggacatgggggaaggcagagacttcagacttctcagtgtgttgggaaaaccaaaaaccacaactacagaaattcatctaaaaataagtcctgctgctgaaagagcaaatccaaagactgagttatgtttaatgacttttggccgaatcactggaaatatctgtggtgagattgctgagtcaggtgatgtgatatcataagctttcttggaacgggggaaagaaaatgaaactttttggtgtgaatattttttatgctgatgtgaattattttgttaggtagtgtgattatagcactactactgtcagattttaaattgtatgtgtacttgcatctaagactgtggtagagaagtaaagagaagtcaattccttcttcctcacctctcagcctccagatcccttcctgcccatcccttccctacaatgcccactccagacgcaaagatacacttttttcctttggactgtgaacatggaagcctcagcctgaatgtgagtggcaagtggcttatctggagccacctgcccaagtcttactaaaatgcagctgttgttagacaactgttgaaaactccagaaatacatcacccaaggtggcagttctcagtatttggcagaacaattgcaattgcactgggtatattatatatatatatgtatgcatatatatcatattttttacaaggaacattttatgatgaaagaagaaacccttctctgccttctctcccacgaattctgtccctgtatcctctggatgtaaaaagcaaggagagaccccaactgtctccatggagaagaactaggaatcaccacaaggggaagaaatgtacatgaagtctccattacctcgaatttttttctcagtctcactggttgtgatttggtcactttagtgttgggacaggggaaagggtctgtgcgtgggcaaagctgaaggtgatgaggaagaagagacgaacattaaagatgtctatttactatga

SEQ ID NO: 34208 - DNA, 2475 bp, Homo sapiens
  source 1..2475: mol_type = unassigned DNA
ggctgcccgacccgggcctgggctgtggctgtgactggcgctgccgtgggcgccgcagccctcgcgggagccggacgcggtaatgccccagcggcgcagcgggcggctgcgtccctgagccgctatataagcgcggcagggaacatccggaggggctgaagatgaaggtgcccgcgcatgggcccccgctgattgccagtccctcccgaccccgcgccccgcgcggagcccgaggccgccgaggacccgccttcgccgcagtagcagctggagcagcgacagaggcggcagctgcggcggcggcggcgcccgcgcccctcgcgccagcgcgtagagcggcggcggcagctcgggggccgccactgccccggctgccatgagttgtgcggaggtgatgtatcacccccagccttatggagcgtcccagtatctgcccaaccccatggcagcgacaacctgccccacagcctactatcagccggcgccccaacctggccagcagaagaagttagcggtattcagcaagatgcaggactctctggaagtcacccttcccagcaaacaagaggaggaggatgaggaggaggaggaggaggagaaagaccagcctgccgagatggagtaccttaactctcgctgtgtccttttcacttatttccagggagacattgggtcagtagtggatgaacacttctcaagagctttgggccaagccatcaccctccatccagaatctgccatttcaaaaagcaagatggggctaacccccctatggcgagacagctcagctctctcaagccagcggaatagtttcccaacttccttttggaccagctcttaccagcccccacctgcaccttgtttggggggagttcatcctgacttccaggtcactggaccccctggcaccttttctgcagctgatcccagtccttggccgggacacaacctgcatcagactggcccagcccctccccctgctgtgtctgagtcctggccttatcctttgacatctcaggtgagcccatcctacagccatatgcatgacgtgtacatgcggcaccaccaccctcatgcccacatgcaccaccgccaccgccaccatcatcaccatcaccaccctcctgctggctctgccctggatccatcctatgggcctctgctgatgccttcagtgcatgcggccaggattcctgctccccagtgtgacatcacaaagacagaaccaactacagtcacctctgctacctcagcatgggctggagcctttcatggaacagtagacatagtgcccagcgtgggattcgatacaggctggagtgcaatggcgagatcttgactcactgcaacctctgcctcccgagttcaaccaattgtcctgcctcagccacctgagtagctggaattacaggcatctgccaccacgcccggctaattttttgtatttttagtagatagtcactattttgaatagtgaaggctggcttccctattttgaatagtgaaggctggcttccctattttgaatagtgaaggctggcttccctattttggccaggctggtctcaaactcctgacctcgtgatccacctgcctcggactcccaaggtgctgggattacaggtgtgagccactgtgtccagccctcatgtacaaatttttaagtaaatgtgtgtttaattctcttggaaatatatctaggagtagaactgtggggttaagagaacctcactttttattttatgtatttctatattttttgaatttttttcaaagagcatatatatgcaatttttaaaatatttaaatttaaatttttgttttttaaatttttttttagtatttaaattgttaagattcattacaacatattatagtagagtttgaggtttggtaggcaaaactgccataggaatgaagtaaggtggtccattttttccgaagggctgagtggtggtgaggacagtgaggtgcctctggcacaaaatttaaaaggatccatactgtgagggctgtgcaagtgtatgccaccccatattttgcacccagggctccttattcctctaacctctgtcttggtgttgctttgctgtcatgcgagctcactcttactttttgctccctctgttgaacaggtattacatacaggtaccttgaaatgatcagtatggtatgatcataagtcatttgtatttgccctccacgtgaaaaatgctcatctttaccaagaggctgttatcacaaatctcacattaggctttttccctttcctttatcagtctttaaactgagtttcatgggttccataggaaaaatactcagaatgtgataataagggcttaattgaaaaaagaaaagatctattatcaaatgaatttatttacattgcctaccatatacctcttagagatcacagttccctatagcatataaaatgttttatatattcttcagtaaaaaagcattttaaattgt

SEQ ID NO: 34209 - DNA, 10400 bp, Homo sapiens
  source 1..10400: mol_type = unassigned DNA
cgggcctgggctgtggctgtgactggcgctgccgtgggcgccgcagccctcgcgggagccggacgcggtaatgccccagcggcgcagcgggcggctgcgtccctgagccgctatataagcgcggcagggaacatccggaggggctgaagatgaaggtgcccgcgcatgggcccccgctgattgccagtccctcccgaccccgcgccccgcgcggagcccgaggccgccgaggacccgccttcgccgcagtagcagctggagcagcgacagaggcggcagctgcggcggcggcggcgcccgcgcccctcgcgccagcgcgtagagcggcggcggcagctcgggggccgccactgccccggctgccatgagttgtgcggaggtgatgtatcacccccagccttatggagcgtcccagtatctgcccaaccccatggcagcgacaacctgccccacagcctactatcagccggcgccccaacctggccagcagaagaagttagcggtattcagcaagatgcaggactctctggaagtcacccttcccagcaaacaagaggaggaggatgaggaggaggaggaggaggagaaagaccagcctgccgagatggagtaccttaactctcgctgtgtccttttcacttatttccagggagacattgggtcagtagtggatgaacacttctcaagagctttgggccaagccatcaccctccatccagaatctgccatttcaaaaagcaagatggggctaacccccctatggcgagacagctcagctctctcaagccagcggaatagtttcccaacttccttttggaccagctcttaccagcccccacctgcaccttgtttggggggagttcatcctgacttccaggtcactggaccccctggcaccttttctgcagctgatcccagtccttggccgggacacaacctgcatcagactggcccagcccctccccctgctgtgtctgagtcctggccttatcctttgacatctcaggtgagcccatcctacagccatatgcatgacgtgtacatgcggcaccaccaccctcatgcccacatgcaccaccgccaccgccaccatcatcaccatcaccaccctcctgctggctctgccctggatccatcctatgggcctctgctgatgccttcagtgcatgcggccaggattcctgctccccagtgtgacatcacaaagacagaaccaactacagtcacctctgctacctcagcatgggctggagcctttcatggaacagtagacatagtgcccagcgtgggattcgatacaggtctacagcatcaagacaagagtaaggaatcaccgtggtactgaaacacacaatcttagtgagttaagttgcagcataaatccaagggcccactgggaaaagatactgtcgggtttttccattcagcaataggacacgaaaggcatagaaggagaagacaaagtgtcacgcagttgactggttttcggcctttcttgagaaagcaaagtgggtcccagacattgaagaaaagcatttttatttgtttatttcctcatctgagcctttgccaactgtgcaactctctccttttgttatcttgcttttatcaatatatagctaagtttttgtttcattttgatttttttttttagccaaccaccttgtcaggaaaggatgaaccacacattaaaatgttcattctttcaggaatacaagtttgtagctctatgtgcatctatttttgtagaaatacaaaaagtttggtttagcattgatgggctatttttgagggatgtattttttttaaaattgtaaaaattgttgagttctgtttaaagaacttgctctcagagaagcactggcaaaaatgtttaaaatgcttatctctaagatgtctattatatgctctgtctgtgctttctaggttacctcaaatgttttgtttttttccttcttacaaaagtagctataccgtagtcaaaccaatgcagtattgtttttacattgaatctcagtaaagatttaattccatgctagctcaattagttttgaattatatgtatagcttgaaaagtttttttttaatgactgtgctaaagaaatgatattttattgctttgatttctcccaaagaataacttggaggttgactaataagaaagttggcataaactttcaatcaaatgaagagtttgcctagaggagactaattctctttctagcccatccaaatttgataaatggaaccagaggttatatacaactacaaggaaaaaaatgcatttaaccatgccacctatgagtgccagtgacttattttacttgtttttaattattcattcatggcaatttaaaaagtcatattttaagtgggatttgtttttcctgaagggcatttgaaggaacaatatctgggaaggtactagagaaattacaaagcccgagctctttcttataatgccacctatccctgtaagctaaacaaacaaacaaacaaacaaacaaacagttctatatataatagtttcaacacagaacttaacaagtctctttttttgtttgtttaaatctggctttacttgatttaattcctttttagaaagaaatttagggcaaaataaagtgtatattaggatttaaatttatgccacaatttaaaaataaaaccagaggttatatacaatttaaattgggctaaaaattaaaaatttgaggatttaacttgatatagctctcaggatctaaataaagtttaaattatcattaagacactgctaggagaagattaagattatgaaagtaacagttattgatactgctggacttcaaaggcaaagttcatttcttccattaactgcttccagagatgtcatgtaaaaaagttagtgtattagagaagttttttagctttataaagaggttttttcaaatttctcccatttttctctccacccacataaaatagtatgttcagtgaaatgccactttctatctttaattgttcgtatcatatatgcgaactttttagacatgaacatgacatgttcagctaggcagagttctcatagataattttcaaatattttccttggctgtaatttatgtattcatttatatcctatccgtcttttgagcttcagatctatatactcttttgtactctcatcactccgcactttgctgtttcttacctagactctcttttacacaatatgcacatttttaccattgtggggtccaaatttaagataccttccactcactaataatatgaacttatatttcctgggagtagccaggttaaattttctatactttggtccataatttgatttgatatgattgtttcatttataatttgcccaaatacatggagcacaaaatttagtgaatttataaatctggatttgccttgtgtccttctgagttttcaaaggcaagtattcaacagtccctgtgtgatgactgacagggttatttgcctcatccacatccaccttcggaatacattaacttcctttgtaatttatttgaaagtagtgttaaactcattcagatcattcagttggattttcccaatgaagaggaaaaggaaagtagttattcctagctccatttcttattttccaccaaatttaattgaagggcattaattagatgtcttcaccctgaatttagactttgctctgtgttctcccggtaactgtcagacaaaaagtttattggctctgaggaactgagaaatgttgggaacctggtttctgctgtacacaggaaagatttgtaagtgagctctctctttgaaaacaggacccaggctgggcacagcagctcatgcctgtaatcctagtattataggaggcagaggctcgggaggattgcttgagcccaggagttcaagatcagcctaggcaacatagggagaccctatccctacaaaaaatttctgaaaaattacctgggcattgtggggcacacctgttgtcccagctactctggaggctgagtccggaggaacgtttgagcctgggagtttgagtttgcagcttgcagtgagctgtgattgcaccactgtactccagcttgggcaacagagcaagatcctgtctcaaaaggaaaaagaaaacaggacctaggtgtttggggtacactgccacccagggagtggatcaaaaatatacatagaaagagaatgagcatgtctctataattgtcttctaggaccatattgctgttagaagtcctaaaagaggatgggttgtaatttagcataatattctgaattcattccaagtttaaaatcctgtcattctctggctcttcttttttcacatcaaaatgatgctgttggacttagaggcttccgaactgttttattgagggctactatctgcctccacaattttattaaaaccactccacctttagacaaaggtgacttttgtctgattttacaaatcagattttattcaagctttctaaatatctgtgaagtagaccctagaaaattgtctcgtttattttaaatagaatctatgcttccaccaataaaccatcgggagctaagaaacaacataatgttgacaaatcaggaacctaacagattattttgtctctcattattaatttgaaagagcctctaaacttttgagaaatcaatgtgtcttcttaagaaagttaagcaccctctcttaactttcccctctatttgctctcctttttctttcttcttaagagtatttatattattttgttaagcaaaaatggctaagattgctctaaaatttgcaaaatgaggagtggattgcaaataattgagggatttatttctttaactttataagactttaaaaaaaaaacccaaattctaagcactgacatgaaagttgcctttgagaagcttgttattcattatacaaaaagtatttgcccattcctattctaagatttgcagaatatgtcaccctatctagcttttgagtttgctatctggtttaatgttgtatttataatttaaagtggaaatcagaaactgtttcaagaacctgtattctattccttactgagtgtcccttctttaaatagtgtttgctgaattaagccgatgggggcagtggcgttaagtggtggaaaaaggaaagtatatatgttagagttttgaatgagggataaatagaaagcagaatgaattaatggaaaagaactcggctgttaggccattctctaaattctagtttagccaaaagtttatgtgtggtttggggcttcatttatttatctcatgagtaaaatggaataatacctaacaggcaggctctggaagttggaaatcacatacacacacacacacacacagacacacacacacacgatcaatcatgtagctcatattagatgttcaataaataacagctactacagatgcctatcagttgagtaagtagttcattaaattgagctcccaaaggtctcttctcttcacatccatatccgtttctgcagcaatcaaatagatacatgattgtttttctgtaagaaattactgcaaagagaatctttttctcctactaactgttccttctacctggtataggagataaatgtacgtttcttaattagctgactttttagtatgtcatttctgaaggaaaaataaattaaccttaaagtggcatgtaggtccaattcagttttcctacatgttccaaaattttatttaaattactgtgtccaaaattatgaggacagtgtcattcattcaccatagtttatatttttagttatatatcaaacttccttggcacctaggataagaacatttcttttgaagttatccaatttttttttatttttacttgacttgaaggaaagttggaaaatatggtggaaaaaatcttccgcattaaaagggggaaaaacacaaccatttacgatctcagtcagcagatttactctactcaaggaaaaaaagaaacaatcttattggaagcagatgttgacactgtgtcagttattgaagacggaaggagttcacttgagccattgcagttacaaaggggtattgatggcagtttggattcctgattgatcacctttgcagccaagggaaagacagcagaaactgtatgggatcagaaatgaaatcagcctgccagtttaatggagaggctcctagaaactcattttttttctttcctgtaagataaaagacatctttcagaataagaaaggcttgtttgagagagaaattacagtttattctctgaaaatatttaaaggccaaagtgccctttaaatctattattaaagcattgaaactgttattaaaatcattatagaaaaattaggtaaaaattttagcctaactttcaacatccattcaaaaacgaatgttgaaaacaaacatataacctataaaaaagtgaatggctctggcaagtgggggcatgggtggagtccataaggaaacctcagtctcaataacttcaaaatgttacttttcatggtaacttggtcatggagattggtcacagcacagacatttagaattttttagcaggttttttttttcttttgaatcttgtagtgctctctgggaattgcaccatgtacacttttacaacctacagaaatcgtcattattgttaaagtatctcaacttttctatttcttttattgtctattgtgcttttttgtttaaaaatacttttatagttttaaagtattggtcaaagtagtattctcttgaagttctagtcaatttaatttgatccaataagtttttctgaatctcctttttaagttccaagaaattctattataaataagtgtacttttaccaattccattgtataagcaaacagacaccttttagaaaaggataagtaatcatcaatttgtttttttaaaaaaaaaaacaatttctagactactaaatttggcataagaataattcttttaaaatgcaacatactttaattagtttttttggtatatgcataagatgtgaactttcctattgatatcactttatattaatagagatgtacatttctttctatgccgtggctagagcaaaagttaataatgattatttacacaattgatttaatttcttaggatatgtataatattggatattatatctgatttaaaaatactattccatacattttttttttcaggagataaaacatagggaaaggttttcatgtgaattctttgtatcactttgaagtacatatatttaaagggaagatggatacaatttgtttttattatataaatctaggtaaggtgaaatgcttttgtcaacaaaaatacagtgtagtgaattttatatttgtcacttgattaggtaaactgaaaactaacaatagaaatattattttactgcattgaaataccatgaactttcagacttgttagttctacaagaagttgtgctaccttaattttgtgtttccagaaataaaaattaaccttagttatgctgtcatttttaactaataaaaaaagtataattcataaaacttttggctttataagataattataaaattatatatttttttctgtttttgtggggttgggaaaacattttcttatttctattcactcttcaaatgcaggtctcataatatgtgtcaatgatataagatgatggaagactttgtaataaaaacatatgtcattatcttcaatttgttcaataaataatttaatgtgaattgaatgtttgtattttaacatagcatttggatttggtctgcatttcttgagaatttaaagctctttttgtttcctccttattcaattaagcatcttataaatattttggaaattacaacatcttaggtgttattaattaagaagttaatttctagggccaagaagtctatatgttacagcaaggaatagattataaaatacatgtttataatggaaaagaaaatgaaatggggtatattaattacataacagcaagagtcttgagaattttataatacaatgcttctaaggatattggttgaccaaggtgtattttattgtttttacatttgttgacagggactctgccataagtagtatgaaaaaacaaacaaaaacttttctacgattcattaacattgaaaagagaattccaagaccttgtattctgaagaaagctagagtttctctaagtgggccttcaattttcttattacacgtatctttaatgtgaaagtactaaagtctgaaaatcagcatttaaataatagactttccagcattacagatgaaataatttggcgcaggctttttaactgtctaccatatttagaatgtggtgtcaaaatgagatttttagaactgctgtaaaatattactacattactacaacgataacggcctaaaacaacacaaatttattatcttacagctctgtcagtcagacattcagcaaagatcttagtcttggtgggctacagaatgtaggaggcatttcctggatgcttccaagagagaatcttgctgttccctgcttctagagtcctttgcttagtttccttccatcttcaaatccagcaacctggtcaagaccttctcacatgacatcactgacttcctcttcttcctctcccttacatatttaaggactcatgtgattacaatagctgcatctgtgtaatccagaataatctcttcatctcaaggtttttgttctgttttgtttttttgttttgttttgttttgttttgttttgatggagtcttgctctgtcgtcaggctggagtgcagtggcgcgatctcggctcactccaacctccacctcccgggttcaaaggattcccctgcctcagcctctcgagtagctgggactacagatgcgtgctaccacacaaggctaatattttgtattttagtagagacgggatttcaccatgttggccaggatggtctccgtctcctgacctcgtgatctgcctgccttggcctcccaaagtgttgggattacaggcataagccattgcgccatgctcaaggttcttaattacatctttaaaggccctttttccatgtacagtaacatattcaatggttctggggattaggacttggagccattattctacctacaacaattagtattggacttccatcattttctatcactcttgtaatcgagaaggactatttcactgggagtagcaagtcataatgtttgcgttggcatttgtgtgggggtttatcttcattcattaaataattgcatgtaaagaaaattcctgtcactatttcaaatgtttcatgtagttattatagtgcttcagaatccaaagggttatgtgttacttatgtaagatgagcagtctagggggtggagaacaggtcatctagtgcagattcttcctagctgaagtgtgttttctctggggacaaccaagtaggatttaattgttttgcttccttttttgggaacttagacccatcttgcgatgtcctaagtctccaagcatcttatttgacctgcttatacacatttgactaaatagctaaatatgaccacattgacgtggtaaagctttaacacttttgtccagattgaatcactccatctgctatcagttaagcagtggaaaactgttatggaaaagcaaacatgttttgatagatttaatgtgtaaagaaggtatccatactctggaatgctgctgatcaataaatgagctgcaagactttgttcgaaacaacactcaagcacaactgttttactttccataccaagtttggctgtgactgaatgaagaacatcagcattgatctttgctttgcacttgtacaagagactatttgcagagagccaaatatagcaacagaggatttaatatcttgccaaaaaatacaaaatctgttcccctttaagcatgacactctatcctttcttgtggatcttgctaaaaggaaaatatagctttaaactcccctattccttctgttgaaagcttaagaatctttttcaaatgagctatgtatggttttgtggtattttatgtttccaaaagaaaatggctacatgaaaaatctgtccagtgttatcatttttcttacaaaaaatacttctagttatggttgtattaattaatttgattgtgataatgattacacaatgtttacctatatcaaatcatcatatcgtataccttaaatatatataacttttatgtgtcaattataactcagtaagtctgggaaaatatcgttaagtcaaagattagagtcaacagaaataaagaaaaatcatactttgataacttcaggactaatcaaggatcaatgggtgacatgatatcatgctatgtgccattttgtgttaaacaaattacaccaacaataaaaaaaattggcttcaatcaa

SEQ ID NO: 34210 - DNA, 2147 bp, Homo sapiens
  source 1..2147: mol_type = unassigned DNA
gagagcgaacgaggcagccgccggcggagaggagggagcgggcgagggccgggcaggaggagcgggcgcggcgcgggcgaggctgggacccgagcgcgctcacttcgccgcaaagtgccaacttcccctggagtgccgggcgcgcaccgtccgggcgcgggggaaagaaaggcagcgggaatttgagatttttgggaagaaagtcggatttcccccgtccccttccccctgttactaatcctcattaaaaagaaaaacaacagtaactgcaaacttgctaccatcccgtacgtcccccactcctggcaccatgaaggcggccgtcgatctcaagccgactctcaccatcatcaagacggaaaaagtcgatctggagcttttcccctccccggatatggaatgtgcagatgtcccactattaactccaagcagcaaagaaatgatgtctcaagcattaaaagctactttcagtggtttcactaaagaacagcaacgactggggatcccaaaagacccccggcagtggacagaaacccatgttcgggactgggtgatgtgggctgtgaatgaattcagcctgaaaggtgtagacttccagaagttctgtatgaatggagcagccctctgcgccctgggtaaagactgctttctcgagctggccccagactttgttggggacatcttatgggaacatctagagatcctgcagaaagaggatgtgaaaccatatcaagttaatggagtcaacccagcctatccagaatcccgctatacctcggattacttcattagctatggtattgagcatgcccagtgtgttccaccatcggagttctcagagcccagcttcatcacagagtcctatcagacgctccatcccatcagctcggaagagctcctctccctcaagtatgagaatgactacccctcggtcattctccgagaccctctccagacagacaccttgcagaatgactactttgctatcaaacaagaagtcgtcaccccagacaacatgtgcatggggaggaccagtcgtggtaaactcgggggccaggactcttttgaaagcatagagagctacgatagttgtgatcgcctcacccagtcctggagcagccagtcatctttcaacagcctgcagcgtgttccctcctatgacagcttcgactcagaggactatccggctgccctgcccaaccacaagcccaagggcaccttcaaggactatgtgcgggaccgtgctgacctcaataaggacaagcctgtcattcctgctgctgccctagctggctacacaggcagtggaccaatccagctatggcagtttcttctggaattactcactgataaatcctgtcagtcttttatcagctggacaggagatggctgggaattcaaactttctgacccagatgaggtggccaggagatggggaaagaggaaaaacaaacctaagatgaattatgagaaactgagccgtggcctacgctactattacgacaaaaacatcatccacaagacagcggggaaacgctacgtgtaccgctttgtgtgtgacctgcagagcctgctggggtacacccctgaggagctgcacgccatgctggacgtcaagccagatgccgacgagtgatggcactgaaggggctggggaaaccctgctgagaccttccaaggacagccgtgttggttggactctgaattttgaattgttattctattttttattttccagaactcattttttaccttcaggggtgggagctaagtcagttgcagctgtaatcaattgtgcgcagttgggaaaggaaagccaggacttgtggggtgggtgggaccagaaattcttgagcaaattttcaggagagggagaagggccttctcagaagcttgaaggctctggcttaacagagaaagagactaatgtgtccaatcatttttaaaaatcatccatgaaaaagtgtcttgagttgtggacccattagcaagtgacattgtcacatcagaactcatgaaactgatgtaaggcaattaatttgcttctgtttttaggtctgggagggcaaaaaagaggtgggtgggatgaaacatgttttggggggggatgcactgaaaatctgagaactatttacctatcactctag

SEQ ID NO: 34211 - DNA, 4981 bp, Homo sapiens
  source 1..4981: mol_type = unassigned DNA
gagatcgagagcgaacgaggcagccgccggcggagaggagggagcgggcgagggccgggcaggaggagcgggcgcggcgcgggcgaggctgggacccgagcgcgctcacttcgccgcaaagtgccaacttcccctggagtgccgggcgcgcaccgtccgggcgcgggggaaagaaaggcagcgggaatttgagatttttgggaagaaagtcggatttcccccgtccccttccccctgttactaatcctcattaaaaagaaaaacaacagtaactgcaaacttgctaccatcccgtacgtcccccactcctggcaccatgaaggcggccgtcgatctcaagccgactctcaccatcatcaagacggaaaaagtcgatctggagcttttcccctccccggatatggaatgtgcagatgtcccactattaactccaagcagcaaagaaatgatgtctcaagcattaaaagctactttcagtggtttcactaaagaacagcaacgactggggatcccaaaagacccccggcagtggacagaaacccatgttcgggactgggtgatgtgggctgtgaatgaattcagcctgaaaggtgtagacttccagaagttctgtatgaatggagcagccctctgcgccctgggtaaagactgctttctcgagctggccccagactttgttggggacatcttatgggaacatctagagatcctgcagaaagaggatgtgaaaccatatcaagttaatggagtcaacccagcctatccagaatcccgctatacctcggattacttcattagctatggtattgagcatgcccagtgtgttccaccatcggagttctcagagcccagcttcatcacagagtcctatcagacgctccatcccatcagctcggaagagctcctctccctcaagtatgagaatgactacccctcggtcattctccgagaccctctccagacagacaccttgcagaatgactactttgctatcaaacaagaagtcgtcaccccagacaacatgtgcatggggaggaccagtcgtggtagtggaccaatccagctatggcagtttcttctggaattactcactgataaatcctgtcagtcttttatcagctggacaggagatggctgggaattcaaactttctgacccagatgaggtggccaggagatggggaaagaggaaaaacaaacctaagatgaattatgagaaactgagccgtggcctacgctactattacgacaaaaacatcatccacaagacagcggggaaacgctacgtgtaccgctttgtgtgtgacctgcagagcctgctggggtacacccctgaggagctgcacgccatgctggacgtcaagccagatgccgacgagtgatggcactgaaggggctggggaaaccctgctgagaccttccaaggacagccgtgttggttggactctgaattttgaattgttattctattttttattttccagaactcattttttaccttcaggggtgggagctaagtcagttgcagctgtaatcaattgtgcgcagttgggaaaggaaagccaggacttgtggggtgggtgggaccagaaattcttgagcaaattttcaggagagggagaagggccttctcagaagcttgaaggctctggcttaacagagaaagagactaatgtgtccaatcatttttaaaaatcatccatgaaaaagtgtcttgagttgtggacccattagcaagtgacattgtcacatcagaactcatgaaactgatgtaaggcaattaatttgcttctgtttttaggtctgggagggcaaaaaagaggtgggtgggatgaaacatgttttggggggggatgcactgaaaatctgagaactatttacctatcactctagttttgaagcaaagatggacttcagtggggaggggccaaaaccgttgttgtgttaaaatttattttattaaattttgtgccagtattttttttcttaaaaatcgtcttaagctctaaggtggtctcagtattgcaatatcatgtaagtttgtttttatttgccggctgaggattctgtcacaatgaaagaaaactgtttatatagaccccattggaaaagcaaaacgctctcactgagatcagggatcccaaattcatgggacttatataagaaggacaattaatgctgatttgggtacaggggaattatgtgtgtgaatgtcatctacaattaaaaaaaattagcacatccctttacttacttgttatcagtggattctcggggtttggacttaatgttgagctaagaagcattaagtctttgaactgaatgtattttgcatccctggttttggacgacagtaaacgtaggagcactgttgaagtcctggaagggagatcgaaggaggaagattgacttggttctttcttagtcctatatctgtagcatagatgacttggaataaaagctgtatgcatgggcattacccctcaggtcctaagaaataagtcctgaatgcatgtcgttccaaactaacactctgtaatttttcttttatgtcttattttccaagagtcctccattttttgcaccccctcaccgccaactctgttattcagtagagagaagtgtacggctttctgattggtgagtgaaaaagtaacttgagacacgacctaagttgaagagtttagacttgctgagttttagaagtgatggaaattaagagagcatttcaataaaatgtgacttggctgtctttggaagagaagtgcaaggctttcctttgaagaatttaaattagtccggtaggatgtcaggtgagactgtgtatgcaaaatgaatggcacaggtgatgccagggcctcttgcttgggtctgatgtcttggcacagggtaagtgaaggttaattccagaagagaggaatgacttgaaggcaaaggaaactaaggaaggaggttcagtgaggaaaataaggttgtccatgagatttgaatagatttttagttcccccaaggtttaaatacaaacatagtcaagcaaggtagtcatctttctgctggttgtgagggggaatctgaaaatggagttttagaggaaaagtcaacatctaactagtgaggaaaagtgcctaatacaattagaatctccctcactctatagttgcccagttgaaaggataaggaggaggggtggcttttatggacttccatgagagaaggaaagaaatatttcaggtaagcttctcagggctggccctttttgggatttggatgagaaattggaagtactaactactttctagcatatctttaagaaaattgattgttatttactcccagatcctcttgcagacccagaattatcaggaacatagctctgtgattcatgagtgtccccatactgatgaattggagcatccatatggaaagcaaaggcagaattatcccagctgtattattttgatcttttggatgcaggtgccttaatgaagctctcaaaatattttaggagctgctcagggagtgttgggtggaactgtttggactacattgttttctcttagattatgtgatttttgttgggcactggcaaaaggtgtgtgtgtgaatgtgtgcatgtgtgtgaatgttgtgtgtgtgtgtgtgtgtgtgtgtgtgtgtgtgtgtgtgtgtgtttgcagacatgcaaaactgcagctgaaataataccttagatttctaggtaagtctttccacatttcaataatgggtaagagtagaaccagggccgggtatcaattattgcttgctgtttgcaaccaggcataaaatcactttctcaaatcatccaccgttcctattaaatttatgccggaaactctccttctgtgagtataactcctgcagttcctatagcagataagatataagaaagtgcctcctagtgctcctccgcccgcttgtttgctaaaattccctttctctctaagtccaccattttcaagatttgtagatagtgtattagttaagacagctttgtcgatctggccagatgttttttctcctttgtccaaaggccagagaccatcccaggaagagtggtgggtggtttatacactggaaatgttgcgtttatgctttttaaaaacacacgttaacttcagaggaaggatgggcaaatctggtctagctgggtgaaacccttattttcccagagatgccttaacctttgttggttttggctttagggttcagagtcacttttgttcccttctccattctggagagggacttcccctacatagagccctgatttttgtggctgtggggattggaggtagcattcaaagatcagatgtgcttttcctcactttggagatgaacactctgggttttacagcattaacctgcctaaccttcatggtgagaaatacaccatctctcttctagtcatgctgtgcatgccgcttactctgttggggtctatataaatttgttgaactcttacctacattccaaagaagtttcaaggaaccataaatatatgtatacatatacatatataaaatatatatattaaaataaaattatcaggaatactgcctcagttattgaacttttttttttaagaatactttttttttaagctgagaagtatagggatgaaaaagatgttatattgtgtttgactattttccaacttgtattttcatataatttatattttttaaaagctgaaaatttagaagcaagatgaaaaaaaggaaaagcaggtgctttttaaaaatcagaactgaggtagcttagagatgtagcgatgtaagtgtcgatgtttttttaaaaaaaaatgcaaaaaaattcttatggcggagttttttgtttgtttattttagtagctgatgctggcacatcattttgctggagagttttttatatactgtagcctgatttcatattgtattttaaactgtgtgaaattaaaaacaaagaatttcattcataatgct

SEQ ID NO: 34212 - DNA, 5123 bp, Homo sapiens
  source 1..5123: mol_type = unassigned DNA
cagactttgagggaagctcactcaggatctgctctccggcaaagtagtaagtgaggtgctgagagcagaatgagctactttgtggattctgctgggagcagccccgtcccttactcagcgcctcgtcctgcagtggtgaggcaaggacctagcaacacttatgaagatcctcgaatgaactgtggtttccagtccaattatcaccagcaaagaccttgctaccccttttgggatgagatggcaactcaggaagttcctactggtcttgaacactgtgtctcagatatggaatgtgcagatgtcccactattaactccaagcagcaaagaaatgatgtctcaagcattaaaagctactttcagtggtttcactaaagaacagcaacgactggggatcccaaaagacccccggcagtggacagaaacccatgttcgggactgggtgatgtgggctgtgaatgaattcagcctgaaaggtgtagacttccagaagttctgtatgaatggagcagccctctgcgccctgggtaaagactgctttctcgagctggccccagactttgttggggacatcttatgggaacatctagagatcctgcagaaagaggatgtgaaaccatatcaagttaatggagtcaacccagcctatccagaatcccgctatacctcggattacttcattagctatggtattgagcatgcccagtgtgttccaccatcggagttctcagagcccagcttcatcacagagtcctatcagacgctccatcccatcagctcggaagagctcctctccctcaagtatgagaatgactacccctcggtcattctccgagaccctctccagacagacaccttgcagaatgactactttgctatcaaacaagaagtcgtcaccccagacaacatgtgcatggggaggaccagtcgtggtaaactcgggggccaggactcttttgaaagcatagagagctacgatagttgtgatcgcctcacccagtcctggagcagccagtcatctttcaacagcctgcagcgtgttccctcctatgacagcttcgactcagaggactatccggctgccctgcccaaccacaagcccaagggcaccttcaaggactatgtgcgggaccgtgctgacctcaataaggacaagcctgtcattcctgctgctgccctagctggctacacaggcagtggaccaatccagctatggcagtttcttctggaattactcactgataaatcctgtcagtcttttatcagctggacaggagatggctgggaattcaaactttctgacccagatgaggtggccaggagatggggaaagaggaaaaacaaacctaagatgaattatgagaaactgagccgtggcctacgctactattacgacaaaaacatcatccacaagacagcggggaaacgctacgtgtaccgctttgtgtgtgacctgcagagcctgctggggtacacccctgaggagctgcacgccatgctggacgtcaagccagatgccgacgagtgatggcactgaaggggctggggaaaccctgctgagaccttccaaggacagccgtgttggttggactctgaattttgaattgttattctattttttattttccagaactcattttttaccttcaggggtgggagctaagtcagttgcagctgtaatcaattgtgcgcagttgggaaaggaaagccaggacttgtggggtgggtgggaccagaaattcttgagcaaattttcaggagagggagaagggccttctcagaagcttgaaggctctggcttaacagagaaagagactaatgtgtccaatcatttttaaaaatcatccatgaaaaagtgtcttgagttgtggacccattagcaagtgacattgtcacatcagaactcatgaaactgatgtaaggcaattaatttgcttctgtttttaggtctgggagggcaaaaaagaggtgggtgggatgaaacatgttttggggggggatgcactgaaaatctgagaactatttacctatcactctagttttgaagcaaagatggacttcagtggggaggggccaaaaccgttgttgtgttaaaatttattttattaaattttgtgccagtattttttttcttaaaaatcgtcttaagctctaaggtggtctcagtattgcaatatcatgtaagtttgtttttatttgccggctgaggattctgtcacaatgaaagaaaactgtttatatagaccccattggaaaagcaaaacgctctcactgagatcagggatcccaaattcatgggacttatataagaaggacaattaatgctgatttgggtacaggggaattatgtgtgtgaatgtcatctacaattaaaaaaaattagcacatccctttacttacttgttatcagtggattctcggggtttggacttaatgttgagctaagaagcattaagtctttgaactgaatgtattttgcatccctggttttggacgacagtaaacgtaggagcactgttgaagtcctggaagggagatcgaaggaggaagattgacttggttctttcttagtcctatatctgtagcatagatgacttggaataaaagctgtatgcatgggcattacccctcaggtcctaagaaataagtcctgaatgcatgtcgttccaaactaacactctgtaatttttcttttatgtcttattttccaagagtcctccattttttgcaccccctcaccgccaactctgttattcagtagagagaagtgtacggctttctgattggtgagtgaaaaagtaacttgagacacgacctaagttgaagagtttagacttgctgagttttagaagtgatggaaattaagagagcatttcaataaaatgtgacttggctgtctttggaagagaagtgcaaggctttcctttgaagaatttaaattagtccggtaggatgtcaggtgagactgtgtatgcaaaatgaatggcacaggtgatgccagggcctcttgcttgggtctgatgtcttggcacagggtaagtgaaggttaattccagaagagaggaatgacttgaaggcaaaggaaactaaggaaggaggttcagtgaggaaaataaggttgtccatgagatttgaatagatttttagttcccccaaggtttaaatacaaacatagtcaagcaaggtagtcatctttctgctggttgtgagggggaatctgaaaatggagttttagaggaaaagtcaacatctaactagtgaggaaaagtgcctaatacaattagaatctccctcactctatagttgcccagttgaaaggataaggaggaggggtggcttttatggacttccatgagagaaggaaagaaatatttcaggtaagcttctcagggctggccctttttgggatttggatgagaaattggaagtactaactactttctagcatatctttaagaaaattgattgttatttactcccagatcctcttgcagacccagaattatcaggaacatagctctgtgattcatgagtgtccccatactgatgaattggagcatccatatggaaagcaaaggcagaattatcccagctgtattattttgatcttttggatgcaggtgccttaatgaagctctcaaaatattttaggagctgctcagggagtgttgggtggaactgtttggactacattgttttctcttagattatgtgatttttgttgggcactggcaaaaggtgtgtgtgtgaatgtgtgcatgtgtgtgaatgttgtgtgtgtgtgtgtgtgtgtgtgtgtgtgtgtgtgtgtgtgtgtttgcagacatgcaaaactgcagctgaaataataccttagatttctaggtaagtctttccacatttcaataatgggtaagagtagaaccagggccgggtatcaattattgcttgctgtttgcaaccaggcataaaatcactttctcaaatcatccaccgttcctattaaatttatgccggaaactctccttctgtgagtataactcctgcagttcctatagcagataagatataagaaagtgcctcctagtgctcctccgcccgcttgtttgctaaaattccctttctctctaagtccaccattttcaagatttgtagatagtgtattagttaagacagctttgtcgatctggccagatgttttttctcctttgtccaaaggccagagaccatcccaggaagagtggtgggtggtttatacactggaaatgttgcgtttatgctttttaaaaacacacgttaacttcagaggaaggatgggcaaatctggtctagctgggtgaaacccttattttcccagagatgccttaacctttgttggttttggctttagggttcagagtcacttttgttcccttctccattctggagagggacttcccctacatagagccctgatttttgtggctgtggggattggaggtagcattcaaagatcagatgtgcttttcctcactttggagatgaacactctgggttttacagcattaacctgcctaaccttcatggtgagaaatacaccatctctcttctagtcatgctgtgcatgccgcttactctgttggggtctatataaatttgttgaactcttacctacattccaaagaagtttcaaggaaccataaatatatgtatacatatacatatataaaatatatatattaaaataaaattatcaggaatactgcctcagttattgaacttttttttttaagaatactttttttttaagctgagaagtatagggatgaaaaagatgttatattgtgtttgactattttccaacttgtattttcatataatttatattttttaaaagctgaaaatttagaagcaagatgaaaaaaaggaaaagcaggtgctttttaaaaatcagaactgaggtagcttagagatgtagcgatgtaagtgtcgatgtttttttaaaaaaaaatgcaaaaaaattcttatggcggagttttttgtttgtttattttagtagctgatgctggcacatcattttgctggagagttttttatatactgtagcctgatttcatattgtattttaaactgtgtgaaattaaaaacaaagaatttcattcataa

SEQ ID NO: 34213 - DNA, 1494 bp, Homo sapiens
  source 1..1494: mol_type = unassigned DNA
ttcgccgcaaagtgccaacttcccctggagtgccgggcgcgcaccgtccgggcgcgggggaaagaaaggcagcgggaatttgagatttttgggaagaaagtcggatttcccccgtccccttccccctgttactaatcctcattaaaaagaaaaacaacagtaactgcaaacttgctaccatcccgtacgtcccccactcctggcaccatgaaggcggccgtcgatctcaagccgactctcaccatcatcaagacggaaaaagtcgatctggagcttttcccctccccggatatggaatgtgcagatgtcccactattaactccaagcagcaaagaaatgatgtctcaagcattaaaagctactttcagtggtttcactaaagaacagcaacgactggggatcccaaaagacccccggcagtggacagaaacccatgttcgggactgggtgatgtgggctgtgaatgaattcagcctgaaaggtgtagacttccagaagttctgtatgaatggagcagccctctgcgccctgggtaaagactgctttctcgagctggccccagactttgttggggacatcttatgggaacatctagagatcctgcagaaagaggatgtgaaaccatatcaagttaatggagtcaacccagcctatccagaatcccgctatacctcggattacttcattagctatggtattgagcatgcccagtgtgttccaccatcggagttctcagagcccagcttcatcacagagtcctatcagacgctccatcccatcagctcggaagagctcctctccctcaagtatgagaatgactacccctcggtcattctccgagaccctctccagacagacaccttgcagaatgactactttgctatcaaacaagaagtcgtcaccccagacaacatgtgcatggggaggaccagtcgtggcagtggaccaatccagctatggcagtttcttctggaattactcactgataaatcctgtcagtcttttatcagctggacaggagatggctgggaattcaaactttctgacccagatgaggtggccaggagatggggaaagaggaaaaacaaacctaagatgaattatgagaaactgagccgtggcctacgctactattacgacaaaaacatcatccacaagacagcggggaaacgctacgtgtaccgctttgtgtgtgacctgcagagcctgctggggtacacccctgaggagctgcacgccatgctggacgtcaagccagatgccgacgagtgatggcactgaaggggctggggaaaccctgctgagaccttccaaggacagccgtgttggttggactctgaattttgaattgttattctattttttattttccagaactcattttttaccttcaggggtgggagctaagtcagttgcagctgtaatcaattgtgcgcagttgggaaaggaaagccaggacttgtggggtgggtgggaccagaaattcttgagcaa

SEQ ID NO: 34214 - DNA, 2134 bp, Homo sapiens
  source 1..2134: mol_type = unassigned DNA
ggcgagggccgggcaggaggagcgggcgcggcgcgggcgaggctgggacccgagcgcgctcacttcgccgcaaagtgccaacttcccctggagtgccgggcgcgcaccgtccgggcgcgggggaaagaaaggcagcgggaatttgagatttttgggaagaaagtcggatttcccccgtccccttccccctgttactaatcctcattaaaaagaaaaacaacagtaactgcaaacttgctaccatcccgtacgtcccccactcctggcaccatgaaggcggccgtcgatctcaagccgactctcaccatcatcaagacggaaaaagtcgatctggagcttttcccctccccggatatggaatgtgcagatgtcccactattaactccaagcagcaaagaaatgatgtctcaagcattaaaagctactttcagtggtttcactaaagaacagcaacgactggggatcccaaaagacccccggcagtggacagaaacccatgttcgggactgggtgatgtgggctgtgaatgaattcagcctgaaaggtgtagacttccagaagttctgtatgaatggagcagccctctgcgccctgggtaaagactgctttctcgagctggccccagactttgttggggacatcttatgggaacatctagagatcctgcagaaagaggatgtgaaaccatatcaagttaatggagtcaacccagcctatccagaatcccgctatacctcggattacttcattagctatggtattgagcatgcccagtgtgttccaccatcggagttctcagagcccagcttcatcacagagtcctatcagacgctccatcccatcagctcggaagagctcctctccctcaagtatgagaatgactacccctcggtcattctccgagaccctctccagacagacaccttgcagaatgactactttgctatcaaacaagaagtcgtcaccccagacaacatgtgcatggggaggaccagtcgtggtaaactcgggggccaggactcttttgaaagcatagagagctacgatagttgtggccaggagatggggaaagaggaaaaacaaacctaagatgaattatgagaaactgagccgtggcctacgctactattacgacaaaaacatcatccacaagacagcggggaaacgctacgtgtaccgctttgtgtgtgacctgcagagcctgctggggtacacccctgaggagctgcacgccatgctggacgtcaagccagatgccgacgagtgatggcactgaaggggctggggaaaccctgctgagaccttccaaggacagccgtgttggttggactctgaattttgaattgttattctattttttattttccagaactcattttttaccttcaggggtgggagctaagtcagttgcagctgtaatcaattgtgcgcagttgggaaaggaaagccaggacttgtggggtgggtgggaccagaaattcttgagcaaattttcaggagagggagaagggccttctcagaagcttgaaggctctggcttaacagagaaagagactaatgtgtccaatcatttttaaaaatcatccatgaaaaagtgtcttgagttgtggacccattagcaagtgacattgtcacatcagaactcatgaaactgatgtaaggcaattaatttgcttctgtttttaggtctgggagggcaaaaaagaggtgggtgggatgaaacatgttttggggggggatgcactgaaaatctgagaactatttacctatcactctagttttgaagcaaagatggacttcagtggggaggggccaaaaccgttgttgtgttaaaatttattttattaaattttgtgccagtattttttttcttaaaaatcgtcttaagctctaaggtggtctcagtattgcaatatcatgtaagtttgtttttatttgccggctgaggattctgtcacaatgaaagaaaactgtttatatagaccccattggaaaagcaaaacgctctcactgagatcagggatcccaaattcatgggacttatataagaaggacaattaatgctgatttgggtacaggggaattatgtgtgtgaatgtcatctacaattaaaaaaaattagcacatcccttta

SEQ ID NO: 34215 - DNA, 4594 bp, Homo sapiens
  source 1..4594: mol_type = unassigned DNA
gagatcgagagcgaacgaggcagccgccggcggagaggagggagcgggcgagggccgggcaggaggagcgggcgcggcgcgggcgaggctgggacccgagcgcgctcacttcgccgcaaagtgccaacttcccctggagtgccgggcgcgcaccgtccgggcgcgggggaaagaaaggcagcgggaatttgagatttttgggaagaaagtcggatttcccccgtccccttccccctgttactaatcctcattaaaaagaaaaacaacagtaactgcaaacttgctaccatcccgtacgtcccccactcctggcaccatgaaggcggccgtcgatctcaagccgactctcaccatcatcaagacggaaaaagtcgatctggagcttttcccctccccgggtaaactcgggggccaggactcttttgaaagcatagagagctacgatagttgtgatcgcctcacccagtcctggagcagccagtcatctttcaacagcctgcagcgtgttccctcctatgacagcttcgactcagaggactatccggctgccctgcccaaccacaagcccaagggcaccttcaaggactatgtgcgggaccgtgctgacctcaataaggacaagcctgtcattcctgctgctgccctagctggctacacaggcagtggaccaatccagctatggcagtttcttctggaattactcactgataaatcctgtcagtcttttatcagctggacaggagatggctgggaattcaaactttctgacccagatgaggtggccaggagatggggaaagaggaaaaacaaacctaagatgaattatgagaaactgagccgtggcctacgctactattacgacaaaaacatcatccacaagacagcggggaaacgctacgtgtaccgctttgtgtgtgacctgcagagcctgctggggtacacccctgaggagctgcacgccatgctggacgtcaagccagatgccgacgagtgatggcactgaaggggctggggaaaccctgctgagaccttccaaggacagccgtgttggttggactctgaattttgaattgttattctattttttattttccagaactcattttttaccttcaggggtgggagctaagtcagttgcagctgtaatcaattgtgcgcagttgggaaaggaaagccaggacttgtggggtgggtgggaccagaaattcttgagcaaattttcaggagagggagaagggccttctcagaagcttgaaggctctggcttaacagagaaagagactaatgtgtccaatcatttttaaaaatcatccatgaaaaagtgtcttgagttgtggacccattagcaagtgacattgtcacatcagaactcatgaaactgatgtaaggcaattaatttgcttctgtttttaggtctgggagggcaaaaaagaggtgggtgggatgaaacatgttttggggggggatgcactgaaaatctgagaactatttacctatcactctagttttgaagcaaagatggacttcagtggggaggggccaaaaccgttgttgtgttaaaatttattttattaaattttgtgccagtattttttttcttaaaaatcgtcttaagctctaaggtggtctcagtattgcaatatcatgtaagtttgtttttatttgccggctgaggattctgtcacaatgaaagaaaactgtttatatagaccccattggaaaagcaaaacgctctcactgagatcagggatcccaaattcatgggacttatataagaaggacaattaatgctgatttgggtacaggggaattatgtgtgtgaatgtcatctacaattaaaaaaaattagcacatccctttacttacttgttatcagtggattctcggggtttggacttaatgttgagctaagaagcattaagtctttgaactgaatgtattttgcatccctggttttggacgacagtaaacgtaggagcactgttgaagtcctggaagggagatcgaaggaggaagattgacttggttctttcttagtcctatatctgtagcatagatgacttggaataaaagctgtatgcatgggcattacccctcaggtcctaagaaataagtcctgaatgcatgtcgttccaaactaacactctgtaatttttcttttatgtcttattttccaagagtcctccattttttgcaccccctcaccgccaactctgttattcagtagagagaagtgtacggctttctgattggtgagtgaaaaagtaacttgagacacgacctaagttgaagagtttagacttgctgagttttagaagtgatggaaattaagagagcatttcaataaaatgtgacttggctgtctttggaagagaagtgcaaggctttcctttgaagaatttaaattagtccggtaggatgtcaggtgagactgtgtatgcaaaatgaatggcacaggtgatgccagggcctcttgcttgggtctgatgtcttggcacagggtaagtgaaggttaattccagaagagaggaatgacttgaaggcaaaggaaactaaggaaggaggttcagtgaggaaaataaggttgtccatgagatttgaatagatttttagttcccccaaggtttaaatacaaacatagtcaagcaaggtagtcatctttctgctggttgtgagggggaatctgaaaatggagttttagaggaaaagtcaacatctaactagtgaggaaaagtgcctaatacaattagaatctccctcactctatagttgcccagttgaaaggataaggaggaggggtggcttttatggacttccatgagagaaggaaagaaatatttcaggtaagcttctcagggctggccctttttgggatttggatgagaaattggaagtactaactactttctagcatatctttaagaaaattgattgttatttactcccagatcctcttgcagacccagaattatcaggaacatagctctgtgattcatgagtgtccccatactgatgaattggagcatccatatggaaagcaaaggcagaattatcccagctgtattattttgatcttttggatgcaggtgccttaatgaagctctcaaaatattttaggagctgctcagggagtgttgggtggaactgtttggactacattgttttctcttagattatgtgatttttgttgggcactggcaaaaggtgtgtgtgtgaatgtgtgcatgtgtgtgaatgttgtgtgtgtgtgtgtgtgtgtgtgtgtgtgtgtgtgtgtgtgtgtttgcagacatgcaaaactgcagctgaaataataccttagatttctaggtaagtctttccacatttcaataatgggtaagagtagaaccagggccgggtatcaattattgcttgctgtttgcaaccaggcataaaatcactttctcaaatcatccaccgttcctattaaatttatgccggaaactctccttctgtgagtataactcctgcagttcctatagcagataagatataagaaagtgcctcctagtgctcctccgcccgcttgtttgctaaaattccctttctctctaagtccaccattttcaagatttgtagatagtgtattagttaagacagctttgtcgatctggccagatgttttttctcctttgtccaaaggccagagaccatcccaggaagagtggtgggtggtttatacactggaaatgttgcgtttatgctttttaaaaacacacgttaacttcagaggaaggatgggcaaatctggtctagctgggtgaaacccttattttcccagagatgccttaacctttgttggttttggctttagggttcagagtcacttttgttcccttctccattctggagagggacttcccctacatagagccctgatttttgtggctgtggggattggaggtagcattcaaagatcagatgtgcttttcctcactttggagatgaacactctgggttttacagcattaacctgcctaaccttcatggtgagaaatacaccatctctcttctagtcatgctgtgcatgccgcttactctgttggggtctatataaatttgttgaactcttacctacattccaaagaagtttcaaggaaccataaatatatgtatacatatacatatataaaatatatatattaaaataaaattatcaggaatactgcctcagttattgaacttttttttttaagaatactttttttttaagctgagaagtatagggatgaaaaagatgttatattgtgtttgactattttccaacttgtattttcatataatttatattttttaaaagctgaaaatttagaagcaagatgaaaaaaaggaaaagcaggtgctttttaaaaatcagaactgaggtagcttagagatgtagcgatgtaagtgtcgatgtttttttaaaaaaaaatgcaaaaaaattcttatggcggagttttttgtttgtttattttagtagctgatgctggcacatcattttgctggagagttttttatatactgtagcctgatttcatattgtattttaaactgtgtgaaattaaaaacaaagaatttcattcataatgct

SEQ ID NO: 34216 - DNA, 2575 bp, Homo sapiens
  source 1..2575: mol_type = unassigned DNA
gcggtggaggcgcgggcgctgtccagcgtgctgaagccggagcgagctagccgcccggagccgcgccgacccagctgagcccagcccacgggacgccagacctcgaccgtcgctcctaccccggccaccgctcggagccgaggcggacgcgtcccgatcttcccctgtccccaccctgccccgaccctcctctccacctctcgcgtcgtgacaccagctgtctccggcagcctcttggtcatgaaagccctcagattgtcggcttccgccctcttctgccttctgctgatcaacgggttaggggcagcaccccctggtcgccctgaggcgcagcctcctcctctcagctctgagcataaagagccggtagccggggacgcagtgcccgggccaaaggatggcagcgccccagaggtccgaggcgctcggaattccgagccgcaggacgagggagagcttttccagggcgtggatccccgggcgctggccgcggtgctgctgcaggcactcgaccgtcccgcctcacccccggcaccaagcggctcccagcaggggccggaggaagaagcagctgaagctctgctgaccgagaccgtgcgcagccagacccacagcctcccggcgccggagagcccggagcccgcggctccgcctcgccctcagactccggagaatgggcccgaggcgagcgatccctccgaggagctcgaggcgctagcgtccctgctccaggaactgcgagatttcagtccaagtagcgccaagcgccagcaggagacggcggcagcagagacggaaacccgcacgcacacgctgacccgagtgaatctggagagcccggggccagagcgcgtatggcgcgcttcctggggagagttccaggcgcgtgtcccggagcgcgcgcccctgccgcccccggccccctctcaattccaggcgcgtatgcccgacagcgggccccttcccgaaacccacaagttcggggaaggagtgtcctcccccaaaacacacctaggcgaggcattggcacccctgtccaaggcgtaccaaggcgtggccgccccgttccccaaggcgcgccggccggagagcgcactcctgggcggctccgaggcgggcgagcgccttctccagcaagggctggcgcaggtggaggccgggcggcggcaggcggaggccacgcggcaggccgcggcgcaggaagagcggctggccgacctcgcctcggacctgctgctccagtatttgctgcagggcggggcccggcagcgcggcctcgggggtcgggggctgcaggaggcggcggaggagcgagagagtgcaagggaggaggaggaggcggagcaggagagacgcggcggggaggagagggtgggggaagaggatgaggaggcggccgaggcggaggcagaggcggaggaggcggagagggcgcggcagaacgcgctcctgttcgcggaggaggaggacggggaagccggcgccgaggacaagcgctcccaggaggagacgccgggccaccggcggaaggaggccgaggggacagaggagggcggggaggaggaggacgacgaggagatggatccgcagacgatcgacagcctcattgagctgtccaccaaactccacctgccagcggacgacgtggtcagcatcatcgaggaggtggaggagaagcggaagcggaagaagaacgcccctcccgagcccgtgccgcccccccgtgccgcccccgcccccacccacgtccgctccccgcagcccccgccccccgcccccgctcccgcacgagacgagctgccggactggaacgaggtgctcccgccctgggatcgggaggaggacgaggtgtacccgccagggccgtaccaccctttccccaactacatccggccgcggacactgcagccgccctcggccttgcgccgccgccactaccaccacgccttgccgccttcgcgccactatcccggccgggaggcccaggcgcggcgcgcgcaggaggaggcggaggcggaggagcgccggctgcaggagcaggaggagctggagaattacatcgagcacgtgctgctccggcgcccgtgactgcccttcccggtcccgcccccgcgcgcccccgccgcgcgcgcgcgccggcgcccccctccgtgttgcccgctccccctcggtgtttgcatgcgccccggccctgccccttggccctgcccctgtccccgggctgcgtcgggacctgccagacccccctcccgggtcctgagcccgaactcccagagctcacccgcgggtgaccgggggccagcccaggagggcgggtggtttgtgcgagttcccttgccacgcggggccccggccccatcaagtccctctggggacgtccccgtcggaaaccggaaaaagcagttccagttaattgtgtgaagtgtgtctgtctccagcccttcgggcctcccacgagcccctccagcctctccaagtcgctgtgaattgaccccttctttcctttctctgttgtaaatacccctcacggaggaaatagttttgctaagaaataaaagtgactattttattagga

SEQ ID NO: 34217 - DNA, 2477 bp, Homo sapiens
  source 1..2477: mol_type = unassigned DNA
agatggctcagggaaggggccgaggaggccctgggtaagcgagggcttcgggggttattttcccatttacacggctccagagatcggcacaacatcttcctcctttgctcctaaacgttcctcttctggtctccggcagcctcttggtcatgaaagccctcagattgtcggcttccgccctcttctgccttctgctgatcaacgggttaggggcagcaccccctggtcgccctgaggcgcagcctcctcctctcagctctgagcataaagagccggtagccggggacgcagtgcccgggccaaaggatggcagcgccccagaggtccgaggcgctcggaattccgagccgcaggacgagggagagcttttccagggcgtggatccccgggcgctggccgcggtgctgctgcaggcactcgaccgtcccgcctcacccccggcaccaagcggctcccagcaggggccggaggaagaagcagctgaagctctgctgaccgagaccgtgcgcagccagacccacagcctcccggcgccggagagcccggagcccgcggctccgcctcgccctcagactccggagaatgggcccgaggcgagcgatccctccgaggagctcgaggcgctagcgtccctgctccaggaactgcgagatttcagtccaagtagcgccaagcgccagcaggagacggcggcagcagagacggaaacccgcacgcacacgctgacccgagtgaatctggagagcccggggccagagcgcgtatggcgcgcttcctggggagagttccaggcgcgtgtcccggagcgcgcgcccctgccgcccccggccccctctcaattccaggcgcgtatgcccgacagcgggccccttcccgaaacccacaagttcggggaaggagtgtcctcccccaaaacacacctaggcgaggcattggcacccctgtccaaggcgtaccaaggcgtggccgccccgttccccaaggcgcgccggccggagagcgcactcctgggcggctccgaggcgggcgagcgccttctccagcaagggctggcgcaggtggaggccgggcggcggcaggcggaggccacgcggcaggccgcggcgcaggaagagcggctggccgacctcgcctcggacctgctgctccagtatttgctgcagggcggggcccggcagcgcggcctcgggggtcgggggctgcaggaggcggcggaggagcgagagagtgcaagggaggaggaggaggcggagcaggagagacgcggcggggaggagagggtgggggaagaggatgaggaggcggccgaggcggaggcagaggcggaggaggcggagagggcgcggcagaacgcgctcctgttcgcggaggaggaggacggggaagccggcgccgaggacaagcgctcccaggaggagacgccgggccaccggcggaaggaggccgaggggacagaggagggcggggaggaggaggacgacgaggagatggatccgcagacgatcgacagcctcattgagctgtccaccaaactccacctgccagcggacgacgtggtcagcatcatcgaggaggtggaggagaagcggaagcggaagaagaacgcccctcccgagcccgtgccgcccccccgtgccgcccccgcccccacccacgtccgctccccgcagcccccgccccccgcccccgctcccgcacgagacgagctgccggactggaacgaggtgctcccgccctgggatcgggaggaggacgaggtgtacccgccagggccgtaccaccctttccccaactacatccggccgcggacactgcagccgccctcggccttgcgccgccgccactaccaccacgccttgccgccttcgcgccactatcccggccgggaggcccaggcgcggcgcgcgcaggaggaggcggaggcggaggagcgccggctgcaggagcaggaggagctggagaattacatcgagcacgtgctgctccggcgcccgtgactgcccttcccggtcccgcccccgcgcgcccccgccgcgcgcgcgcgccggcgcccccctccgtgttgcccgctccccctcggtgtttgcatgcgccccggccctgccccttggccctgcccctgtccccgggctgcgtcgggacctgccagacccccctcccgggtcctgagcccgaactcccagagctcacccgcgggtgaccgggggccagcccaggagggcgggtggtttgtgcgagttcccttgccacgcggggccccggccccatcaagtccctctggggacgtccccgtcggaaaccggaaaaagcagttccagttaattgtgtgaagtgtgtctgtctccagcccttcgggcctcccacgagcccctccagcctctccaagtcgctgtgaattgaccccttctttcctttctctgttgtaaatacccctcacggaggaaatagttttgctaagaaataaaagtgactatttt

SEQ ID NO: 34218 - DNA, 1622 bp, Homo sapiens
  source 1..1622: mol_type = unassigned DNA
gccggagcgagctagccgcccggagccgcgccgacccagctgagcccagcccacgggacgccagacctcgaccgtcgctcctaccccggccaccgctcggagccgaggcggacgcgtcccgatcttcccctgtccccaccctgccccgaccctcctctccacctctcgcgtcgtgacaccagctgtctccggcagcctcttggtcatgaaagccctcagattgtcggcttccgccctcttctgccttctgctgatcaacgggttaggggcagcaccccctggtcgccctgaggcgcagcctcctcctctcagctctgagcataaagagccggtagccggggacgcagtgcccgggccaaaggatggcagcgccccagaggtccgaggcgctcggaattccgagccgcaggacgagggagagcttttccagggcgtggatccccgggcgctggccgcggtgctgctgcaggcactcgaccgtcccgcctcacccccggcaccaagcggctcccagcaggggccggaggaagaagcagctgaagctctgctgaccgagaccgtgcgcagccagacccacagcctcccggcgccggagagcccggagcccgcggctccgcctcgccctcagactccggagaatgggcccgaggcgagcgatccctccgaggagctcgaggcgctagcgtccctgctccaggaactgcgagatttcagtccaagtagcgccaagcgccagcaggagacggcggcagcagagacggaaacccgcacgcacacgctgacccgagtgaatctggagagcccggggccagagcgcgtatggcgcgcttcctggggagagttccaggcgcgtgtcccggagcgcgcgcccctgccgcccccggccccctctcaattccaggcgcgtatgcccgacagcgggccccttcccgaaacccacaagttcggggaaggagtgtcctcccccaaaacacacctaggcgaggcattggcacccctgtccaaggcgtaccaaggcgtggccgccccgttccccaaggcgcgccggccggagagcgcactcctgggcggctccgaggcgggcgagcgccttctccagcaagggctggcgcaggtggaggccgggcggcggcaggcggaggccacgcggcaggccgcggcgcaggaagagcggctggccgacctcgcctcggacctgctgctccagtttgctgcagggcggggcccggcagcgcggccctgccccttggccctgcccctgtccccgggctgcgtcgggacctgccagacccccctcccgggtcctgagcccgaactcccagagctcacccgcgggtgaccgggggccagcccaggagggcgggtggtttgtgcgagttcccttgccacgcggggccccggccccatcaagtccctctggggacgtccccgtcggaaaccggaaaaagcagttccagttaattgtgtgaagtgtgtctgtctccagcccttcgggcctcccacgagcccctccagcctctccaagtcgctgtgaattgaccccttctttcctttctctgttgtaaatacccctcacggaggaaatagttttgctaagaaataaaagtgactattttattagg

SEQ ID NO: 34219 - DNA, 6531 bp, Homo sapiens
  source 1..6531: mol_type = unassigned DNA
acaaaggtcgctcttctgcagccagcttgccacaattccctgagatctcccaggtggcagctgcctccccaagacaggctcactcaccatgaccaagctgagcgcccaagtcaaaggctctctcaacatcaccaccccggggctgcagatatggaggatcgaggccatgcagatggtgcctgttccttccagcacctttggaagcttcttcgatggtgactgctacatcatcctggctatccacaagacagccagcagcctgtcctatgacatccactactggattggccaggactcatccctggatgagcagggggcagctgccatctacaccacacagatggatgacttcctgaagggccgggctgtgcagcaccgcgaggtccagggcaacgagagcgaggccttccgaggctacttcaagcaaggccttgtgatccggaaagggggcgtggcttctggcatgaagcacgtggagaccaactcctatgacgtccagaggctgctgcatgtcaagggcaagaggaacgtggtagctggagaggtagagatgtcctggaagagtttcaaccgaggggatgttttcctcctggaccttgggaagcttatcatccagtggaatggaccggaaagcacccgtatggagagactcaggggcatgactctggccaaggagatccgagaccaggagcggggagggcgcacctatgtaggcgtggtggacggagagaatgaattggcatccccgaagctgatggaggtgatgaaccacgtgctgggcaagcgcagggagctgaaggcggccgtgcccgacacggtggtggagccggcactcaaggctgcactcaaactgtaccatgtgtctgactccgaggggaatctggtggtgagggaagtcgccacacggccactgacacaggacctgctcagtcacgaggactgttacatcctggaccaggggggcctgaagatctacgtgtggaaagggaagaaagccaatgagcaggagaagaagggagccatgagccatgcgctgaacttcatcaaagccaagcagtacccaccaagcacacaggtggaggtgcagaatgatggggctgagtcggccgtctttcagcagctcttccagaagtggacagcgtccaaccggacctcaggcctaggcaaaacccacactgtgggctccgtggccaaagtggaacaggtgaagttcgatgccacatccatgcatgtcaagcctcaggtggctgcccagcagaagatggtagatgatgggagtggggaagtgcaggtgtggcgcattgagaacctagagctggtacctgtggattccaagtggctaggccacttctatgggggcgactgctacctgctgctctacacctacctcatcggcgagaagcagcattacctgctctacgtttggcagggcagccaggccagccaagatgaaattacagcatcagcttatcaagccgtcatcctggaccagaagtacaatggtgaaccagtccagatccgggtcccaatgggcaaggagccacctcatcttatgtccatcttcaagggacgcatggtggtctaccagggaggcacctcccgaactaacaacttggagaccgggccctccacacggctgttccaggtccagggaactggcgccaacaacaccaaggcctttgaggtcccagcgcgggccaatttcctcaattccaatgatgtctttgtcctcaagacccagtcttgctgctatctatggtgtgggaagggttgtagcggggacgagcgggagatggccaagatggttgctgacaccatctcccggacggagaagcaagtggtggtggaagggcaggagccagccaacttctggatggccctgggtgggaaggccccctatgccaacaccaagagactacaggaagaaaacctggtcatcaccccccggctctttgagtgttccaacaagactgggcgcttcctggccacagagatccctgacttcaatcaggatgacttggaagaggatgatgtgttcctactagatgtctgggaccaggtcttcttctggattgggaaacatgccaacgaggaggagaagaaggccgcagcaaccactgcacaggaatacctcaagacccatcccagcgggcgtgaccctgagacccccatcattgtggtgaagcagggacacgagccccccaccttcacaggctggttcctggcttgggatcccttcaagtggagtaacaccaaatcctatgaggacctgaaggcggagcttggcaactctagggactggagccagatcactgctgaggtcacaagccccaaagtggacgtgttcaatgctaacagcaacctcagttctgggcctctgcccatcttccccctggagcagctagtgaacaagcctgtagaggagctccccgagggtgtggaccccagcaggaaggaggaacacctgtccattgaagatttcactcaggcctttgggatgactccagctgccttctctgctctgcctcgatggaagcaacaaaacctcaagaaagaaaaaggactattttgagaagagtagctgtggttgtaaagcagtaccctaccctgattgtagggtctcattttctcaccgatattagtcctacaccaattgaagtgaaattttgcagatgtgcctatgagcacaaacttctgtggcaaatgccagttttgtttaataatgtacctattccttcagaaagatgataccccaaaaggagcctatggtcctcatttcaacttctaaggtcgctagattgtttctatcctgaggtattgcatcaattttaatactcctatagttttctcttcttagaagagcacaaacactccatggaacattagagttctgaggcactaccctagcttgtcctctatcatgactcatttttatctatggcaggtaggctgaagcactttgcaggtttacatcttccccagagtaacagcttttccttttcacatatactttccttactgccttactcagtgggtaagttaaagggctgaaggagagttgaatggtccacaagactaccctcttaagaggtttcacaaattccaaacagtaccagtgagagcagcacttccactggggctaggcttgagacctaaaggcaagtatgaaatgcatatgctacttcactccctctcccaacccttaataatgaggcaaagcaagagcctagtgaaggccaatgctaggtttacaaacttacccagaagcctctgcaaagcttcacaggctcctcagatgaaaataacaggaatcaatggggactacggccagacactggtttgccattctgttccttttaagaagtaacagtgctgcaaggaagtccatgtcagaaagccaacagaaggtgatttccacaactttgaacaggttgttacaagtatcagcaagaatgtgtccttttcagaaataacagtcaaatcaaagaaggttaataaaggctttaatttcatacacacaaaaaaactctatgcataatttaaaaaggaaacaaaaacaaagaaaaaccgtaaaggatacagaggaacagttctgctaaaacacagataaaagtgccgctccatacaaaacataaagaatcagaatcaaaagtcactctgaacataaagaaaaaaaatcatctcacaaataatgtggccacagctgccagaaaacctggtagtggctcaattaggcaaagtgtaggaatctcatttttgtttttctctccttaagtttaaagaaacaacaatgacaataggccagagaagttagggagggaaagaaaagctcaaagggagggaaacctggggacaagaggtgtgcacacccacatgtggtctcactcttcacacaggcccactatttttgaagtagaccagtttagttgactgttcttctttgttctggcatctgactggaccaacctggaacctggtccagaccctcacccactctattcttatgccaatggacatacctatactttgaacctctgtacttttaagaaaagtccaatgttacaaaatcaaatgcttatattcagactggcacactttttaaataaaaactccatacacctcagacatatagcacacatggagacaacttactaattgtgtgtaagtatgatacaatgaatgagactgcctgaagtctagtaatcaaagcatgccataaggtgaatgattgtggttaaacacagcaaaataattgtcacaaaactttcaaggcctaacaaattagaattttccaataaaaaatatatattttttcagatgttaataagacatatcagtagagacaaaattaggattttgaagtaatgcaataaaaagatgttggagggcagaagtctatttagtttttgtatacacttgcaagagtgcattactcagtataaagcaaaatggggaggaaaaagacatccatccattttattggaacacttttatgtgacttgaatctggtgttaggttgttgatttttctaaaaatctcctatatatacaaaatccatatgtacttggagatccagctgttgccccctgtttaaaacaaaagaccacctcggggggtcaattaaattaaaaaggccctccaaccaccctaaatgggataactaagagtatctactgcagtcatttcagaggacagagaaggaaaatattttaatttgctttaatataacctcttttcagtagatcacaaatgagtttacaaactacttttttttctctttaatttaggtgtttgcagataattttcattatatccgtagctgtatgtgtgtatagttacataatggtaactacacacgatacagaagaatcagtaaattcatggattattttgctgaggttttaaattttaaagcctctgtttcagaattttatacttgatcaaggagaaaaataaatgtgtagtctaacatttgctttctggagttaattaactgatctgtaagaaccactgcatatgtcttaaaatgtaaacatatttacatttgttgtatttgttattgagcctttaaggttaggcccagaatgaacagaccatagcaagtaaacaaataatttttagaatcaaagtattaatagaagaccagttcatggatttgcttattctatcctgctgagacaaaactcatgagtgtgcacacacatgtgaatatatccctacgaaacagtctatcttctcataggcttaaattatagtcatggctattaaagaaattaacagcatccagccacatgcaactttccaaccttcagtactattaggtgattaaaatcaacaaatatgaagtttagttcatttttcccttaaaattccaacaaagatcaaaaggttgtatctagaactaattgccatcaagttccaattcaatgtcatttaaagtaatgtaaccacacatttggtattttcaataggaaggttaattaggtattgtgcaaactgcctgcaacggaagcactcagtccttatctaacttgtcccttcctggccccaacatgctaactgccccatccccaattctgggcaaactgatcacaatgtgcaaaaaataatatattatctatttataattttaaaatatatacagccagctcaaaaacaacaacaaaccccatcaacatagtccagctgaaatctccactggtagtcaaagaagtagattaaaggagtaaaggaaggagaaggctgatagggccacaagaatggacagacatcaagtaaaatttgagtcccaaacatgcaagtacatgagcagtgagataacttatatattccaataacctattttcaacaactcctgcccaagacatgaagatcaaatcaggtttctgaggtaagtgtacttctaaaccatacacacatgaaagctatgaaagcaattcaaatgaggctgcttcatgaggcaatctagacttatggcattatttctacttttctccatgttttaattgcagcctgcactttaaatctttcccaataatttttaacagtgcctctcaaatgcaaagacacgtaaaagaattaataactagccaaagaattttatcaccgcttcactcatttataagaaaaccaattatttccaagcaaaatcaaaccaaaccaaagaggctcctggtagaaatgaaacaaaactttaaagctagttttaaaacaaatattttcctctgctctaaactactctggcgttttctaccactctaccattttggaacattcattacaataaggtatataggtagatggtaggaggcaaagcatttatcagtagttgagcaaaactgctgaggccatttataattcaaagaatgaaaacttagaatagtttactacattagaatacatccaagttccaagagtaggactggagctctcttaaggcaatctttcagaaaagatgttgcatcttctgtgatgatggtttgtgttttttttgtttttgttttcgttttttttaatgagatggagtctcac

SEQ ID NO: 34220 - DNA, 1968 bp, Homo sapiens
  source 1..1968: mol_type = unassigned DNA
acaattccctgagatctcccaggtggcagctgcctccccaagacaggctgcactcaaactgtaccatgtgtctgactccgaggggaatctggtggtgagggaagtcgccacacggccactgacacaggacctgctcagtcacgaggactgttacatcctggaccaggggggcctgaagatctacgtgtggaaagggaagaaagccaatgagcaggagaagaagggagccatgagccatgcgctgaacttcatcaaagccaagcagtacccaccaagcacacaggtggaggtgcagaatgatggggctgagtcggccgtctttcagcagctcttccagaagtggacagcgtccaaccggacctcaggcctaggcaaaacccacactgtgggctccgtggccaaagtggaacaggtgaagttcgatgccacatccatgcatgtcaagcctcaggtggctgcccagcagaagatggtagatgatgggagtggggaagtgcaggtgtggcgcattgagaacctagagctggtacctgtggattccaagtggctaggccacttctatgggggcgactgctacctgctgctctacacctacctcatcggcgagaagcagcattacctgctctacgtttggcagggcagccaggccagccaagatgaaattacagcatcagcttatcaagccgtcatcctggaccagaagtacaatggtgaaccagtccagatccgggtcccaatgggcaaggagccacctcatcttatgtccatcttcaagggacgcatggtggtctaccagggaggcacctcccgaactaacaacttggagaccgggccctccacacggctgttccaggtccagggaactggcgccaacaacaccaaggcctttgaggtcccagcgcgggccaatttcctcaattccaatgatgtctttgtcctcaagacccagtcttgctgctatctatggtgtgggaagggttgtagcggggacgagcgggagatggccaagatggttgctgacaccatctcccggacggagaagcaagtggtggtggaagggcaggagccagccaacttctggatggccctgggtgggaaggccccctatgccaacaccaagagactacaggaagaaaacctggtcatcaccccccggctctttgagtgttccaacaagactgggcgcttcctggccacagagatccctgacttcaatcaggatgacttggaagaggatgatgtgttcctactagatgtctgggaccaggtcttcttctggattgggaaacatgccaacgaggaggagaagaaggccgcagcaaccactgcacaggaatacctcaagacccatcccagcgggcgtgaccctgagacccccatcattgtggtgaagcagggacacgagccccccaccttcacaggctggttcctggcttgggatcccttcaagtggagtaacaccaaatcctatgaggacctgaaggcggagcttggcaactctagggactggagccagatcactgctgaggtcacaagccccaaagtggacgtgttcaatgctaacagcaacctcagttctgggcctctgcccatcttccccctggagcagctagtgaacaagcctgtagaggagctccccgagggtgtggaccccagcaggaaggaggaacacctgtccattgaagatttcactcaggcctttgggatgactccagctgccttctctgctctgcctcgatggaagcaacaaaacctcaagaaagaaaaaggactattttgagaagagtagctgtggttgtaaagcagtaccctaccctgattgtagggtctcattttctcaccgatattagtcctacaccaattgaagtgaaattttgcagatgtgcctatgagcacaaacttctgtggcaaatgccagttttgtttaataatgtacctattccttcagaaagatgataccccaaaagg

SEQ ID NO: 34221 - DNA, 1454 bp, Homo sapiens
  source 1..1454: mol_type = unassigned DNA
caggctcactcaccatgaccaagctgagcgcccaagtcaaaggctctctcaacatcaccaccccggggctgcagatatggaggatcgaggccatgcagatggtgcctgttccttccagcacctttggaagcttcttcgatggtgactgctacatcatcctggctatccacaagacagccagcagcctgtcctatgacatccactactggattggccaggactcatccctggatgagcagggggcagctgccatctacaccacacagatggatgacttcctgaagggccgggctgtgcagcaccgcgaggtccagggcaacgagagcgaggccttccgaggctacttcaagcaaggccttgtgatccggaaagggggcgtggcttctggcatgaagcacgtggagaccaactcctatgacgtccagaggctgctgcatgtcaagggcaagaggaacgtggtagctggagaggtagagatgtcctggaagagtttcaaccgaggggatgttttcctcctggaccttgggaagcttatcatccagtggaatggaccggaaagcacccgtatggagagactcaggggcatgactctggccaaggagatccgagaccaggagcggggagggcgcacctatgtaggcgtggtggacggagagaatgaattggcatccccgaagctgatggaggtgatgaaccacgtgctgggcaagcgcagggagctgaaggcggccgtgcccgacacggtggtggagccggcactcaaggctgcactcaaactgtaccatgtgtctgactccgaggggaatctggtggtgagggaagtcgccacacggccactgacacaggacctgctcagtcacgaggactgttacatcctggaccaggggggcctgaagatctacgtgtggaaagggaagaaagccaatgagcaggagaagaagggagccatgagccatgcgctgaacttcatcaaagccaagcagtacccaccaagcacacaggtggaggtgcagaatgatggggctgagtcggccgtctttcagcagctcttccagaagtggacagcgtccaaccggacctcaggcctaggcaaaacccacactgtgggctccgtgggtgagggccaggcgggggcagtgagggagccaggatccaggagctgggccaggagagccacttggtccaccacccaccctccttccctgacgtgcatcttcaacgaagacttttacgctggctctgggcttgtcctagcagatggggacgtggacaaactctagttgtcacaaaaagggagctgagagggctgggcatggtggcacatgcctgtaatcccagcactttgggaggctgaggcgggtggatcacctgaggtcaggagtttgagattagcctaacatggtgaaaccccgtctctactgaaaaaaagaactaataaattagccaagcatggt

SEQ ID NO: 34222 - DNA, 1892 bp, Homo sapiens
  source 1..1892: mol_type = unassigned DNA
gcgcatccagctccagggaccctaggttttctatgggattcccaatctgcagcagagatttacccgagcgtgttgcggcagcggctgggcttgcaaggcgcgatccaagagggatttaagcagcccagagctccagagaaaaagagagcgagagagaaccacacacagagacggcttaagcgtttacccgaattaaatatatatttttaaaaagaactgttgagttttatcattttcgttaagtgaccgtgcgcagcgctgtaactgcaggatggggaagcagaatagcaaactggcccctgaagtgatggaggacctggtgaagagcacagagtttaatgagcatgaactcaagcagtggtacaaaggatttctcaaggactgtccaagtgggaggctaaatctcgaggaatttcagcagctctatgtgaagttctttccttatggagacgcctccaagtttgcccagcatgccttccgaaccttcgacaagaatggggacggcaccattgacttccgagagttcatctgcgctctgtccatcacctccaggggcagctttgagcagaagctgaactgggccttcaatatgtatgacctggatggtgatggcaagatcacccgagtggagatgctggagatcatcgaggctatctacaaaatggtaggcactgtgatcatgatgaaaatgaatgaggatggcctgacgcctgagcagcgagtagacaagattttcagcaagatggataagaacaaagatgaccagattacactggatgaattcaaagaagctgcaaagagcgacccttccattgtattacttctgcagtgcgacatccagaaatgagctgatgtcaatgctatggactgcacaaaagtctcaatgttccattcagtctgcagctattcacacacacacacacacacacacacacacacacacacacacacacaaatattgcttggactacctataaatggacttgcttcttgtgtttgaaacactcgtgtgcatgagaatgtcatttgctaatgaattttaaaagcatatataaaacaaaacaaacaacctgccacaatgtgatatgtgtaatatcatttcataaaaatccctcttcctccaaagcctgggcagaaatgtgctgcaaagagttatatgacttcttgttcatgttttgctaatgctcgtatctccttgattacataatgttagtagcactgagacccccatggtaatgtaacttaattataagctatgtcactaccctcctgtaaaatactattggacagacacagagggacccttggctcctgtgtctggtccacacaccacagaagcttgtattatcagtgaatataaatgtactacatttgcatgccttttgggtttgccttaattcttacctcatttgcatcctatcgatctggaaagagctgttttggatgaatgcagtataaaatgtaaaaaccctgctaaatgacttattgattaagtatatctatctatatatacatatacacaaagatattatttatcgaaagtaaaaaagatggaagtgtattggtttctgtttgaattttcaaaggcttccaatgtggtggcaataaatgtcccaaataaatttataacaattgattttccccctaattcttattttataattttaaaattgcagcagttgctagcaacaacttactaaatctactcttaaatatacaactttggaatttgaagaattaatgacaacaaaagggaaaaaagcaactttccaacttttcatccaggctcccaaaagagggacaacgaacatggcatgtgaaaagtaaaacagatttgttcattccgaaaaaaaaatgttcattctatgacaataaattttatctcagtgtga

SEQ ID NO: 34223 - DNA, 1543 bp, Homo sapiens
  source 1..1543: mol_type = unassigned DNA
caaccttcccgaggcgtcctgcccgggaagccagttcctgggttctgggctggctaggttggcagcgaatgaggcttaggcatcactgcctgaggccctcacttagcatgtcgacagccacagacttgtctggcggagtttctcctggtgcccacttaagtagtctcaagtttgttcaaagctggactcctcgacttggaaccaggagcagctggagatttgtcaatttagagctcatttgccacgggagacgctcttggtgtccccagcaccgaagggcaggatggggaagcagaatagcaaactggcccctgaagtgatggaggacctggtgaagagcacagagtttaatgagcatgaactcaagcagtggtacaaaggatttctcaaggactgtccaagtgggaggctaaatctcgaggaatttcagcagctctatgtgaagttctttccttatggagacgcctccaagtttgcccagcatgccttccgaaccttcgacaagaatggggacggcaccattgacttccgagagttcatctgcgctctgtccatcacctccaggggcagctttgagcagaagctgaactgggccttcaatatgtatgacctggatggtgatggcaagatcacccgagtggagatgctggagatcatcgaggctatctacaaaatggtaggcactgtgatcatgatgaaaatgaatgaggatggcctgacgcctgagcagcgagtagacaagattttcagcaagatggataagaacaaagatgaccagattacactggatgaattcaaagaagctgcaaagagcgacccttccattgtattacttctgcagtgcgacatccagaaatgagctgatgtcaatgctatggactgcacaaaagtctcaatgttccattcagtctgcagctattcacacacacacacacacacacacacacacacacacacacacacacaaatattgcttggactacctataaatggacttgcttcttgtgtttgaaacactcgtgtgcatgagaatgtcatttgctaatgaattttaaaagcatatataaaacaaaacaaacaacctgccacaatgtgatatgtgtaatatcatttcataaaaatccctcttcctccaaagcctgggcagaaatgtgctgcaaagagttatatgacttcttgttcatgttttgctaatgctcgtatctccttgattacataatgttagtagcactgagacccccatggtaatgtaacttaattataagctatgtcactaccctcctgtaaaatactattggacagacacagagggacccttggctcctgtgtctggtccacacaccacagaagcttgtattatcagtgaatataaatgtactacatttgcatgccttttgggtttgccttaattcttacctcatttgcatcctatcgatctggaaagagctgttttggatgaatgcagtataaaatgtaaaaaccctgctaaatgacttattgattaagtatatctatctatatatacatatacacaaagatatta

SEQ ID NO: 34224 - DNA, 2725 bp, Homo sapiens
  source 1..2725: mol_type = unassigned DNA
agactagatttaagacaggtgaaactgagatgctttcttagtttgtcttagacagatttaagtagctaattgaccgattgtgaagttttccggttgctgataaaactattgagcgggtacagtcgagtagcaacctgtcatccgtgggattggtgcaccatttttctcactgtggaagggcagcaaaggtgtttgctaagtaaaactgagtggatgagattggtatggaaatcatggttgatctctgagcgggatgttagtgtttaagatccacggagtcaggcgcaaaatgagcacatttctctcagtattcagaaatgagtagataatttttttcgtctttgatttttgtcacaatggtgaatgggcagaaaagggaaagatgctctactgcactgtcgattttgaacggagtcacaggctcggtcgctgaatggggactgtcagacccaaactagttacctgcctttgcattccgtgttcgccatccggaatctggggttaaaaaatgtaaatcaaggcaggatggggaagcagaatagcaaactggcccctgaagtgatggaggacctggtgaagagcacagagtttaatgagcatgaactcaagcagtggtacaaaggatttctcaaggactgtccaagtgggaggctaaatctcgaggaatttcagcagctctatgtgaagttctttccttatggagacgcctccaagtttgcccagcatgccttccgaaccttcgacaagaatggggacggcaccattgacttccgagagttcatctgcgctctgtccatcacctccaggggcagctttgagcagaagctgaactgggccttcaatatgtatgacctggatggtgatggcaagatcacccgagtggagatgctggagatcatcgaggctatctacaaaatggtaggcactgtgatcatgatgaaaatgaatgaggatggcctgacgcctgagcagcgagtagacaagattttcagcaagatggataagaacaaagatgaccagattacactggatgaattcaaagaagctgcaaagagcgacccttccattgtattacttctgcagtgcgacatccagaaatgagctgatgtcaatgctatggactgcacaaaagtctcaatgttccattcagtctgcagctattcacacacacacacacacacacacacacacacacacacacacacacaaatattgcttggactacctataaatggacttgcttcttgtgtttgaaacactcgtgtgcatgagaatgtcatttgctaatgaattttaaaagcatatataaaacaaaacaaacaacctgccacaatgtgatatgtgtaatatcatttcataaaaatccctcttcctccaaagcctgggcagaaatgtgctgcaaagagttatatgacttcttgttcatgttttgctaatgctcgtatctccttgattacataatgttagtagcactgagacccccatggtaatgtaacttaattataagctatgtcactaccctcctgtaaaatactattggacagacacagagggacccttggctcctgtgtctggtccacacaccacagaagcttgtattatcagtgaatataaatgtactacatttgcatgccttttgggtttgccttaattcttacctcatttgcatcctatcgatctggaaagagctgttttggatgaatgcagtataaaatgtaaaaaccctgctaaatgacttattgattaagtatatctatctatatatacatatacacaaagatattatttatcgaaagtaaaaaagatggaagtgtattggtttctgtttgaattttcaaaggcttccaatgtggtggcaataaatgtcccaaataaatttataacaattgattttccccctaattcttattttataattttaaaattgcagcagttgctagcaacaacttactaaatctactcttaaatatacaactttggaatttgaagaattaatgacaacaaaagggaaaaaagcaactttccaacttttcatccaggctcccaaaagagggacaacgaacatggcatgtgaaaagtaaaacagatttgttcattccgaaaaaaaaatgttcattctatgacaataaattttatctcagtgtgactttggtgctaacaacgtatgttcagtgcaactacgtggagctgtgcacacacagcaggtaggctgcaggtgtcccccaacataagtcagtaggaaagaagacatctgtcttcccaaatctaaagtaggcaaaaaataacagaagtagctatttttaataacagaacagaactctgactcttttgatcttgaaggaggcagaagagattccatcaaaacctctaaaagcaggtttgcattttcagaacatgcccccctagagagttgagttttttacacagcactacccggtagtactttctctgatgatgggaaggtctacatctgcacagcacgctagctataactgcacatatggctactgagcacttcaagtatggctagcgtgactaaggaactgaattttatactgtaattaagtgtaatttgccacatatagctagtggctttagtaacagacagtttagtgctatattatttattcaagtactttttatcaaattcgttttttaccgaattcgttttttaccattctttatttgtcttaggatcattacataacactaaactagggtctaa

SEQ ID NO: 34225 - DNA, 562 bp, Homo sapiens
  source 1..562: mol_type = unassigned DNA
aatctgcagcagagatttacccgagcgtgttgcggcagcggctgggcttgcaaggcgcgatccaagagggatttaagcagcccagagctccagagaaaaagagagcgagagagaaccacacacagagacggcttaagcgtttacccgaattaaatatatatttttaaaaagaactgttgagttttatcattttcgttaagtgaccgtgcgcagcgctgtaactgacttactggattatttccaggcaggatggggaagcagaatagcaaactggcccctgaagtgatggaggacctggtgaagagcacagagtttaatgagcatgaactcaagcagtggtacaaaggatttctcaaggactgtccaagtgggaggctaaatctcgaggaatttcagcagctctatgtgaagttctttccttatggagacgcctccaagtttgcccagcatgccttccgaaccttcgacaagaatggggacggcaccattgacttccgagagttcatctgcgctctgtccatcacctccaggggcagctttgagcagaagctgaactgggcct

SEQ ID NO: 34226 - DNA, 576 bp, Homo sapiens
  source 1..576: mol_type = unassigned DNA
agtgcatacagaaggcgcttggctcagggtacacagggcaagaagcctcggatcccagctccctttaacacacattttttcaacgccgttctggaccgagactgtccggggcactgggtgctgcaggacccggctcccagtactcctagcagaagaccctctgatgaaatggcccatgacaaaatgaccaccataaccgttccttcagtaagccaggcaggatggggaagcagaatagcaaactggcccctgaagtgatggaggacctggtgaagagcacagagtttaatgagcatgaactcaagcagtggtacaaaggatttctcaaggactgtccaagtgggaggctaaatctcgaggaatttcagcagctctatgtgaagttctttccttatggagacgcctccaagtttgcccagcatgccttccgaaccttcgacaagaatggggacggcaccattgacttccgagagttcatctgcgctctgtccatcacctccaggggcagctttgagcagaagctgaactgggccttcaatatgtatgacctggatggtgatggcaagatcacccgag

SEQ ID NO: 34227 - DNA, 948 bp, Homo sapiens
  source 1..948: mol_type = unassigned DNA
tccagagaggctcgcgccttgcttgctaaggaaccatgaccggccgggactcgctttccgacgggcgcactagcagcagggcgctggtgcctggcggttcccctaggggctcgcgcccccggggcttcgccatcacggacctgctgggcttggaggccgagctgccggcgcccgctggcccaggacagggatctggctgcgagggtccggcagtcgcgccgtgcccgggcccggggcttgacggctccagcctggcgcgtggggccctaccgctgggactcggcctcctctgtggcttcggcacgcagccgccggcggccgctcgagcaccctgcctgctcctagcggacgtgccgttcctgccgcccaggggccccgagcccgctgccccgctggctcccagccgtccgccgcctgcgctcggccgccagaagcgcagcgacagcgtctccacgtccgatgaggacagccagtctgaagacaggaatgacctaaaggcatcccccaccttgggcaagaggaagaagcggcggcacaggacagttttcactgctcaccagctggaagagttggagaaggcattcagcgaggcccactaccctgatgtgtatgcccgagaaatgctggctgtgaaaactgagctccccgaagaccggatacaggtgtctggggtcccttttctccgctccaaagataccacagagaacgtgtcattcccacattcagtgagccaatcagcagtcccttctctatagccaacacgctccctttgcatagaaactgagggtcccttagctgaaggcaccacaagagcttgcccctatgaccctcatgccttttttcattttattattatttagtatcaaatcattctttaaaatcacatgataatgtgtgctgcaactagaaactataaagatatgtcaatgaaaaaaaaaaaaaagagac

SEQ ID NO: 34228 - DNA, 2157 bp, Homo sapiens
  source 1..2157: mol_type = unassigned DNA
ggggtggggtgggctggacagaagagaggaggagaaggaggtgactgaggggactgcagctgggtgggcggtaaccgaggggaggggaactggtggcgtccccatctcgcggggtccggaacggcgacgcgcccgcgcccagctgattggagcccttcaggcctcccgcgcccgaccggcagcccaatcctataaagcttcctctaagctgggccctccgcaaacgggatccagagaggctcgcgccttgcttgctaaggaaccatgaccggccgggactcgctttccgacgggcgcactagcagcagggcgctggtgcctggcggttcccctaggggctcgcgcccccggggcttcgccatcacggacctgctgggcttggaggccgagctgccggcgcccgctggcccaggacagggatctggctgcgagggtccggcagtcgcgccgtgcccgggcccggggcttgacggctccagcctggcgcgtggggccctaccgctgggactcggcctcctctgtggcttcggcacgcagccgccggcggccgctcgagcaccctgcctgctcctagcggacgtgccgttcctgccgcccaggggccccgagcccgctgccccgctggctcccagccgtccgccgcctgcgctcggccgccagaagcgcagcgacagcgtctccacgtccgatgaggacagccagtctgaagacaggaatgacctaaaggcatcccccaccttgggcaagaggaagaagcggcggcacaggacagttttcactgctcaccagctggaagagttggagaaggcattcagcgaggcccactaccctgatgtgtatgcccgagaaatgctggctgtgaaaactgagctccccgaagaccggatacaggtctggtttcaaaaccgcagggccaaatggcgcaagcgggagaagcgctggggcggcagcagcgtgatggccgagtacgggctgtacggggccatggtgcgccactgcatcccgctgccagactccgtgctcaactccgccgagggcggcctgctgggctcctgcgcgccctggctcctggggatgcataaaaaatccatggggatgataaggaagccaggaagtgaagataagttggcaggactctggggctctgaccacttcaaagaaggttctagccagagtgagtcaggatcacagagaggctcagataaagtgagccctgagaatggcttggaagatgtggctattgacctctccagctctgcccggcaggagaccaagaaagtgcaccctggggctggtgctcaaggaggctccaactccacggcactggaggggccccagccagggaaggtgggagccacatgagacccacaggtcccactgtcaaaggctgaaaatgtgcatattcctcactggcattttccaaaagacaaaaattgtccaagacatatactctcagtttgattttcttctgacaatgtcaagataaaatgcaatgccacttgctttaagaggacagatgagtgacctagggaaaattctatttcattctagaatggaaacggttccttaatggcactttaaccagttaacttggtgcaaaacttttgattctcttttgtagcttgagcagggaggatccgaagttcaaaaatgatttcactgctgggcatcatttgagatgtgtggttcaatgtactgtatagatgaataggttaggtctgatgtcctcattctcaattaggaaatataaaattgtttaatatccagaagaatctgatatcatcatagtgaagactccatacagacacatgaatgaattatattgtctttaccttgaacttggccttggatatttcaattttcttgttagggagtaattttgtgttttcttgagtgtcacttgataggctatgcatattggaattcaaagaaacccatactctagtcgtttctgcatttcctttaaaaatagcatgggatcatatttaaacaattgttggatagctggaaacagtgtttttaggtcagaccaggcttttggtctttcaaaatttgtgattgaaagcactttagtgacttggattttgtaaatctttcctttcctgcgtttcctttgccatttatttattctttaaaaataaacattttgtggtgtgt

SEQ ID NO: 34229 - DNA, 696 bp, Homo sapiens
  source 1..696: mol_type = unassigned DNA
ggggtggggtgggctggacagaagagaggaggagaaggaggtgactgaggggactgcagctgggtgggcggtaaccgaggggaggggaactggtggcgtccccatctcgcggggtccggaacggcgacgcgcccgcgcccagctgattggagcccttcaggcctcccgcgcccgaccggcagcccaatcctataaagcttcctctaagctgggccctccgcaaacgggatccagagaggctcgcgccttgcttgctaaggaaccatgaccggccgggactcgctttccgacgggcgcactagcagcagggcgctggtgcctggcggttcccctaggggctcgcgcccccggggcttcgccatcacggacctgctgggcttggaggccgagctgccggcgcccgctggcccaggacagggatctggctgcgagggtccggcagtcgcgccgtgcccgggcccggggcttgacggctccagcctggcgcgtggggccctaccgctgggactcggcctcctctgtggcttcggcacgcagccgccggcggccgctcgagcaccctgcctgctcctagcggacgtgccgttcctgccgcccaggggccccgagcccgctgccccgctggctcccagccgtccgccgcctgcgctcggccgccagaagcgcagcgacagcgtctccacgtccgcgatgtga

SEQ ID NO: 34230 - DNA, 1107 bp, Homo sapiens
  source 1..1107: mol_type = unassigned DNA
ggggtggggtgggctggacagaagagaggaggagaaggaggtgactgaggggactgcagctgggtgggcggtaaccgaggggaggggaactggtggcgtccccatctcgcggggtccggaacggcgacgcgcccgcgcccagctgattggagcccttcaggcctcccgcgcccgaccggcagcccaatcctataaagcttcctctaagctgggccctccgcaaacgggatccagagaggctcgcgccttgcttgctaaggaaccatgaccggccgggactcgctttccgacgggcgcactagcagcagggcgctggtgcctggcggttcccctaggggctcgcgcccccggggcttcgccatcacggacctgctgggcttggaggccgagctgccggcgcccgctggcccaggacagggatctggctgcgagggtccggcagtcgcgccgtgcccgggcccggggcttgacggctccagcctggcgcgtggggccctaccgctgggactcggcctcctctgtggcttcggcacgcagccgccggcggccgctcgagcaccctgcctgctcctagcggacgtgccgttcctgccgcccaggggccccgagcccgctgccccgctggctcccagccgtccgccgcctgcgctcggccgccagaagcgcagcgacagcgtctccacgtccgatgaggacagccagtctgaagacaggaatgacctaaaggcatcccccaccttgggcaagaggaagaagcggcggcacaggacagttttcactgctcaccagctggaagagttggagaaggcattcagcgaggcccactaccctgatgtgtatgcccgagaaatgctggctgtgaaaactgagctccccgaagaccggatacaggtctggtttcaaaaccgcagggccaaatggcgcaagcgggagaagcgctggggcggcagcagcgtgatggccgagtacgggctgtacggggccatggtgcgccactgcatcccgctgccagactccgtgctcaactccgccgagggcggcctgctgggctcctgcgcgccctggctcctggagggtgagacattgggctgcagagaaatgaagtga

SEQ ID NO: 34231 - DNA, 921 bp, Homo sapiens
  source 1..921: mol_type = unassigned DNA
ggggtggggtgggctggacagaagagaggaggagaaggaggtgactgaggggactgcagctgggtgggcggtaaccgaggggaggggaactggtggcgtccccatctcgcggggtccggaacggcgacgcgcccgcgcccagctgattggagcccttcaggcctcccgcgcccgaccggcagcccaatcctataaagcttcctctaagctgggccctccgcaaacgggatccagagaggctcgcgccttgcttgctaaggaaccatgaccggccgggactcgctttccgacgggcgcactagcagcagggcgctggtgcctggcggttcccctaggggctcgcgcccccggggcttcgccatcacggacctgctgggcttggaggccgagctgccggcgcccgctggcccaggacagggatctggctgcgagggtccggcagtcgcgccgtgcccgggcccggggcttgacggctccagcctggcgcgtggggccctaccgctgggactcggcctcctctgtggcttcggcacgcagccgccggcggccgctcgagcaccctgcctgctcctagcggacgtgccgttcctgccgcccaggggccccgagcccgctgccccgctggctcccagccgtccgccgcctgcgctcggccgccagaagcgcagcgacagcgtctccacgtccgatgaggacagccagtctgaagacaggaatgacctaaaggcatcccccaccttgggcaagaggaagaagcggcggcacaggacagttttcactgctcaccagctggaagagttggagaaggcattcagcgaggcccactaccctgatgtgtatgcccgagaaatgctggctgtgaaaactgagctccccgaagaccggatacagagggtgagacattgggctgcagagaaatga

SEQ ID NO: 34232 - DNA, 1977 bp, Homo sapiens
  source 1..1977: mol_type = unassigned DNA
tccagagaggctcgcgccttgcttgctaaggaaccatgaccggccgggactcgctttccgacgggcgcactagcagcagggcgctggtgcctggcggttcccctaggggctcgcgcccccggggcttcgccatcacggacctgctgggcttggaggccgagctgccggcgcccgctggcccaggacagggatctggctgcgagggtccggcagtcgcgccgtgcccgggcccggggcttgacggctccagcctggcgcgtggggccctaccgctgggactcggcctcctctgtggcttcggcacgcagccgccggcggccgctcgagcaccctgcctgctcctagcggacgtgccgttcctgccgcccaggggccccgagcccgctgccccgctggctcccagccgtccgccgcctgcgctcggccgccagaagcgcagcgacagcgtctccacgtccgatgaggacagccagtctgaagacaggaatgacctaaaggcatcccccaccttgggcaagaggaagaagcggcggcacaggacagttttcactgctcaccagctggaagagttggagaaggcattcagcgaggcccactaccctgatgtgtatgcccgagaaatgctggctgtgaaaactgagctccccgaagaccggatacaggtctggtttcaaaaccgcagggccaaatggcgcaagcgggagaagcgctggggcggcagcagcgtgatggccgagtacgggctgtacggggccatggtgcgccactgcatcccgctgccagactccgtgctcaactccgccgagggcggcctgctgggctcctgcgcgccctggctcctggtgcaaacttctgctcctggaggctcccgttcactggactttgcaggagacacacaggctccccagaccccgtggtggtgcctgatgaccttcagctgaaccctgtaatgctgctaaagtctgcccctctggagaagtgctcaggtagcattgttctgcctcaggaagcatgccgattttcctgtgtcatccttgatgatcactgctaccagacttgccccctgcagggcaccccatgtgcaaggaattcaacaacctaggagttgaaagcattggtctcccaagttcagtgtgttcttttccgtatctattaccagctgatgagaataaacctgcagtcatgacagctaggtcctagtgacaggtgcagaaagctgctcttacagaaactcccctccttattaagaggctttgtctatcactcggaactgcttctactcaagattatctgttgaaagggaactgtccataccagggcattgttctgacttttctggacttcctcaacccaaaatgccttgaagaaaaaaaaaaaagaccctgagtgttagggcagggtctcactctgtctccaggctggagtgcagtggcacaatcatagctcaccgcaacctctaactcctgggctgaagtgatcctcccacctcagtctcctatgttgctaggattacagcgtgagccactgccccagctactccaacttaagagttcccccaaggctggctgcccttctcctctccttccatcatgaatgacacatgggcatccccttcggctagcatggctgacctgtgcctgcctgggtgctcagcttggcacccatgtgagtttgcagcctgaaattttaaatggaggagtttctgtgcttttctgccctgattcctcttactgaccctctaagtcaccagctgtggtcgtctcctctttgacccctgatctcaacccgggctttgaaatgtgtttgttcacataattgtccattacccatccttcctgtcattgcagaatctgttgtctcatactgacattttaagactttttttcactttcttctgttgaagatcacctactaagaagtacttcctccttttcattctttctttataagaattaattaaattttaattgacaaaaa

SEQ ID NO: 34233 - DNA, 1195 bp, Homo sapiens
  source 1..1195: mol_type = unassigned DNA
tccagagaggctcgcgccttgcttgctaaggaaccatgaccggccgggactcgctttccgacgggcgcactagcagcagggcgctggtgcctggcggttcccctaggggctcgcgcccccggggcttcgccatcacggacctgctgggcttggaggccgagctgccggcgcccgctggcccaggacagggatctggctgcgagggtccggcagtcgcgccgtgcccgggcccggggcttgacggctccagcctggcgcgtggggccctaccgctgggactcggcctcctctgtggcttcggcacgcagccgccggcggccgctcgagcaccctgcctgctcctagcggacgtgccgttcctgccgcccaggggccccgagcccgctgccccgctggctcccagccgtccgccgcctgcgctcggccgccagaagcgcagcgacagcgtctccacgtccgatgaggacagccagtctgaagacaggaatgacctaaaggcatcccccaccttgggcaagaggaagaagcggcggcacaggacagttttcactgctcaccagctggaagagttggagaaggcattcagcgaggcccactaccctgatgtgtatgcccgagaaatgctggctgtgaaaactgagctccccgaagaccggatacagtgcaaacttctgctcctggaggctcccgttcactggactttgcaggagacacacaggctccccagaccccgtggtggtgcctgatgaccttcagctgaaccctgtaatgctgctaaagtctgcccctctggagaagtgctcaggtagcattgttctgcctcaggaagcatgccgattttcctgtgtcatccttgatgatcactgctaccagacttgccccctgcagggcaccccatgtgcaaggaattcaacaacctaggagttgaaagcattggtctcccaagttcagtgtgttcttttccgtatctattaccagctgatgagaataaacctgcagtcatgacagctaggtcctagtgacaggtgcagaaagctgctcttacagaaactcccctccttattaagaggctttgtctatcactcggaactgcttctactcaagattatctgttgaaagggaactgtccataccagggcattgttctgacttttctggacttcctcaacccaaaatgccttgaagaaaaaaaaaa

SEQ ID NO: 34234 - DNA, 4773 bp, Homo sapiens
  source 1..4773: mol_type = unassigned DNA
ctgcttgtcaaaaggcggcagcggagccgtgtgcgccgggagcgcggaacagcttgtccacccgccggccggaccagggctcctgaacctagcccagctggacggagaaatggactctagcctcctctgatagcctcatgccaggccccgtgcacattgctttgcttgcctccctcaatcctcatagcttctctttgggaagcctttgggtctgaagtgtctgtgagacctcacagaagagcacccctgggctccacttacctgccccctgctccttcagggatggaggcaatggcggccagcacttccctgcctgaccctggagactttgaccggaacgtgccccggatctgtggggtgtgtggagaccgagccactggctttcacttcaatgctatgacctgtgaaggctgcaaaggcttcttcaggcgaagcatgaagcggaaggcactattcacctgccccttcaacggggactgccgcatcaccaaggacaaccgacgccactgccaggcctgccggctcaaacgctgtgtggacatcggcatgatgaaggagttcattctgacagatgaggaagtgcagaggaagcgggagatgatcctgaagcggaaggaggaggaggccttgaaggacagtctgcggcccaagctgtctgaggagcagcagcgcatcattgccatactgctggacgcccaccataagacctacgaccccacctactccgacttctgccagttccggcctccagttcgtgtgaatgatggtggagggagccatccttccaggcccaactccagacacactcccagcttctctggggactcctcctcctcctgctcagatcactgtatcacctcttcagacatgatggactcgtccagcttctccaatctggatctgagtgaagaagattcagatgacccttctgtgaccctagagctgtcccagctctccatgctgccccacctggctgacctggtcagttacagcatccaaaaggtcattggctttgctaagatgataccaggattcagagacctcacctctgaggaccagatcgtactgctgaagtcaagtgccattgaggtcatcatgttgcgctccaatgagtccttcaccatggacgacatgtcctggacctgtggcaaccaagactacaagtaccgcgtcagtgacgtgaccaaagccggacacagcctggagctgattgagcccctcatcaagttccaggtgggactgaagaagctgaacttgcatgaggaggagcatgtcctgctcatggccatctgcatcgtctccccagatcgtcctggggtgcaggacgccgcgctgattgaggccatccaggaccgcctgtccaacacactgcagacgtacatccgctgccgccacccgcccccgggcagccacctgctctatgccaagatgatccagaagctagccgacctgcgcagcctcaatgaggagcactccaagcagtaccgctgcctctccttccagcctgagtgcagcatgaagctaacgccccttgtgctcgaagtgtttggcaatgagatctcctgactaggacagcctgtggcggtgcctgggtggggctgctcctccagggccacgtgccaggcccggggctggcggctactcagcagccctcctcaccccgtctggggttcagcccctcctctgccacctcccctatccacccagcccattctctctcctgtccaacctaacccctttcctgcgggcttttccccggtcccttgagacctcagccatgaggagttgctgtttgtttgacaaagaaacccaagtgggggcagagggcagaggctggaggcagggccttgcccagagatgcctccaccgctgcctaagtggctgctgactgatgttgagggaacagacaggagaaatgcatccattcctcagggacagagacacctgcacctccccccactgcaggccccgcttgtccagcgcctagtggggtctccctctcctgcctactcacgataaataatcggcccacagctcccaccccacccccttcagtgcccaccaacatcccattgccctggttatattctcacgggcagtagctgtggtgaggtgggttttcttcccatcactggagcaccaggcacgaacccacctgctgagagacccaaggaggaaaaacagacaaaaacagcctcacagaagaatatgacagctgtccctgtcaccaagctcacagttcctcgccctgggtctaaggggttggttgaggtggaagccctccttccacggatccatgtagcaggactgaattgtccccagtttgcagaaaagcacctgccgacctcgtcctccccctgccagtgccttacctcctgcccaggagagccagccctccctgtcctcctcggatcaccgagagtagccgagagcctgctcccccaccccctccccaggggagagggtctggagaagcagtgagccgcatcttctccatctggcagggtgggatggaggagaagaattttcagaccccagcggctgagtcatgatctccctgccgcctcaatgtggttgcaaggccgctgttcacccacagggctaagagctagcgctgccgcaccccagagtgtgggaagggagagcggggcagtctcgggtggctagtcagagagagtgtttgggggttccgtgatgtagggtaaggtgccttcttattctcactccaccacccaaaagtcaaaaggtgcctgtgaggcaggggcggagtgatacaacttcaagtgcatgctctctgcagccagcccagcccagctggtgggaagcgtctgtccgtttactccaaggtggggtctttgtgagagtgagctgtaggtgtgcgggaccggtacagaaaggcgttcttcgaggtggatcacagaggcttcttcagatcagtgcttgagtttggggaatgcggccgcattccctgagtcaccaggaatgttaaagtcagtgggaacgtgactgccccaactcctggaagctgtgtccttgcacctgcatccgtagttccctgaaaacccagagaggaatcagacttcacactgcaagagccttggtgtccacctggccccatgtctctcagaattcttcaggtggaaaaacatctgaaagccacgttccttactgcagaatagcatatatatcgcttaatcttaaatttattagatatgagttgttttcagactcagactccatttgtattatagtctaatatacagggtagcaggtaccactgatttggagatatttatggggggagaacttacattgtgaaacttctgtacattaattattattgctgttgttattttacaagggtctagggagagacccttgtttgattttagctgcagaacgtattggtccagcttgctcttcagtgggagaaaacacttgtaagttgctaaacgagtcaatcccctcattcaggaaaactgacagaggagggcgtgactcacccaagcatatataactagctagaagtgggccaggacaggcccggcgcggtggctcacgcctgtaatcccagcagtttgggaggtcgaggtaggtggatcacctgaggtcgggagttcgagaccaacctgaccaacatggagaaaccctgtctctattaaaaatacaaaaaaaaaaaaaaaaaaaatagccgggcatggtggcgcaagcctgtaatcccagctactcaggaggctgaggcagaagaattgaacccaggaggtggaggttgcagtgagctgagatcgtgccgttactctccaacctggacaacaagagcgaaactccgtcttagaagtggaccaggacaggaccagattttggagtcatggtccggtgtccttttcactacaccatgtttgagctcagacccccactctcattccccaggtggctgacccagtccctgggggaagccctggatttcagaaagagcaagtctggatctgggaccctttccttccttccctggcttgtaactccaccaacccatcagaaggagaaggaaggagactcacctctgcctcaatgtgaatcagaccctaccccaccacgatgtggccctggcctgctgggctctccacctcagccttggataatgctgttgcctcatctataacatgcatttgtctttgtaatgtcaccaccttcccagctctccctctggccctgccttcttcggggaactcctggaaatatcagttactcagccctgggccccaccacctaggccactcctccaaaggaagtctaggagctgggaggaaaagaaaagaggggaaaatgagtttttatggggctgaacggggagaaaaggtcatcatcgattctactttagaatgagagtgtgaaatagacatttgtaaatgtaaaacttttaaggtatatcattataactgaaggagaaggtgccccaaaatgcaagattttccacaagattcccagagacaggaaaatcctctggctggctaactggaagcatgtaggagaatccaagcgaggtcaacagagaaggcaggaatgtgtggcagatttagtgaaagctagagatatggcagcgaaaggatgtaaacagtgcctgctgaatgatttccaaagagaaaaaaagtttgccagaagtttgtcaagtcaaccaatgtagaaagctttgcttatggtaataaaaatggctcatacttatatagcacttactttgttgcaagtactgctgtaaataaatgctttatgcaaacc

SEQ ID NO: 34235 - DNA, 4762 bp, Homo sapiens
  source 1..4762: mol_type = unassigned DNA
ggggacaggggtgaggccagagacggacggacgcaggggcccggcccaaggcgagggagaacagcggcactgaggcagaaaggaagagggcggtgtgttcacccgcagcccaatccatcactcagcaactcctagacgctggtagaaagttcctccgaggagcctgccatccagtcgtgcgtgcagaagcctttgggtctgaagtgtctgtgagacctcacagaagagcacccctgggctccacttacctgccccctgctccttcagggatggaggcaatggcggccagcacttccctgcctgaccctggagactttgaccggaacgtgccccggatctgtggggtgtgtggagaccgagccactggctttcacttcaatgctatgacctgtgaaggctgcaaaggcttcttcaggcgaagcatgaagcggaaggcactattcacctgccccttcaacggggactgccgcatcaccaaggacaaccgacgccactgccaggcctgccggctcaaacgctgtgtggacatcggcatgatgaaggagttcattctgacagatgaggaagtgcagaggaagcgggagatgatcctgaagcggaaggaggaggaggccttgaaggacagtctgcggcccaagctgtctgaggagcagcagcgcatcattgccatactgctggacgcccaccataagacctacgaccccacctactccgacttctgccagttccggcctccagttcgtgtgaatgatggtggagggagccatccttccaggcccaactccagacacactcccagcttctctggggactcctcctcctcctgctcagatcactgtatcacctcttcagacatgatggactcgtccagcttctccaatctggatctgagtgaagaagattcagatgacccttctgtgaccctagagctgtcccagctctccatgctgccccacctggctgacctggtcagttacagcatccaaaaggtcattggctttgctaagatgataccaggattcagagacctcacctctgaggaccagatcgtactgctgaagtcaagtgccattgaggtcatcatgttgcgctccaatgagtccttcaccatggacgacatgtcctggacctgtggcaaccaagactacaagtaccgcgtcagtgacgtgaccaaagccggacacagcctggagctgattgagcccctcatcaagttccaggtgggactgaagaagctgaacttgcatgaggaggagcatgtcctgctcatggccatctgcatcgtctccccagatcgtcctggggtgcaggacgccgcgctgattgaggccatccaggaccgcctgtccaacacactgcagacgtacatccgctgccgccacccgcccccgggcagccacctgctctatgccaagatgatccagaagctagccgacctgcgcagcctcaatgaggagcactccaagcagtaccgctgcctctccttccagcctgagtgcagcatgaagctaacgccccttgtgctcgaagtgtttggcaatgagatctcctgactaggacagcctgtggcggtgcctgggtggggctgctcctccagggccacgtgccaggcccggggctggcggctactcagcagccctcctcaccccgtctggggttcagcccctcctctgccacctcccctatccacccagcccattctctctcctgtccaacctaacccctttcctgcgggcttttccccggtcccttgagacctcagccatgaggagttgctgtttgtttgacaaagaaacccaagtgggggcagagggcagaggctggaggcagggccttgcccagagatgcctccaccgctgcctaagtggctgctgactgatgttgagggaacagacaggagaaatgcatccattcctcagggacagagacacctgcacctccccccactgcaggccccgcttgtccagcgcctagtggggtctccctctcctgcctactcacgataaataatcggcccacagctcccaccccacccccttcagtgcccaccaacatcccattgccctggttatattctcacgggcagtagctgtggtgaggtgggttttcttcccatcactggagcaccaggcacgaacccacctgctgagagacccaaggaggaaaaacagacaaaaacagcctcacagaagaatatgacagctgtccctgtcaccaagctcacagttcctcgccctgggtctaaggggttggttgaggtggaagccctccttccacggatccatgtagcaggactgaattgtccccagtttgcagaaaagcacctgccgacctcgtcctccccctgccagtgccttacctcctgcccaggagagccagccctccctgtcctcctcggatcaccgagagtagccgagagcctgctcccccaccccctccccaggggagagggtctggagaagcagtgagccgcatcttctccatctggcagggtgggatggaggagaagaattttcagaccccagcggctgagtcatgatctccctgccgcctcaatgtggttgcaaggccgctgttcacccacagggctaagagctagcgctgccgcaccccagagtgtgggaagggagagcggggcagtctcgggtggctagtcagagagagtgtttgggggttccgtgatgtagggtaaggtgccttcttattctcactccaccacccaaaagtcaaaaggtgcctgtgaggcaggggcggagtgatacaacttcaagtgcatgctctctgcagccagcccagcccagctggtgggaagcgtctgtccgtttactccaaggtggggtctttgtgagagtgagctgtaggtgtgcgggaccggtacagaaaggcgttcttcgaggtggatcacagaggcttcttcagatcagtgcttgagtttggggaatgcggccgcattccctgagtcaccaggaatgttaaagtcagtgggaacgtgactgccccaactcctggaagctgtgtccttgcacctgcatccgtagttccctgaaaacccagagaggaatcagacttcacactgcaagagccttggtgtccacctggccccatgtctctcagaattcttcaggtggaaaaacatctgaaagccacgttccttactgcagaatagcatatatatcgcttaatcttaaatttattagatatgagttgttttcagactcagactccatttgtattatagtctaatatacagggtagcaggtaccactgatttggagatatttatggggggagaacttacattgtgaaacttctgtacattaattattattgctgttgttattttacaagggtctagggagagacccttgtttgattttagctgcagaacgtattggtccagcttgctcttcagtgggagaaaacacttgtaagttgctaaacgagtcaatcccctcattcaggaaaactgacagaggagggcgtgactcacccaagcatatataactagctagaagtgggccaggacaggcccggcgcggtggctcacgcctgtaatcccagcagtttgggaggtcgaggtaggtggatcacctgaggtcgggagttcgagaccaacctgaccaacatggagaaaccctgtctctattaaaaatacaaaaaaaaaaaaaaaaaaaatagccgggcatggtggcgcaagcctgtaatcccagctactcaggaggctgaggcagaagaattgaacccaggaggtggaggttgcagtgagctgagatcgtgccgttactctccaacctggacaacaagagcgaaactccgtcttagaagtggaccaggacaggaccagattttggagtcatggtccggtgtccttttcactacaccatgtttgagctcagacccccactctcattccccaggtggctgacccagtccctgggggaagccctggatttcagaaagagcaagtctggatctgggaccctttccttccttccctggcttgtaactccaccaacccatcagaaggagaaggaaggagactcacctctgcctcaatgtgaatcagaccctaccccaccacgatgtggccctggcctgctgggctctccacctcagccttggataatgctgttgcctcatctataacatgcatttgtctttgtaatgtcaccaccttcccagctctccctctggccctgccttcttcggggaactcctggaaatatcagttactcagccctgggccccaccacctaggccactcctccaaaggaagtctaggagctgggaggaaaagaaaagaggggaaaatgagtttttatggggctgaacggggagaaaaggtcatcatcgattctactttagaatgagagtgtgaaatagacatttgtaaatgtaaaacttttaaggtatatcattataactgaaggagaaggtgccccaaaatgcaagattttccacaagattcccagagacaggaaaatcctctggctggctaactggaagcatgtaggagaatccaagcgaggtcaacagagaaggcaggaatgtgtggcagatttagtgaaagctagagatatggcagcgaaaggatgtaaacagtgcctgctgaatgatttccaaagagaaaaaaagtttgccagaagtttgtcaagtcaaccaatgtagaaagctttgcttatggtaataaaaatggctcatacttatatagcacttactttgttgcaagtactgctgtaaataaatgctttatgcaaaccaa

SEQ ID NO: 34236 - DNA, 1782 bp, Homo sapiens
  source 1..1782: mol_type = unassigned DNA
aaaaggcggcagcggagccgtgtgcgccgggagcgcggaacagcttgtccacccgccggccggaccagggatggaggcaatggcggccagcacttccctgcctgaccctggagactttgaccggaacgtgccccggatctgtggggtgtgtggagaccgagccactggctttcacttcaatgctatgacctgtgaaggctgcaaaggcttcttcaggtgagccctcctcccaggctctccccagtggaaagggagggagaagaagcaaggtgtttccatgaagggagcccttgcatttttcacatctccttccttacaatgtccatggaacatgcggcgctcacagccacaggagcaggagggtcttggcgaagcatgaagcggaaggcactattcacctgccccttcaacggggactgccgcatcaccaaggacaaccgacgccactgccaggcctgccggctcaaacgctgtgtggacatcggcatgatgaaggagttcattctgacagatgaggaagtgcagaggaagcgggagatgatcctgaagcggaaggaggaggaggccttgaaggacagtctgcggcccaagctgtctgaggagcagcagcgcatcattgccatactgctggacgcccaccataagacctacgaccccacctactccgacttctgccagttccggcctccagttcgtgtgaatgatggtggagggagccatccttccaggcccaactccagacacactcccagcttctctggggactcctcctcctcctgctcagatcactgtatcacctcttcagacatgatggactcgtccagcttctccaatctggatctgagtgaagaagattcagatgacccttctgtgaccctagagctgtcccagctctccatgctgccccacctggctgacctggtcagttacagcatccaaaaggtcattggctttgctaagatgataccaggattcagagacctcacctctgaggaccagatcgtactgctgaagtcaagtgccattgaggtcatcatgttgcgctccaatgagtccttcaccatggacgacatgtcctggacctgtggcaaccaagactacaagtaccgcgtcagtgacgtgaccaaagccggacacagcctggagctgattgagcccctcatcaagttccaggtgggactgaagaagctgaacttgcatgaggaggagcatgtcctgctcatggccatctgcatcgtctccccagatcgtcctggggtgcaggacgccgcgctgattgaggccatccaggaccgcctgtccaacacactgcagacgtacatccgctgccgccacccgcccccgggcagccacctgctctatgccaagatgatccagaagctagccgacctgcgcagcctcaatgaggagcactccaagcagtaccgctgcctctccttccagcctgagtgcagcatgaagctaacgccccttgtgctcgaagtgtttggcaatgagatctcctgactaggacagcctgtggcggtgcctgggtggggctgctcctccagggccacgtgccaggcccggggctggcggctactcagcagccctcctcaccccgtctggggttcagcccctcctctgccacctcccctatccacccagcccattctctctcctgtccaacctaacccctttcctgcgggcttttccccggtcccttgagacctcagccatgaggagttgctgtttgtttgacaaagaaacccaagtgggggcagagggcagaggctggaggca

SEQ ID NO: 34237 - DNA, 937 bp, Homo sapiens
  source 1..937: mol_type = unassigned DNA
cggcagcggagccgtgtgcgccgggagcgcggaacagcttgtccacccgccggccggaccagggctcctgaacctagcccagctggacggagaaatggactctagcctcctctgatagcctcatgccaggccccgtgcacattgctttgcttgcctccctcaatcctcatagcttctctttgggggatggaggcaatggcggccagcacttccctgcctgaccctggagactttgaccggaacgtgccccggatctgtggggtgtgtggagaccgagccactggctttcacttcaatgctatgacctgtgaaggctgcaaaggcttcttcaggcgaagcatgaagcggaaggcactattcacctgccccttcaacggggactgccgcatcaccaaggacaaccgacgccactgccaggcctgccggctcaaacgctgtgtggacatcggcatgatgaaggagttcattctgacagatgaggaagtgcagaggaagcgggagatgatcctgaagcggaaggaggaggaggccttgaaggacagtctgcggcccaagctgtctgaggagcagcagcgcatcattgccatactgctggacgcccaccataagacctacgaccccacctactccgacttctgccagttccggcctccagttcgtgtgaatgatggtggagggagccatccttccaggcccaactccagacacactcccagcttctctggggactcctcctcctcctgctcagatcactgtatcacctcttcagacatgatggactcgtccagcttctccaatctggatctgagtgaagaagattcagatgacccttctgtgaccctagagctgtcccagctctccatgctgccccacctggctgacctggtcagttacagcatccaaaaggtcattggctttgctaagatgataccaggat

SEQ ID NO: 34238 - DNA, 596 bp, Homo sapiens
  source 1..596: mol_type = unassigned DNA
gggctgtctctgcttgtcaaaaggcggcagcggagccgtgtgcgccgggagcgcggaacagcttgtccacccgccggccggaccagggctcctgaacctagcccagctggacggagaaatggactctagcctcctctgatagcctcatgccaggccccgtgcacattgctttgcttgcctccctcaatcctcatagcttctctttgggaagcctttgggtctgaagtgtctgtgagacctcacagaagagcacccctgggctccacttacctgccccctgctccttcagggatggaggcaatggcggccagcacttccctgcctgaccctggagactttgaccggaacgtgccccggatctgtggggtgtgtggagaccgagccactggctttcacttcaatgctatgacctgtgaaggctgcaaaggcttcttcaggcgaagcatgaagcggaaggcactattcacctgccccttcaacggggactgccgcatcaccaaggacaaccgacgccactgccaggcctgccggctcaaacgctgtgtggacatcggcatgatgaaggagttcattctgacagatgaggaagtgcagag

SEQ ID NO: 34239 - DNA, 3554 bp, Homo sapiens
  source 1..3554: mol_type = unassigned DNA
aaaaggcggcagcggagccgtgtgcgccgggagcgcggaacagcttgtccacccgccggccggaccagaagcctttgggtctgaagtgtctgtgagacctcacagaagagcacccctgggctccacttacctgccccctgctccttcagggatggaggcaatggcggccagcacttccctgcctgaccctggagactttgaccggaacgtgccccggatctgtggggtgtgtggagaccgagccactggctttcacttcaatgctatgacctgtgaaggctgcaaaggcttcttcaggcgaagcatgaagcggaaggcactattcacctgccccttcaacggggactgccgcatcaccaaggacaaccgacgccactgccaggcctgccggctcaaacgctgtgtggacatcggcatgatgaaggagttcattctgacagatgaggaagtgcagaggaagcgggagatgatcctgaagcggaaggaggaggaggccttgaaggacagtctgcggcccaagctgtctgaggagcagcagcgcatcattgccatactgctggacgcccaccataagacctacgaccccacctactccgacttctgccagttccggcctccagttcgtgtgaatgatggtggagggagccatccttccaggcccaactccagacacactcccagcttctctggggactcctcctcctcctgctcagatcactgtatcacctcttcagacatgatggactcgtccagcttctccaatctggatctgagtgaagaagattcagatgacccttctgtgaccctagagctgtcccagctctccatgctgccccacctggctgacctggtcagttacagcatccaaaaggtcattggctttgctaagatgataccaggattcagagacctcacctctgaggaccagatcgtactgctgaagtcaagtgccattgaggtcatcatgttgcgctccaatgagtccttcaccatggacgacatgtcctggacctgtggcaaccaagactacaagtaccgcgtcagtgacgtgaccaaagccggacacagcctggagctgattgagcccctcatcaagttccaggtgggactgaagaagctgaacttgcatgaggaggagcatgtcctgctcatggccatctgcatcgtctccccagatcgtcctggggtgcaggacgccgcgctgattgaggccatccaggaccgcctgtccaacacactgcagacgtacatccgctgccgccacccgcccccgggcagccacctgctctatgccaagatgatccagaagctagccgacctgcgcagcctcaatgaggagcactccaagcagtaccgctgcctctccttccagcctgagtgcagcatgaagctaacgccccttgtgctcgaagtgtttggcaatgagatctcctgactaggacagcctgtggcggtgcctgggtggggctgctcctccagggccacgtgccaggcccggggctggcggctactcagcagccctcctcaccccgtctggggttcagcccctcctctgccacctcccctatccacccagcccattctctctcctgtccaacctaacccctttcctgcgggcttttccccggtcccttgagacctcagccatgaggagttgctgtttgtttgacaaagaaacccaagtgggggcagagggcagaggctggaggcagggccttgcccagagatgcctccaccgctgcctaagtggctgctgactgatgttgagggaacagacaggagaaatgcatccattcctcagggacagagacacctgcacctccccccactgcaggccccgcttgtccagcgcctagtggggtctccctctcctgcctactcacgataaataatcggcccacagctcccaccccacccccttcagtgcccaccaacatcccattgccctggttatattctcacgggcagtagctgtggtgaggtgggttttcttcccatcactggagcaccaggcacgaacccacctgctgagagacccaaggaggaaaaacagacaaaaacagcctcacagaagaatatgacagctgtccctgtcaccaagctcacagttcctcgccctgggtctaaggggttggttgaggtggaagccctccttccacggatccatgtagcaggactgaattgtccccagtttgcagaaaagcacctgccgacctcgtcctccccctgccagtgccttacctcctgcccaggagagccagccctccctgtcctcctcggatcaccgagagtagccgagagcctgctcccccaccccctccccaggggagagggtctggagaagcagtgagccgcatcttctccatctggcagggtgggatggaggagaagaattttcagaccccagcggctgagtcatgatctccctgccgcctcaatgtggttgcaaggccgctgttcacccacagggctaagagctagcgctgccgcaccccagagtgtgggaagggagagcggggcagtctcgggtggctagtcagagagagtgtttgggggttccgtgatgtagggtaaggtgccttcttattctcactccaccacccaaaagtcaaaaggtgcctgtgaggcaggggcggagtgatacaacttcaagtgcatgctctctgcagccagcccagcccagctggtgggaagcgtctgtccgtttactccaaggtggggtctttgtgagagtgagctgtaggtgtgcgggaccggtacagaaaggcgttcttcgaggtggatcacagaggcttcttcagatcagtgcttgagtttggggaatgcggccgcattccctgagtcaccaggaatgttaaagtcagtgggaacgtgactgccccaactcctggaagctgtgtccttgcacctgcatccgtagttccctgaaaacccagagaggaatcagacttcacactgcaagagccttggtgtccacctggccccatgtctctcagaattcttcaggtggaaaaacatctgaaagccacgttccttactgcagaatagcatatatatcgcttaatcttaaatttattagatatgagttgttttcagactcagactccatttgtattatagtctaatatacagggtagcaggtaccactgatttggagatatttatggggggagaacttacattgtgaaacttctgtacattaattattattgctgttgttattttacaagggtctagggagagacccttgtttgattttagctgcagaacgtattggtccagcttgctcttcagtgggagaaaacacttgtaagttgctaaacgagtcaatcccctcattcaggaaaactgacagaggagggcgtgactcacccaagcatatataactagctagaagtgggccaggacaggcccggcgcggtggctcacgcctgtaatcccagcagtttgggaggtcgaggtaggtggatcacctgaggtcgggagttcgagaccaacctgaccaacatggagaaaccctgtctctattaaaaatacaaaaaaaaaaaaaaaaa

SEQ ID NO: 34240 - DNA, 562 bp, Homo sapiens
  source 1..562: mol_type = unassigned DNA
gatgacatggcatgcctgctcccaacaagccacttctgtttgcagtcactgatctggggactaaagtccctggaaagagcctctcgtgcccacttccttagagactggggaggcggtcagcgctccgccttagataaaaggtttccccttcttcatttcagaagcctttgggtctgaagtgtctgtgagacctcacagaagagcacccctgggctccacttacctgccccctgctccttcagggatggaggcaatggcggccagcacttccctgcctgaccctggagactttgaccggaacgtgccccggatctgtggggtgtgtggagaccgagccactggctttcacttcaatgctatgacctgtgaaggctgcaaaggcttcttcaggcgaagcatgaagcggaaggcactattcacctgccccttcaacggggactgccgcatcaccaaggacaaccgacgccactgccaggcctgccggctcaaacgctgtgtggacatcggcatgatgaaggagttcattctgacagatgaggaagtgcagaggaagcgggagatg

SEQ ID NO: 34241 - DNA, 3925 bp, Homo sapiens
  source 1..3925: mol_type = unassigned DNA
gtgtgcgccgggagcgcggaacagcttgtccacccgccggccggaccaggtgcgaacccgggagcagcgggaaagggggtctcaggatagggactcggggtcggggcgtctgggataccggggcctgagcgcccggctgcgagcattagagtctaagtctcagcggtaaacttggctactgaggtccgggctgtcgtgccatgaggctgggacactaaggggcactgaggtttgagaaagctgaagttcgtgccaggctggcgaggggagcagcgacatcctcggcgcttaggagaaatgctccgctaacacagtgcttagcacttgggcaacaagaagtatttgtttccttcttctgtcggggcgccttggcatggagtggaggaataagaaaaggagcgattggctgtcgatggtgctcagaactgctggagtggaggaagcctttgggtctgaagtgtctgtgagacctcacagaagagcacccctgggctccacttacctgccccctgctccttcagggatggaggcaatggcggccagcacttccctgcctgaccctggagactttgaccggaacgtgccccggatctgtggggtgtgtggagaccgagccactggctttcacttcaatgctatgacctgtgaaggctgcaaaggcttcttcaggcgaagcatgaagcggaaggcactattcacctgccccttcaacggggactgccgcatcaccaaggacaaccgacgccactgccaggcctgccggctcaaacgctgtgtggacatcggcatgatgaaggagttcattctgacagatgaggaagtgcagaggaagcgggagatgatcctgaagcggaaggaggaggaggccttgaaggacagtctgcggcccaagctgtctgaggagcagcagcgcatcattgccatactgctggacgcccaccataagacctacgaccccacctactccgacttctgccagttccggcctccagttcgtgtgaatgatggtggagggagccatccttccaggcccaactccagacacactcccagcttctctggggactcctcctcctcctgctcagatcactgtatcacctcttcagacatgatggactcgtccagcttctccaatctggatctgagtgaagaagattcagatgacccttctgtgaccctagagctgtcccagctctccatgctgccccacctggctgacctggtcagttacagcatccaaaaggtcattggctttgctaagatgataccaggattcagagacctcacctctgaggaccagatcgtactgctgaagtcaagtgccattgaggtcatcatgttgcgctccaatgagtccttcaccatggacgacatgtcctggacctgtggcaaccaagactacaagtaccgcgtcagtgacgtgaccaaagccggacacagcctggagctgattgagcccctcatcaagttccaggtgggactgaagaagctgaacttgcatgaggaggagcatgtcctgctcatggccatctgcatcgtctccccagatcgtcctggggtgcaggacgccgcgctgattgaggccatccaggaccgcctgtccaacacactgcagacgtacatccgctgccgccacccgcccccgggcagccacctgctctatgccaagatgatccagaagctagccgacctgcgcagcctcaatgaggagcactccaagcagtaccgctgcctctccttccagcctgagtgcagcatgaagctaacgccccttgtgctcgaagtgtttggcaatgagatctcctgactaggacagcctgtggcggtgcctgggtggggctgctcctccagggccacgtgccaggcccggggctggcggctactcagcagccctcctcaccccgtctggggttcagcccctcctctgccacctcccctatccacccagcccattctctctcctgtccaacctaacccctttcctgcgggcttttccccggtcccttgagacctcagccatgaggagttgctgtttgtttgacaaagaaacccaagtgggggcagagggcagaggctggaggcagggccttgcccagagatgcctccaccgctgcctaagtggctgctgactgatgttgagggaacagacaggagaaatgcatccattcctcagggacagagacacctgcacctccccccactgcaggccccgcttgtccagcgcctagtggggtctccctctcctgcctactcacgataaataatcggcccacagctcccaccccacccccttcagtgcccaccaacatcccattgccctggttatattctcacgggcagtagctgtggtgaggtgggttttcttcccatcactggagcaccaggcacgaacccacctgctgagagacccaaggaggaaaaacagacaaaaacagcctcacagaagaatatgacagctgtccctgtcaccaagctcacagttcctcgccctgggtctaaggggttggttgaggtggaagccctccttccacggatccatgtagcaggactgaattgtccccagtttgcagaaaagcacctgccgacctcgtcctccccctgccagtgccttacctcctgcccaggagagccagccctccctgtcctcctcggatcaccgagagtagccgagagcctgctcccccaccccctccccaggggagagggtctggagaagcagtgagccgcatcttctccatctggcagggtgggatggaggagaagaattttcagaccccagcggctgagtcatgatctccctgccgcctcaatgtggttgcaaggccgctgttcacccacagggctaagagctagcgctgccgcaccccagagtgtgggaagggagagcggggcagtctcgggtggctagtcagagagagtgtttgggggttccgtgatgtagggtaaggtgccttcttattctcactccaccacccaaaagtcaaaaggtgcctgtgaggcaggggcggagtgatacaacttcaagtgcatgctctctgcagccagcccagcccagctggtgggaagcgtctgtccgtttactccaaggtggggtctttgtgagagtgagctgtaggtgtgcgggaccggtacagaaaggcgttcttcgaggtggatcacagaggcttcttcagatcagtgcttgagtttggggaatgcggccgcattccctgagtcaccaggaatgttaaagtcagtgggaacgtgactgccccaactcctggaagctgtgtccttgcacctgcatccgtagttccctgaaaacccagagaggaatcagacttcacactgcaagagccttggtgtccacctggccccatgtctctcagaattcttcaggtggaaaaacatctgaaagccacgttccttactgcagaatagcatatatatcgcttaatcttaaatttattagatatgagttgttttcagactcagactccatttgtattatagtctaatatacagggtagcaggtaccactgatttggagatatttatggggggagaacttacattgtgaaacttctgtacattaattattattgctgttgttattttacaagggtctagggagagacccttgtttgattttagctgcagaacgtattggtccagcttgctcttcagtgggagaaaacacttgtaagttgctaaacgagtcaatcccctcattcaggaaaactgacagaggagggcgtgactcacccaagcatatataactagctagaagtgggccaggacaggcccggcgcggtggctcacgcctgtaatcccagcagtttgggaggtcgaggtaggtggatcacctgaggtcgggagttcgagaccaacctgaccaacatggagaaaccctgtctctattaaaaatacaaaaaaaaaaaaaaaa

SEQ ID NO: 34242 - DNA, 901 bp, Homo sapiens
  source 1..901: mol_type = unassigned DNA
gcgattccgcacgtcccttacccgcttcactagtcccggcattcttcgctgttttcctaactcgcccgcttgactagcgccctggaacagccatttgggtcgtggagtgcgagcacggccggccaatcgccgagtcagagggccaggaggggcgcggccattcgccgcccggcccctgctccgtggctggttttctccgcgggcgcctcgggcggaacctggagataatgggcagcacctgggggagccctggctgggtgcggctcgctctttgcctgacgggcttagtgctctcgctctacgcgctgcacgtgaaggcggcgcgcgcccgggaccgggattaccgcgcgctctgcgacgtgggcaccgccatcagctgttcgcgcgtcttctcctccaggttgcctgcggacacgctgggcctctgtcctgatgctgctgagctccctggtgtctctcgctggttctgtctacctggcctggatcctgttcttcgtgctctatgatttctgcattgtttgtatcaccacctatgctatcaacgtgagcctgatgtggctcagtttccggaaggtccaagaaccccagggcaaggctaagaggcactgagccctcaacccaagccaggctgacctcatctgctttgctttggcatgtgagccttgcctaagggggcatatctgggtccctagaaggccctagatgtggggcttctagattaccccctcctcctgccatacccgcacatgacaatggaccaaatgtgccacacgctcgctcttttttacacccagtgcctctgactctgtccccatgggctggtctccaaagctctttccattgcccagggagggaaggttctgagcaataaagtttcttagatcaatcagccaagtctgaa

SEQ ID NO: 34243 - DNA, 1012 bp, Homo sapiens
  source 1..1012: mol_type = unassigned DNA
cgcgattccgcacgtcccttacccgcttcactagtcccggcattcttcgctgttttcctaactcgcccgcttgactagcgccctggaacagccatttgggtcgtggagtgcgagcacggccggccaatcgccgagtcagagggccaggaggggcgcggccattcgccgcccggcccctgctccgtggctggttttctccgcgggcgcctcgggcggaacctggagataatgggcagcacctgggggagccctggctgggtgcggctcgctctttgcctgacgggcttagtgctctcgctctacgcgctgcacgtgaaggcggcgcgcgcccgggaccgggattaccgcgcgctctgcgacgtgggcaccgccatcagctgttcgcgcgtcttctcctccaggtggggcaggggtttcgggctggtggagcatgtgctgggacaggacagcatcctcaatcaatccaacagcatattcggttgcatcttctacacactacagctattgttaggttgcctgcggacacgctgggcctctgtcctgatgctgctgagctccctggtgtctctcgctggttctgtctacctggcctggatcctgttcttcgtgctctatgatttctgcattgtttgtatcaccacctatgctatcaacgtgagcctgatgtggctcagtttccggaaggtccaagaaccccagggcaaggctaagaggcactgagccctcaacccaagccaggctgacctcatctgctttgctttggcatgtgagccttgcctaagggggcatatctgggtccctagaaggccctagatgtggggcttctagattaccccctcctcctgccatacccgcacatgacaatggaccaaatgtgccacacgctcgctcttttttacacccagtgcctctgactctgtccccatgggctggtctccaaagctctttccattgcccagggagggaaggttctgagcaataaagtttcttagatcaatcagccaagtctgaa

SEQ ID NO: 34244 - DNA, 2023 bp, Homo sapiens
  source 1..2023: mol_type = unassigned DNA
caatcatggatcaatagctatgtttggagaaggaatttgtggctgctccagctactgggcattttgtctggtccagttcatgtaatctcccaacaccccatgaagcaaggctttgttaatcctattttactgaaaatgaactaagactcagagagataaagctgttgcccaatgagccttctttctgccctccagatccacggtgctaattccccttccgatgacctaatgattctgagcttggcaaaggtcttatctcccagctcgcccaggcccagtgttccaggaatgtgacctttgctgcagcagccgctggagggggcagaggggatgggctggaggttgagcaaacagagcagcagaaaaggcagttcctcttctccagtgccctccttccctgtctctgcctctccctcccttcctcaggcatcagagcggagacttcagggagaccagagcccagcttgccaggcactgagctagaagccctgccatggcacccctgagaccccttctcatactggccctgctggcatgggttgctctggctgaccaagagtcatgcaagggccgctgcactgagggcttcaacgtggacaagaagtgccagtgtgacgagctctgctcttactaccagagctgctgcacagactatacggctgagtgcaagccccaagtgactcgcggggatgtgttcactatgccggaggatgagtacacggtctatgacgatggcgaggagaaaaacaatgccactgtccatgaacaggtggggggcccctccctgacctctgacctccaggcccagtccaaagggaatcctgagcagacacctgttctgaaacctgaggaagaggcccctgcgcctgaggtgggcgcctctaagcctgaggggatagactcaaggcctgagacccttcatccagggagacctcagcccccagcagaggaggagctgtgcagtgggaagcccttcgacgccttcaccgacctcaagaacggttccctctttgccttccgagggcagtactgctatgaactggacgaaaaggcagtgaggcctgggtaccccaagctcatccgagatgtctggggcatcgagggccccatcgatgccgccttcacccgcatcaactgtcaggggaagacctacctcttcaagggtagtcagtactggcgctttgaggatggtgtcctggaccctgattacccccgaaatatctctgacggcttcgatggcatcccggacaacgtggatgcagccttggccctccctgcccatagctacagtggccgggagcgggtctacttcttcaaggggaaacagtactgggagtaccagttccagcaccagcccagtcaggaggagtgtgaaggcagctccctgtcggctgtgtttgaacactttgccatgatgcagcgggacagctgggaggacatcttcgagcttctcttctggggcagaacctctgctggtaccagacagccccagttcattagccgggactggcacggtgtgccagggcaagtggacgcagccatggctggccgcatctacatctcaggcatggcaccccgcccctccttggccaagaaacaaaggtttaggcatcgcaaccgcaaaggctaccgttcacaacgaggccacagccgtggccgcaaccagaactcccgccggccatcccgcgccacgtggctgtccttgttctccagtgaggagagcaacttgggagccaacaactatgatgactacaggatggactggcttgtgcctgccacctgtgaacccatccagagtgtcttcttcttctctggagacaagtactaccgagtcaatcttcgcacacggcgagtggacactgtggaccctccctacccacgctccatcgctcagtactggctgggctgcccagctcctggccatctgtaggagtcagagcccacatggccgggccctctgtagctccctcctcccatctccttcccccagcccaataaaggtcccttagccccgagtttaaaa

SEQ ID NO: 34245 - DNA, 501 bp, Homo sapiens
  source 1..501: mol_type = unassigned DNA
agaatgagatcatgtctggcctgttgcaagaaccagaatgaaggatggagcagaagttggattggggcggcaagaagggagcatcagagcggagacttcagggagaccagagcccagcttgccaggcactgagctagaagccctgccatggcacccctgagaccccttctcatactggccctgctggcatgggttgctctggctgaccaagagtcatgcaagggccgctgcactgagggcttcaacgtggacaagaagtgccagtgtgacgagctctgctcttactaccagagctgctgcacagactatacggctgagtgcaagccccaagtgactcgcggggatgtgttcactatgccggaggatgagtacacggtctatgacgatggcgaggagaaaaacaatgccactgtccatgaacaggtggggggcccctccctgacctctgacctccaggcccagtccaaagggaatcctgagcagacacctgttctgaaacct

SEQ ID NO: 34246 - DNA, 2490 bp, Homo sapiens
  source 1..2490: mol_type = unassigned DNA
acgggggcggggccgagggaccaagcggccgctcctggccggagggcggccgggtcggtgacgtcaccgcatgactgggtttttatgaatgaaaggaatcctgtgagtgagtaattccgggaagctcgccttacaactccgcgcggcctcggccccctgcgccgcccgccccacaacaaaactcagcgcagcgctcccgggcgcccggttcagagcgacctgcggctcagagcggaggggagactgaccggagcgcggatcgggacagcggccgggacagcggcgagacgcgcgtgtgtgagcgcgccggaccaagcgggcccagaagcgggtctgcagcccagagggcaccttctgcaaacatgtctgtggatcccctatccagcaaagctctaaagatcaagcgagagctgagcgagaacacgccgcacctgtcggacgaggcgctgatggggctgtcggtgcgcgagctgaaccggcatctgcgcgggctctccgccgaggaggtgacacggctcaagcagcggcgccgcacactcaaaaaccgtggctacgccgccagctgccgcgtgaagcgcgtgtgccagaaggaggagctgcagaagcagaagtcggagctggagcgcgaggtggacaagctggcgcgcgagaacgccgccatgcgcctggagctcgacgcgctgcgcggcaagtgcgaggcgctgcagggcttcgcgcgctccgtggccgccgcccgcgggcccgccacgctcgtggcgccggccagcgtcatcaccatcgtcaagtccaccccgggctcggggtctggccccgcccacggcccggaccccgcccacggcccggcctcctgctcctagtgcccgcccccgccatgcctcagccacgcccctccggcctcagctccctccccaaagtgcctgagcgccgcctctgtgcccaggtcccatttctctgcagcactggccccttggtgcacacacattcccttcgtgggccctgtcttcctcttgcagccccccaaactgggaccgaatgaccctgggaaggggaacttgggtaggttggggatggggcagaggtctggatctgggatcgcccttggctgaaagtttagcctttttagattgagagatacagagccggcttagagaacagctgttgggggagaagagggcacccctcatcttggaaactgctcttattgtgccaatatgccctccaaaccctcccaggattcaaagctaggtttggctgtctgtgacttacgggaccgtcctgctgagaaattgcactgaagagatgcccccacctctggttgggcctgggggtgcctggccttccgaaactaaaagagtgggtgggaagactagtgaaacccagttcacggatggggaaacaggcctgaggtcacatttcacttagtggttgtgttgggaccaaaacctgggtgtcctcactgctgccctgagtccagccatggttttcagggggacagtggacagggactcagaaatgtggtgggagggcctccctggcttgggagaccgctctctgcaagggagggggagagaagcagagggagagagaaggtgacacggatggaagagtgggaaggagctggcctggctcagccctaggctgtccctgcagccagggtgtccgggggctggccagtcagagaaagggggccatggactgctgtggcaaatagggagacaaggagacagaccctgcagtcctactacagtctggagtggggtcctaagaagaagggtcccacctcaacccctgtcagtgtccactgtggggtgggggctgacccctgcctttgattgtcattctcctgggaagcccagtctcagtccctcccccaacactgtccacactgcccctccccactgtttatttattgcacggatctaagttattctccccagccagagcccgagctcctgctccctgggaaaagtggcgtatggccctgagctgggctttatattttatatctgcaaataaatcacattttatcttatatttagggaaagccggagagcaacaacaaaaaatgtttaagccgggcgcggtggctcacatctgtaatcccagcactttgggagtccaaggagggggatcgcttgagtccaggagtttgagaccagcctggacaacatggtgaaaccccatctctacaaaaaatacaaaaattagccatgcatggtggctcatgcctgtagtcccagctacttgggaggctgaggcaggaggatcacttaagcccagaaggcagaggttgtagtgagctgagatcgcaccactgcactccagcctgggcaacatagcaaaatcctgtctcaaaaaaaaagttaaaaaatattgcccggctcctagaatttatttatttcctgacttacagcaagcgagttatcgtcttctgtattttgtagactttctaaataaagtcaaattctttctttttccacagagaataaa

SEQ ID NO: 34247 - DNA, 2325 bp, Homo sapiens
  source 1..2325: mol_type = unassigned DNA
cagaatggtcaaagaggacctcctgaggaggtgacattgggcaaagacctaaatgatgaggagtcaccatggggctagaacagtaaagagcacagcctgtgcacagctcccgcggctggaaggagccattcaaggaggcctgtggaccaatgtggagagaggaaggtggcaggtctgcagcccagagggcaccttctgcaaacatgtctgtggatcccctatccagcaaagctctaaagatcaagcgagagctgagcgagaacacgccgcacctgtcggacgaggcgctgatggggctgtcggtgcgcgagctgaaccggcatctgcgcgggctctccgccgaggaggtgacacggctcaagcagcggcgccgcacactcaaaaaccgtggctacgccgccagctgccgcgtgaagcgcgtgtgccagaaggaggagctgcagaagcagaagtcggagctggagcgcgaggtggacaagctggcgcgcgagaacgccgccatgcgcctggagctcgacgcgctgcgcggcaagtgcgaggcgctgcagggcttcgcgcgctccgtggccgccgcccgcgggcccgccacgctcgtggcgccggccagcgtcatcaccatcgtcaagtccaccccgggctcggggtctggccccgcccacggcccggaccccgcccacggcccggcctcctgctcctagtgcccgcccccgccatgcctcagccacgcccctccggcctcagctccctccccaaagtgcctgagcgccgcctctgtgcccaggtcccatttctctgcagcactggccccttggtgcacacacattcccttcgtgggccctgtcttcctcttgcagccccccaaactgggaccgaatgaccctgggaaggggaacttgggtaggttggggatggggcagaggtctggatctgggatcgcccttggctgaaagtttagcctttttagattgagagatacagagccggcttagagaacagctgttgggggagaagagggcacccctcatcttggaaactgctcttattgtgccaatatgccctccaaaccctcccaggattcaaagctaggtttggctgtctgtgacttacgggaccgtcctgctgagaaattgcactgaagagatgcccccacctctggttgggcctgggggtgcctggccttccgaaactaaaagagtgggtgggaagactagtgaaacccagttcacggatggggaaacaggcctgaggtcacatttcacttagtggttgtgttgggaccaaaacctgggtgtcctcactgctgccctgagtccagccatggttttcagggggacagtggacagggactcagaaatgtggtgggagggcctccctggcttgggagaccgctctctgcaagggagggggagagaagcagagggagagagaaggtgacacggatggaagagtgggaaggagctggcctggctcagccctaggctgtccctgcagccagggtgtccgggggctggccagtcagagaaagggggccatggactgctgtggcaaatagggagacaaggagacagaccctgcagtcctactacagtctggagtggggtcctaagaagaagggtcccacctcaacccctgtcagtgtccactgtggggtgggggctgacccctgcctttgattgtcattctcctgggaagcccagtctcagtccctcccccaacactgtccacactgcccctccccactgtttatttattgcacggatctaagttattctccccagccagagcccgagctcctgctccctgggaaaagtggcgtatggccctgagctgggctttatattttatatctgcaaataaatcacattttatcttatatttagggaaagccggagagcaacaacaaaaaatgtttaagccgggcgcggtggctcacatctgtaatcccagcactttgggagtccaaggagggggatcgcttgagtccaggagtttgagaccagcctggacaacatggtgaaaccccatctctacaaaaaatacaaaaattagccatgcatggtggctcatgcctgtagtcccagctacttgggaggctgaggcaggaggatcacttaagcccagaaggcagaggttgtagtgagctgagatcgcaccactgcactccagcctgggcaacatagcaaaatcctgtctcaaaaaaaaagttaaaaaatattgcccggctcctagaatttatttatttcctgacttacagcaagcgagttatcgtcttctgtattttgtagactttctaaataaagtcaaattctttctttttccacagag

SEQ ID NO: 34248 - DNA, 697 bp, Homo sapiens
  source 1..697: mol_type = unassigned DNA
aaacgcggaacaaggacccgagcgaaggaagcggacccgtgcgtcttcgcacggggtctgggaattctggcccgggccgccccagtcctactacccggggctgtccgtccccggctctccccggagtttcccagggcctccgccacgtgaccccagtgtttgtctcccgcccagagcccgcgcccgcagccacagggtggggcaaggtatcaaagaccccacccagctgagctaggagtgagggatgtgagccacccccgcttggcaccccggtggatctggtaacaaagtctgcagcccagagggcaccttctgcaaacatgtctgtggatcccctatccagcaaagctctaaagatcaagcgagagctgagcgagaacacgccgcacctgtcggacgaggcgctgatggggctgtcggtgcgcgagctgaaccggcatctgcgcgggctctccgccgaggaggtgacacggctcaagcagcggcgccgcacactcaaaaaccgtggctacgccgccagctgccgcgtgaagcgcgtgtgccagaaggaggagctgcagaagcagaagtcggagctggagcgcgaggtggacaagctggcgcgcgagaacgccgccatgcgcctggagctcgacgcgctgcgcggcaagtgcgaggcgctgcagggcttcgcgcgctccgtggccgccgcccgcgg

SEQ ID NO: 34249 - DNA, 2216 bp, Homo sapiens
  source 1..2216: mol_type = unassigned DNA
agctgagctaggagtgagggatgtgagccacccccgcttggcaccccggtggatctggtaacaaagtctgcagcccagagggcaccttctgcaaacatgtctgtggatcccctatccagcaaagctctaaagatcaagcgagagctgagcgagaacacgccgcacctgtcggacgaggcgctgatggggctgtcggtgcgcgagctgaaccggcatctgcgcgggctctccgccgaggaggtgacacggctcaagcagcggcgccgcacactcaaaaaccgtggctacgccgccagctgccgcgtgaagcgcgtgtgccagaaggaggagctgcagaagcagaagtcggagctggagcgcgaggtggacaagctggcgcgcgagaacgccgccatgcgcctggagctcgacgcgctgcgcggcaagtgcgaggcgctgcagggcttcgcgcgctccgtggccgccgcccgcgggcccgccacgctcgtggcgccggccagcgtcatcaccatcgtcaagtccaccccgggctcggggtctggccccgcccacggcccggaccccgcccacggcccggcctcctgctcctagtgcccgcccccgccatgcctcagccacgcccctccggcctcagctccctccccaaagtgcctgagcgccgcctctgtgcccaggtcccatttctctgcagcactggccccttggtgcacacacattcccttcgtgggccctgtcttcctcttgcagccccccaaactgggaccgaatgaccctgggaaggggaacttgggtaggttggggatggggcagaggtctggatctgggatcgcccttggctgaaagtttagcctttttagattgagagatacagagccggcttagagaacagctgttgggggagaagagggcacccctcatcttggaaactgctcttattgtgccaatatgccctccaaaccctcccaggattcaaagctaggtttggctgtctgtgacttacgggaccgtcctgctgagaaattgcactgaagagatgcccccacctctggttgggcctgggggtgcctggccttccgaaactaaaagagtgggtgggaagactagtgaaacccagttcacggatggggaaacaggcctgaggtcacatttcacttagtggttgtgttgggaccaaaacctgggtgtcctcactgctgccctgagtccagccatggttttcagggggacagtggacagggactcagaaatgtggtgggagggcctccctggcttgggagaccgctctctgcaagggagggggagagaagcagagggagagagaaggtgacacggatggaagagtgggaaggagctggcctggctcagccctaggctgtccctgcagccagggtgtccgggggctggccagtcagagaaagggggccatggactgctgtggcaaatagggagacaaggagacagaccctgcagtcctactacagtctggagtggggtcctaagaagaagggtcccacctcaacccctgtcagtgtccactgtggggtgggggctgacccctgcctttgattgtcattctcctgggaagcccagtctcagtccctcccccaacactgtccacactgcccctccccactgtttatttattgcacggatctaagttattctccccagccagagcccgagctcctgctccctgggaaaagtggcgtatggccctgagctgggctttatattttatatctgcaaataaatcacattttatcttatatttagggaaagccggagagcaacaacaaaaaatgtttaagccgggcgcggtggctcacatctgtaatcccagcactttgggagtccaaggagggggatcgcttgagtccaggagtttgagaccagcctggacaacatggtgaaaccccatctctacaaaaaatacaaaaattagccatgcatggtggctcatgcctgtagtcccagctacttgggaggctgaggcaggaggatcacttaagcccagaaggcagaggttgtagtgagctgagatcgcaccactgcactccagcctgggcaacatagcaaaatcctgtctcaaaaaaaaagttaaaaaatattgcccggctcctagaatttatttatttcctgacttacagcaagcgagttatcgtcttctgtattttgtagactttctaaataaagtcaaattctttctttttccacag

SEQ ID NO: 34250 - DNA, 548 bp, Homo sapiens
  source 1..548: mol_type = unassigned DNA
ttccgggaagctcgccttacaactccgcgcggcctcggccccctgcgccgcccgccccacaacaaaactcagcgcagcgctcccgggcgcccggttcagagcgacctgcggctcagagcggaggggagactgaccggagcgcggatcgggacagcggccgggacagcggcgagacgcgcgtgtgtgagcgcgccggaccaagcgggcccagaagcggatcaagcgagagctgagcgagaacacgccgcacctgtcggacgaggcgctgatggggctgtcggtgcgcgagctgaaccggcatctgcgcgggctctccgccgaggaggtgacacggctcaagcagcggcgccgcacactcaaaaaccgtggctacgccgccagctgccgcgtgaagcgcgtgtgccagaaggaggagctgcagaagcagaagtcggagctggagcgcgaggtggacaagctggcgcgcgagaacgccgccatgcgcctggagctcgacgcgctgcgcggcaagtgcgaggcgctgcagggcttcgcgcgctccgtggccg

SEQ ID NO: 34251 - DNA, 2458 bp, Homo sapiens
  source 1..2458: mol_type = unassigned DNA
cgggtcggtgacgtcaccgcatgactgggtttttatgaatgaaaggaatcctgtgagtgagtaattccgggaagctcgccttacaactccgcgcggcctcggccccctgcgccgcccgccccacaacaaaactcagcgcagcgctcccgggcgcccggttcagagcgacctgcggctcagagcggaggggagactgaccggagcgcggatcgggacagcggccgggacagcggcgagacgcgcgtgtgtgagcgcgccggaccaagcgggcccagaagcgggtgaggaacgcgggaccaggaggacggtctgcagcccagagggcaccttctgcaaacatgtctgtggatcccctatccagcaaagctctaaagatcaagcgagagctgagcgagaacacgccgcacctgtcggacgaggcgctgatggggctgtcggtgcgcgagctgaaccggcatctgcgcgggctctccgccgaggaggtgacacggctcaagcagcggcgccgcacactcaaaaaccgtggctacgccgccagctgccgcgtgaagcgcgtgtgccagaaggaggagctgcagaagcagaagtcggagctggagcgcgaggtggacaagctggcgcgcgagaacgccgccatgcgcctggagctcgacgcgctgcgcggcaagtgcgaggcgctgcagggcttcgcgcgctccgtggccgccgcccgcgggcccgccacgctcgtggcgccggccagcgtcatcaccatcgtcaagtccaccccgggctcggggtctggccccgcccacggcccggaccccgcccacggcccggcctcctgctcctagtgcccgcccccgccatgcctcagccacgcccctccggcctcagctccctccccaaagtgcctgagcgccgcctctgtgcccaggtcccatttctctgcagcactggccccttggtgcacacacattcccttcgtgggccctgtcttcctcttgcagccccccaaactgggaccgaatgaccctgggaaggggaacttgggtaggttggggatggggcagaggtctggatctgggatcgcccttggctgaaagtttagcctttttagattgagagatacagagccggcttagagaacagctgttgggggagaagagggcacccctcatcttggaaactgctcttattgtgccaatatgccctccaaaccctcccaggattcaaagctaggtttggctgtctgtgacttacgggaccgtcctgctgagaaattgcactgaagagatgcccccacctctggttgggcctgggggtgcctggccttccgaaactaaaagagtgggtgggaagactagtgaaacccagttcacggatggggaaacaggcctgaggtcacatttcacttagtggttgtgttgggaccaaaacctgggtgtcctcactgctgccctgagtccagccatggttttcagggggacagtggacagggactcagaaatgtggtgggagggcctccctggcttgggagaccgctctctgcaagggagggggagagaagcagagggagagagaaggtgacacggatggaagagtgggaaggagctggcctggctcagccctaggctgtccctgcagccagggtgtccgggggctggccagtcagagaaagggggccatggactgctgtggcaaatagggagacaaggagacagaccctgcagtcctactacagtctggagtggggtcctaagaagaagggtcccacctcaacccctgtcagtgtccactgtggggtgggggctgacccctgcctttgattgtcattctcctgggaagcccagtctcagtccctcccccaacactgtccacactgcccctccccactgtttatttattgcacggatctaagttattctccccagccagagcccgagctcctgctccctgggaaaagtggcgtatggccctgagctgggctttatattttatatctgcaaataaatcacattttatcttatatttagggaaagccggagagcaacaacaaaaaatgtttaagccgggcgcggtggctcacatctgtaatcccagcactttgggagtccaaggagggggatcgcttgagtccaggagtttgagaccagcctggacaacatggtgaaaccccatctctacaaaaaatacaaaaattagccatgcatggtggctcatgcctgtagtcccagctacttgggaggctgaggcaggaggatcacttaagcccagaaggcagaggttgtagtgagctgagatcgcaccactgcactccagcctgggcaacatagcaaaatcctgtctcaaaaaaaaagttaaaaaatattgcccggctcctagaatttatttatttcctgacttacagcaagcgagttatcgtcttctgtattttgtagactttctaaataaagtcaaattctttctttttccacag

SEQ ID NO: 34252 - DNA, 2365 bp, Homo sapiens
  source 1..2365: mol_type = unassigned DNA
cgggtcggtgacgtcaccgcatgactgggtttttatgaatgaaaggaatcctgtgagtgagtaattccgggaagctcgccttacaactccgcgcggcctcggccccctgcgccgcccgccccacaacaaaactcagcgcagcgctcccgggcgcccggttcagagcgacctgcggctcagagcggaggggagactgaccggagcgcggatcgggacagcggccgggacagcggcgagacgcgcgtgtgtgagcgcgccggaccaagcgggcccagaagcggatcaagcgagagctgagcgagaacacgccgcacctgtcggacgaggcgctgatggggctgtcggtgcgcgagctgaaccggcatctgcgcgggctctccgccgaggaggtgacacggctcaagcagcggcgccgcacactcaaaaaccgtggctacgccgccagctgccgcgtgaagcgcgtgtgccagaaggaggagctgcagaagcagaagtcggagctggagcgcgaggtggacaagctggcgcgcgagaacgccgccatgcgcctggagctcgacgcgctgcgcggcaagtgcgaggcgctgcagggcttcgcgcgctccgtggccgccgcccgcgggcccgccacgctcgtggcgccggccagcgtcatcaccatcgtcaagtccaccccgggctcggggtctggccccgcccacggcccggaccccgcccacggcccggcctcctgctcctagtgcccgcccccgccatgcctcagccacgcccctccggcctcagctccctccccaaagtgcctgagcgccgcctctgtgcccaggtcccatttctctgcagcactggccccttggtgcacacacattcccttcgtgggccctgtcttcctcttgcagccccccaaactgggaccgaatgaccctgggaaggggaacttgggtaggttggggatggggcagaggtctggatctgggatcgcccttggctgaaagtttagcctttttagattgagagatacagagccggcttagagaacagctgttgggggagaagagggcacccctcatcttggaaactgctcttattgtgccaatatgccctccaaaccctcccaggattcaaagctaggtttggctgtctgtgacttacgggaccgtcctgctgagaaattgcactgaagagatgcccccacctctggttgggcctgggggtgcctggccttccgaaactaaaagagtgggtgggaagactagtgaaacccagttcacggatggggaaacaggcctgaggtcacatttcacttagtggttgtgttgggaccaaaacctgggtgtcctcactgctgccctgagtccagccatggttttcagggggacagtggacagggactcagaaatgtggtgggagggcctccctggcttgggagaccgctctctgcaagggagggggagagaagcagagggagagagaaggtgacacggatggaagagtgggaaggagctggcctggctcagccctaggctgtccctgcagccagggtgtccgggggctggccagtcagagaaagggggccatggactgctgtggcaaatagggagacaaggagacagaccctgcagtcctactacagtctggagtggggtcctaagaagaagggtcccacctcaacccctgtcagtgtccactgtggggtgggggctgacccctgcctttgattgtcattctcctgggaagcccagtctcagtccctcccccaacactgtccacactgcccctccccactgtttatttattgcacggatctaagttattctccccagccagagcccgagctcctgctccctgggaaaagtggcgtatggccctgagctgggctttatattttatatctgcaaataaatcacattttatcttatatttagggaaagccggagagcaacaacaaaaaatgtttaagccgggcgcggtggctcacatctgtaatcccagcactttgggagtccaaggagggggatcgcttgagtccaggagtttgagaccagcctggacaacatggtgaaaccccatctctacaaaaaatacaaaaattagccatgcatggtggctcatgcctgtagtcccagctacttgggaggctgaggcaggaggatcacttaagcccagaaggcagaggttgtagtgagctgagatcgcaccactgcactccagcctgggcaacatagcaaaatcctgtctcaaaaaaaaagttaaaaaatattgcccggctcctagaatttatttatttcctgacttacagcaagcgagttatcgtcttctgtattttgtagactttctaaataaagtcaaattctttctttttccacag

SEQ ID NO: 34253 - DNA, 5035 bp, Homo sapiens
  source 1..5035: mol_type = unassigned DNA
cggcggcggcggatcccgagcctggtccggcccggccttcccagtgcgctcggcccggcccgcgcaggcggcgagtcctccgagccccgggcccggacccctcgcgccggtccctgccccgcgcggcctcggagcgcgcgcggccccgccccgccccggcctcggcccgccgggcccgcagtgtgagagcgcctgctcgctgtgcccccgggttatgacgacccccaataaaggaaacaaggccttgaaggtgaagcgggagccgggtgagaatggcaccagcctgacggatgaggagctggtgaccatgtcggtgcgggagctgaaccagcacctgcggggcctgtccaaggaggagatcgtccagctgaagcagcgccggcgcacgctcaagaaccgcggctacgctgccagctgccgcgtgaagcgggtgacgcagaaggaggagctggagaagcagaaggcggagctgcagcaggaggtggagaagctggcctcagagaacgccagcatgaagctggagctcgacgcgctgcgctccaagtacgaggcgctgcagaccttcgcccggacggtggcccgcagccccgtggcgccagcccggggcccccttgccgccggcctggggcccctcgtcccaggcaaggtggccgccaccagcgtcatcacaatagtaaagtccaagacggatgcccgatcgtagggacgcgcgtctgcccaggcgggtctttgcggggccactaggcacatggcgaatttggctgccctgtccctctgtttccttctcttctctttcctccctctcttccccacccttctctcttccctgcaaagcacaacctgtaccccaggggcgccgggctgagcccctttgatctcgtcattgtcgtcgtgtgttttgtatgttgggattggtcagttcggcggtgacgtggggtcgccccaaccccttttgtaccagggccatgcaggcttggagtccagagttggtgctgtgggaacggactagagagagttgcgggagagagaaggagcaggcacgctgggcctcgcgtgtccccgagcagtgagggtcccagtgttccctccactcccgagtggccacaggctcgcgggctgggaaggattcactctctttagccccaggggagcagctcagcttagcccagcatgaagagatgggctctgctctgagagtagggcgggcttgaaggccctgatgggtggaccaccagcctgggcgcagtggtgctgggggcgtgcagctgggcccaggggctgtgcactcaggcctgacccgttgcactgaacaagaccaaatctctggttgtgcgcttaacgtgagggtgggtccagtgtgccctgcgatgggtcccgtgtcactgtttacatgacctatttgtgtggttatatagccctttatttaaaagagagaagttccttttacaaagttattaaattaattatatgtttaaaagttaaagaaaaaagagctgcagagtatttataaaactgtcttttagaaaaaaaacaagcaagaagaccatttgaccatatgaatggaaaagggaagaaagtataatagaaactttgctagttaaaaaaaaaagaaaaaaaaagaaaaaaaatccctttcttgtaaacttacggacacctctttgtggctgttggagtttagtttttatatacacagagttatcagacattatttataaaacttagtttaaaaaaaagacaaaaaaaaaaaagccaagccgtgagccgaccagaaggccgtcctctttgatatcttttgcaattgtaccgaaagtgacttactcctctgcccttcctgcttccgtctcttgccggtgccgtggtgtcgtccgtgcctggtgaggttttgtgcagcggtaaagtgctggtgcttctggtgacctttgacctgtgggtgtcacttcttgtgtctgttttcccgtgttcgttttttgggtttagttgtgcttttgcttctgctggcttgctggacctgggctggggtgccaagtggcgcctgctgcgtcagagctcaaggaatctgtgcccaccaccagctcctggtccgtaggaggtgagacatggggttctgtcatgcccccctccactgagccttggctacatctgtgtctagggcttgggctgatctagtggcggggtaggtgaaactggggtcccttggggcgccccacgctgcttccacacccaccacctctggccttgggtggtggcattacagggatgagggagtcactgtgggtggccacagggctatggccaagcgttccctggccgtcttcctctggcctcagctttgttcctataggctgcccgcgccgtgggctgcaggtctcgccgcccgcttgatccctgaggtgtttccatgctgcgggtggtgcttccaggcagagtgggtgggggcccaccgggcaccgccctttcttccttgtccctgcctcactctgagagccttgggggtctccaccagtgcagacaagggctacagtctccagggccgggtcttgtccctcttctccgctggtccacgctggcagctcttggcttcgggcctgccttctgcctccctttgggatctgtgtcttccagggatcagctgcttggcttctgctggaggtgcctccctgtgggggcgcagcctgcctcctgctctcagttcctcgccagaggctgctgcccttcctggctgggctcaggaggctccttgtaggcatatgatggggagggggtgcccctacccacctccaagaggctacagccctgtgtctggccatgtgagccctggcctttcaccgggttgctggtttcttttctgtggggcccagacttctgtaaagcacacagatgtgggtaagatgaaaaactgtggcccaacagggcttaaccctatggatggtgggatttttatccaatagtttggcctggtgtgcccacaggatgggaacagggaggcaccatcaacacttgtcatgttaatgagcttttctttgctcgaggtgttcagagacaagtcctgtgtctacctgcgtcagcctgaaaatggaaatattggctgttgactcttgtcatttagtgacttcatccccctcccctcagtctgatcttgtctaagtagaatccaggcgttagttggaatcatatcataagtatccatgaagaaaacgtcatgatctgcctcggagtggggagaaacaggccctccttgtccttgtgcagcccccacttttgtcctggctgtgggtggccatccattttgagcacctctgccaggctgcagacctggaggcgaagggagtgtggaagaggagggtgtaagggtcgacgcgtgctgaatgggaggtgcaggtcctcggtgcgttggcagaagaggcttctggagtttcgaggccatacctcctttcaagagctttggatttggggcgacttccctgggtctaggggagtgttcctgtcccctgtcaggtcagccctgcggagccactccacccctcttccccttcccctggatttcctgacatagatggtgtgttcatgtgcaggtgtgagtgtgctgtccttctgatctctgttgatcccgctttcctactgagagggtggtggagagggtggtggtctcttctcacctcagtttttctgacacagcgaatcgagggctttggccaaggccaggtctctcaaacttgtccgccaagtaaaccatgatatatgtcttcccttccaccttaactttgccccaactcctcttttatcctaacatggacgctcagatttcagaggaatacccagcagggacaggtcagctctcaccaggagagtgaggcccctggctgctgctcggggtggcactggtgttgctggctcagctcttggtgcatgtttcagatatgtgtgtacacttctgactggtgatcagggcccggcccacggccctgagcggctgcagcctgctttgggacgatggtcaggtcccatgttgtccctgctgcctccctctggagtggccacttggccaaagcgcccatccacatctggaaagtcggagccgcagcctgctgcaccgtttccgctctgggatcttgtgagttacttttttaggctgtggtttggtgaaaggaaccaacacattaacgatttttcccccagaagccactgaataattctttttggtgtatttttgccttcctgttggctgtctggccttggagcaggtcgggagagtagagtacataatcagtgccacacagaggcagggcgtgtctgagagactaatgcctgtcctgcctctggcctgtgtcctgggtgtgtaccatacctgctgggccagtcccacacatttccaccctgcccctggagcagcagctttgataccatgggtgtcccttgagtctgagctagagtgtgtccccgataaactgtgagacctccctgttcttggtgaccccagttgggctttggcccctccagcaaccttgtgtcccagccctgcccttcttcccaccccctcaatctgctagtccctgaagcctttaaccaaacgggagtgggcacagaaagccttctcctggcaacaggacaagggctgcccgcgtgtccagccctgttgctctcctggcgctgagaggtgggtccaagcagagttgatcagtccctgcctgccctgcctaggtctagccaggggaggttgtgtgtgtgggagaagaccccgggatctgctggggtgggatggaggttattaaagatctaagtgaggaggggctggggtttggatgcggggtgaggcccgagcgctcacacttcgtgtagggcgggcaggggcctgacctcttgcagggcagtggccttggtgccctacccctgccctgcgcagtatttattgctaaattattgtccaggaggggcagcactgggcctggccccccgggtatttattgctgtacatagtgtatgtttgtgatatataaggttttctttattttgtatatgatcaataaaccttttaaag

SEQ ID NO: 34254 - DNA, 5030 bp, Homo sapiens
  source 1..5030: mol_type = unassigned DNA
ccgcgtcttattccttctaatctctcccctgccccttgtcttgcgcctgccttcctaacagccttcagttccccttctcccgtcagaccttcctgacctcccacctggttctctaggggcagggtggacaggaagcagctcagcccagcctgggagaggccaagggctgcctcctatcagagagcgcctgctcgctgtgcccccgggttatgacgacccccaataaaggaaacaaggccttgaaggtgaagcgggagccgggtgagaatggcaccagcctgacggatgaggagctggtgaccatgtcggtgcgggagctgaaccagcacctgcggggcctgtccaaggaggagatcgtccagctgaagcagcgccggcgcacgctcaagaaccgcggctacgctgccagctgccgcgtgaagcgggtgacgcagaaggaggagctggagaagcagaaggcggagctgcagcaggaggtggagaagctggcctcagagaacgccagcatgaagctggagctcgacgcgctgcgctccaagtacgaggcgctgcagaccttcgcccggacggtggcccgcagccccgtggcgccagcccggggcccccttgccgccggcctggggcccctcgtcccaggcaaggtggccgccaccagcgtcatcacaatagtaaagtccaagacggatgcccgatcgtagggacgcgcgtctgcccaggcgggtctttgcggggccactaggcacatggcgaatttggctgccctgtccctctgtttccttctcttctctttcctccctctcttccccacccttctctcttccctgcaaagcacaacctgtaccccaggggcgccgggctgagcccctttgatctcgtcattgtcgtcgtgtgttttgtatgttgggattggtcagttcggcggtgacgtggggtcgccccaaccccttttgtaccagggccatgcaggcttggagtccagagttggtgctgtgggaacggactagagagagttgcgggagagagaaggagcaggcacgctgggcctcgcgtgtccccgagcagtgagggtcccagtgttccctccactcccgagtggccacaggctcgcgggctgggaaggattcactctctttagccccaggggagcagctcagcttagcccagcatgaagagatgggctctgctctgagagtagggcgggcttgaaggccctgatgggtggaccaccagcctgggcgcagtggtgctgggggcgtgcagctgggcccaggggctgtgcactcaggcctgacccgttgcactgaacaagaccaaatctctggttgtgcgcttaacgtgagggtgggtccagtgtgccctgcgatgggtcccgtgtcactgtttacatgacctatttgtgtggttatatagccctttatttaaaagagagaagttccttttacaaagttattaaattaattatatgtttaaaagttaaagaaaaaagagctgcagagtatttataaaactgtcttttagaaaaaaaacaagcaagaagaccatttgaccatatgaatggaaaagggaagaaagtataatagaaactttgctagttaaaaaaaaaagaaaaaaaaagaaaaaaaatccctttcttgtaaacttacggacacctctttgtggctgttggagtttagtttttatatacacagagttatcagacattatttataaaacttagtttaaaaaaaagacaaaaaaaaaaaagccaagccgtgagccgaccagaaggccgtcctctttgatatcttttgcaattgtaccgaaagtgacttactcctctgcccttcctgcttccgtctcttgccggtgccgtggtgtcgtccgtgcctggtgaggttttgtgcagcggtaaagtgctggtgcttctggtgacctttgacctgtgggtgtcacttcttgtgtctgttttcccgtgttcgttttttgggtttagttgtgcttttgcttctgctggcttgctggacctgggctggggtgccaagtggcgcctgctgcgtcagagctcaaggaatctgtgcccaccaccagctcctggtccgtaggaggtgagacatggggttctgtcatgcccccctccactgagccttggctacatctgtgtctagggcttgggctgatctagtggcggggtaggtgaaactggggtcccttggggcgccccacgctgcttccacacccaccacctctggccttgggtggtggcattacagggatgagggagtcactgtgggtggccacagggctatggccaagcgttccctggccgtcttcctctggcctcagctttgttcctataggctgcccgcgccgtgggctgcaggtctcgccgcccgcttgatccctgaggtgtttccatgctgcgggtggtgcttccaggcagagtgggtgggggcccaccgggcaccgccctttcttccttgtccctgcctcactctgagagccttgggggtctccaccagtgcagacaagggctacagtctccagggccgggtcttgtccctcttctccgctggtccacgctggcagctcttggcttcgggcctgccttctgcctccctttgggatctgtgtcttccagggatcagctgcttggcttctgctggaggtgcctccctgtgggggcgcagcctgcctcctgctctcagttcctcgccagaggctgctgcccttcctggctgggctcaggaggctccttgtaggcatatgatggggagggggtgcccctacccacctccaagaggctacagccctgtgtctggccatgtgagccctggcctttcaccgggttgctggtttcttttctgtggggcccagacttctgtaaagcacacagatgtgggtaagatgaaaaactgtggcccaacagggcttaaccctatggatggtgggatttttatccaatagtttggcctggtgtgcccacaggatgggaacagggaggcaccatcaacacttgtcatgttaatgagcttttctttgctcgaggtgttcagagacaagtcctgtgtctacctgcgtcagcctgaaaatggaaatattggctgttgactcttgtcatttagtgacttcatccccctcccctcagtctgatcttgtctaagtagaatccaggcgttagttggaatcatatcataagtatccatgaagaaaacgtcatgatctgcctcggagtggggagaaacaggccctccttgtccttgtgcagcccccacttttgtcctggctgtgggtggccatccattttgagcacctctgccaggctgcagacctggaggcgaagggagtgtggaagaggagggtgtaagggtcgacgcgtgctgaatgggaggtgcaggtcctcggtgcgttggcagaagaggcttctggagtttcgaggccatacctcctttcaagagctttggatttggggcgacttccctgggtctaggggagtgttcctgtcccctgtcaggtcagccctgcggagccactccacccctcttccccttcccctggatttcctgacatagatggtgtgttcatgtgcaggtgtgagtgtgctgtccttctgatctctgttgatcccgctttcctactgagagggtggtggagagggtggtggtctcttctcacctcagtttttctgacacagcgaatcgagggctttggccaaggccaggtctctcaaacttgtccgccaagtaaaccatgatatatgtcttcccttccaccttaactttgccccaactcctcttttatcctaacatggacgctcagatttcagaggaatacccagcagggacaggtcagctctcaccaggagagtgaggcccctggctgctgctcggggtggcactggtgttgctggctcagctcttggtgcatgtttcagatatgtgtgtacacttctgactggtgatcagggcccggcccacggccctgagcggctgcagcctgctttgggacgatggtcaggtcccatgttgtccctgctgcctccctctggagtggccacttggccaaagcgcccatccacatctggaaagtcggagccgcagcctgctgcaccgtttccgctctgggatcttgtgagttacttttttaggctgtggtttggtgaaaggaaccaacacattaacgatttttcccccagaagccactgaataattctttttggtgtatttttgccttcctgttggctgtctggccttggagcaggtcgggagagtagagtacataatcagtgccacacagaggcagggcgtgtctgagagactaatgcctgtcctgcctctggcctgtgtcctgggtgtgtaccatacctgctgggccagtcccacacatttccaccctgcccctggagcagcagctttgataccatgggtgtcccttgagtctgagctagagtgtgtccccgataaactgtgagacctccctgttcttggtgaccccagttgggctttggcccctccagcaaccttgtgtcccagccctgcccttcttcccaccccctcaatctgctagtccctgaagcctttaaccaaacgggagtgggcacagaaagccttctcctggcaacaggacaagggctgcccgcgtgtccagccctgttgctctcctggcgctgagaggtgggtccaagcagagttgatcagtccctgcctgccctgcctaggtctagccaggggaggttgtgtgtgtgggagaagaccccgggatctgctggggtgggatggaggttattaaagatctaagtgaggaggggctggggtttggatgcggggtgaggcccgagcgctcacacttcgtgtagggcgggcaggggcctgacctcttgcagggcagtggccttggtgccctacccctgccctgcgcagtatttattgctaaattattgtccaggaggggcagcactgggcctggccccccgggtatttattgctgtacatagtgtatgtttgtgatatataaggttttctttattttgtatatgatcaataaaccttttaaag

SEQ ID NO: 34255 - DNA, 3368 bp, Homo sapiens
  source 1..3368: mol_type = unassigned DNA
ggagccgggcgggcgggtgcggtggcggcgggcggcgcgggggcacttgttgttcttcgcgaagtcggagcccgagcgccaggcggcggcggcggccgaggggagcgcgacagtgagcgccggcgcgaggacagcgcgtgcccgcgaggagccgccgcgcgcccgcgccctccgcgcgacgccagctacgagttccagggagctctgtcctggtgaccgtgcccgggttatgacgactaatcccaaaccgaataaggcattaaaggtcaagaaggaggcgggcgagaacgccccggtgctcagcgatgatgagctggtgtccatgtcggtgcgggagctgaaccagcacctgcggggtctcaccaaggaggaggtgacccgcctgaagcagcgtcggcgcacactcaagaaccgcggctacgcggccagctgccgcatcaagcgggtgacgcagaaggaggagctggagcggcagcgcgtggagctgcagcaggaggtggagaagctggcgcgtgagaacagcagcatgcggctggagctggacgccctgcgctccaagtacgaggcgctgcagaccttcgcgcgcaccgtggcccggggacctgtggcgccctccaaggtggccaccaccagcgtcatcaccatcgtcaagtccaccgagctctcctccacctccgtgcccttctcggctgcatcctagtgccggccgggggcggggggtggcgggcggcgggcggcgggcaggcgggtgggggcacacccctcgtacctgtcactgggatgcagactctcgacatccgagtccaagcgcaggcccctcgggcgcaggcagctcacaccaggaagagactgtattgcagggtgaagagtgggctcccgtgggcccagagctgcacgccggtccacagacacactcacgcccgccacctgctccccgcaggatgtgtctgtgtgtgggaattggtatcttgcacccgtgggagtcgggacatataatggaaaggccctcgggaagttccgcgtcctctgtgggggctgccggaagacacggccccaggagtcaggcccctgtggtcaggtctagcatggggcttgttttccactcctgctgtaagcagccttcgacacctgtcctgccacggcctcccagccggtgcgggagcccctcactgccctgaccgactccgcagtccccggggaggagcatggatggtgtgtcggcagctccgtccttccagctgtcccgttgcagtgcccgtgatccgcgtctgccttagcaggggcctgcgtgagtgggcacggtgtgggaggtcgcctgcgtggggtggtgtctgtgtgtgtgcacgcacgcctgccatcaaagcagcagggctgagggggtgcagcttgctggtgttcactgggggagggcctgtgggcacacatggcagagagagtggctcacacgtcgtgaggtctcccctgtgctctggtgacccgaggaggtcgtgcagcacagcgcagaagcccctgcccacgggatccggccccccagacaccgaccccacaggccgtcccggatctcagcggacacaggcaggagcgccccatcatttgacggtgagcaggactcaggctgtgtgtcctggagctacttctcaccaactgtggtcagtgcagggggaacgaggaggtcttttgggggcctggcgaggggaagggctgctgcagtctagggagagggggtgcagcctgggggatgttggtggacatggatgtggaggtggaaggaggaggacgttgcgtggagtggtgggaggaggcgggagccgtgtgcgagagcaggtggaaagccttgaggggcaggaccaggatgcagctggcttgtagaagagctcaggagtgagcctggcactccagagggcgcggcgggtggggaggcagcaggcaccagtccaggagagcttcgtggacgtggctcctgcgcgcacacccccaggagcacagccacgggctgcaggtgtggctggcctcagcactcagtcctcacccggagcctttgcctgctcctccttccaagagcactgaggcaccagtgggcttggcactccaccttgggcttccttttcctggagagccgccttgagggtccctcctgtgactggggtctctgcagcgagagccgcgggggttgcggagcccctgcctgggggagctggcggaatgtgagccgccggccgggggccgccacataagacctgcaaggtggtgcctggggccctggctccttctcggctgcccctgcccacccagtaacagcccccaccagctacagagcccaggcgggtgccagccacgctgggagggcagaggacagacagccccggggctgcgacttggttctgtgtctactgttagaagttgagtgggaagctgcaggcccgccaggaccactgggtccctacagagcaaaggcctgcgtgttcccaaacagccgttgcccccgtggccgtggtaggtaatccatattggatgtcataaggaccagggggatatttaaagagagaaacagaaaatatatagagatataaaattatattcacagtttatctacagatttttcgtaacaatctttcttttccagtttgatactgtaaatctatcagagcagagccgggggcacgggcacaggtgggagttgggagcaaagcggaggcccgggctgcccgccgtcccccttcatctccccacggactgtaccaggcagctgggccccgcaggacaggccgcagcgggtggccggttctgtcccgtcttggggttcttggtgtccacgtcttgtgggccgtgggcttctacctgcccttggcctgcagtgctttgctggagaagggactccctggtccccagggtggacggagccgctgtcaccgcccagagctgggccggggaagcacggtgtgttctgcttttcttttcagattgttgaaatttcattgtcatgatttaatatatggatttttttatttaagaaaaagacgagggactctttgtcacgtgggtttgttttctgtctccgtgcctccggcttcccaaagagatccaggtctttgcgtttccagggcgtggggaccccggccccctatgccgccacgccgccacaccgcctcaccctggcttctgtgctacttggcagttccatttcattatttattttttgtgctgctttttatcatgatataaattattgaaaacagatcacatgtgggcccgtgtctggccgccgccgccctgccccgtccctgcggccaccacctaatttattgccgtgcgtcctgctgctgtgactgcttttgtacctttgcaataaagaattttctggtttcaga

SEQ ID NO: 34256 - DNA, 2773 bp, Homo sapiens
  source 1..2773: mol_type = unassigned DNA
tttgcaggtccccacggtggcggaggcagctgggccccagcctctccactgtcaccctcaccccaggacgtggtgcgaaggagcctggagcccacctggccgtccccgggaccggctggtgccatcctgtgccatctacgtcagcgccctgagatcagctggccttggcaggggcagcggactcggcagcctggcgcaggaccctgtctcacctgtgcggccctcttgttgtgggggtttgtgggttgcgggggtggggcccccatcggaggcagggctggagggtggagggatttgggcccgagggctccctggcccagggtgtggggagggtcctgggctggcagggaggacgggatgcggtcacccgcccccatgatgcccatgtccagtggaggtgctgaccaaggacaccccccaccgccgtgtgctgctctgatgttcctgtgggaacctgtgtctggtatttggggtatgggagtgggtgctgtgaacccctgtcccgcgagctgcccggcgccttctgcccgcccgtcccggccgccgggtgcaaatgggtttgttgactgcctgccggcctcgtgatgtctgtgcaacctgacctgaagtcaggatcgcgtttgggcttctcggtttccatgacaaccgtgggggctggctcggtcccaaggtcgccatggcaactatcggagggctcatgccggggatgctttggctgggtttttcatgaatgattagaatgtgtgacacaatgcagacgtgaggacggcgggggcggcggcggggacgactcccgccagacggtcaaatgctcggcagggcggcggctcccccacctccctggtctctggctgcggcccccggacctgccgcccctcaggaaccccacacccccttgggccgcagggtcctcgctcgggggcagcttaggtggaggtggtgatgtcacagccgcagcggccagggccgtgctacgagttccagggagctctgtcctggtgaccgtgcccgggttatgacgactaatcccaaaccgaataaggcattaaaggtcaagaaggaggcgggcgagaacgccccggtgctcagcgatgatgagctggtgtccatgtcggtgcgggagctgaaccagcacctgcggggtctcaccaaggaggaggtgacccgcctgaagcagcgtcggcgcacactcaagaaccgcggctacgcggccagctgccgcatcaagcgggtgacgcagaaggaggagctggagcggcagcgcgtggagctgcagcaggaggtggagaagctggcgcgtgagaacagcagcatgcggctggagctggacgccctgcgctccaagtacgaggcgctgcagaccttcgcgcgcaccgtggcccggggacctgtggcgccctccaaggtggccaccaccagcgtcatcaccatcgtcaagtccaccgagctctcctccacctccgtgcccttctcggctgcatcctagtgccggccgggggcggggggtggcgggcggcgggcggcgggcaggcgggtgggggcacacccctcgtacctgtcactgggatgcagactctcgacatccgagtccaagcgcaggcccctcgggcgcaggcagctcacaccaggaagagactgtattgcagggtgaagagtgggctcccgtgggcccagagctgcacgccggtccacagacacactcacgcccgccacctgctccccgcaggatgtgtctgtgtgtgggaattggtatcttgcacccgtgggagtcgggacatataatggaaaggccctcgggaagttccgcgtcctctgtgggggctgccggaagacacggccccaggagtcaggcccctgtggtcaggtctagcatggggcttgttttccactcctgctgtaagcagccttcgacacctgtcctgccacggcctcccagccggtgcgggagcccctcactgccctgaccgactccgcagtccccggggaggagcatggatggtgtgtcggcagctccgtccttccagctgtcccgttgcagtgcccgtgatccgcgtctgccttagcaggggcctgcgtgagtgggcacggtgtgggaggtcgcctgcgtggggtggtgtctgtgtgtgtgcacgcacgcctgccatcaaagcagcagggctgagggggtgcagcttgctggtgttcactgggggagggcctgtgggcacacatggcagagagagtggctcacacgtcgtgaggtctcccctgtgctctggtgacccgaggaggtcgtgcagcacagcgcagaagcccctgcccacgggatccggccccccagacaccgaccccacaggccgtcccggatctcagcggacacaggcaggagcgccccatcatttgacgtttgatactgtaaatctatcagagcagagccgggggcacgggcacaggtgggagttgggagcaaagcggaggcccgggctgcccgccgtcccccttcatctccccacggactgtaccaggcagctgggccccgcaggacaggccgcagcgggtggccggttctgtcccgtcttggggttcttggtgtccacgtcttgtgggccgtgggcttctacctgcccttggcctgcagtgctttgctggagaagggactccctggtccccagggtggacggagccgctgtcaccgcccagagctgggccggggaagcacggtgtgttctgcttttcttttcagattgttgaaatttcattgtcatgatttaatatatggatttttttatttaag

SEQ ID NO: 34257 - DNA, 632 bp, Homo sapiens
  source 1..632: mol_type = unassigned DNA
ggggcaccttgtgctgtgcaggtgcagacgtcttctctgacctcagggagagtcagaacaggaagcagccactgccggcgcctgctggtcaccccacagtgccggcggctgcagcccagctacgagttccagggagctctgtcctggtgaccgtgcccgggttatgacgactaatcccaaaccgaataaggcattaaaggtcaagaaggaggcgggcgagaacgccccggtgctcagcgatgatgagctggtgtccatgtcggtgcgggagctgaaccagcacctgcggggtctcaccaaggaggaggtgacccgcctgaagcagcgtcggcgcacactcaagaaccgcggctacgcggccagctgccgcatcaagcgggtgacgcagaaggaggagctggagcggcagcgcgtggagctgcagcaggaggtggagaagctggcgcgtgagaacagcagcatgcggctggagctggacgccctgcgctccaagtacgaggcgctgcagaccttcgcgcgcaccgtggcccggggacctgtggcgccctccaaggtggccaccaccagcgtcatcaccatcgtcaagtccaccgagctctcctccacctccgtgcccttctcggctgcatcct

SEQ ID NO: 34258 - DNA, 1041 bp, Homo sapiens
  source 1..1041: mol_type = unassigned DNA
atgccctcgcccctggccctacgcccctacctccggagcgagttttccccatcggtggacgcgcggccctgcagcagtccctcagagctacctgcgaagctgcttctgggggccactcttcctcgggccccgcggctgccgcgccggctggcctggtgctccattgactgggagcaggtgtgcttgctgcagaggctgggagctggagggtttggctcggtgtacaaggcgacttaccgcggtgttcctgtggccataaagcaagtgaacaagtgcaccaagaaccgactagcatctcggcggagtttctgggctgagctcaacgtagcaaggctgcgccacgataacatcgtgcgcgtggtggctgccagcacgcgcacgcccgcagggtccaatagcctagggaccatcatcatggagttcggtggcaacgtcactttacaccaagtcatctatggcgccgccggccaccctgagggggacgcaggggagcctcactgccgcactggaggacagttaagtttgggaaagtgtctcaagtactcactagatgttgtgaacggcctgctcttcctccactcgcaaagcattgtgcacttggacctgaagcccgcgaacatcttgatcagtgagcaggatgtctgtaaaattagtgacttcggttgctctgagaagttggaagatctgctgtgcttccagacaccctcttaccctctaggaggcacatacacccaccgcgccccggagctcctgaaaggagagggcgtgacgcctaaagccgacatttattcctttgccatcactctctggcaaatgactaccaagcaggcgccgtattcgggggagcggcagcacatactgtacgcggtggtggcctacgacctgcgcccgtccctctccgctgccgtcttcgaggactcgctccccgggcagcgccttggggacgtcatccagcgctgctggagacccagcgcggcgcagaggccgagcgcgcggctgcttttggtggatctcacctctttgaaagctgaactcggctga

SEQ ID NO: 34259 - DNA, 3545 bp, Homo sapiens
  source 1..3545: mol_type = unassigned DNA
aatatcaacctgtttcctcctcctccttctcctcctcctccgtgacctcctcctcctctttctcctgagaaacttcgccccagcggtgcggagcgccgctgcgcagccggggagggacgcaggcaggcggcgggcagcgggaggcggcagcccggtgcggtccccgcggctctcggcggagccccgcgcccgccgcgccatggcccgaagaccccggcacagcatatatagcagtgacgaggatgatgaggactttgagatgtgtgaccatgactatgatgggctgcttcccaagtctggaaagcgtcacttggggaaaacaaggtggacccgggaagaggatgaaaaactgaagaagctggtggaacagaatggaacagatgactggaaagttattgccaattatctcccgaatcgaacagatgtgcagtgccagcaccgatggcagaaagtactaaaccctgagctcatcaagggtccttggaccaaagaagaagatcagagagtgatagagcttgtacagaaatacggtccgaaacgttggtctgttattgccaagcacttaaaggggagaattggaaaacaatgtagggagaggtggcataaccacttgaatccagaagttaagaaaacctcctggacagaagaggaagacagaattatttaccaggcacacaagagactggggaacagatgggcagaaatcgcaaagctactgcctggacgaactgataatgctatcaagaaccactggaattctacaatgcgtcggaaggtcgaacaggaaggttatctgcaggagtcttcaaaagccagccagccagcagtggccacaagcttccagaagaacagtcatttgatgggttttgctcaggctccgcctacagctcaactccctgccactggccagcccactgttaacaacgactattcctattaccacatttctgaagcacaaaatgtctccagtcatgttccataccctgtagcgttacatgtaaatatagtcaatgtccctcagccagctgccgcagccattcagagacactataatgatgaagaccctgagaaggaaaagcgaataaaggaattagaattgctcctaatgtcaaccgagaatgagctaaaaggacagcaggtgctaccaacacagaaccacacatgcagctaccccgggtggcacagcaccaccattgccgaccacaccagacctcatggagacagtgcacctgtttcctgtttgggagaacaccactccactccatctctgccagcggatcctggctccctacctgaagaaagcgcctcgccagcaaggtgcatgatcgtccaccagggcaccattctggataatgttaagaacctcttagaatttgcagaaacactccaatttatagattctttcttaaacacttccagtaaccatgaaaactcagacttggaaatgccttctttaacttccacccccctcattggtcacaaattgactgttacaacaccatttcatagagaccagactgtgaaaactcaaaaggaaaatactgtttttagaaccccagctatcaaaaggtcaatcttagaaagctctccaagaactcctacaccattcaaacatgcacttgcagctcaagaaattaaatacggtcccctgaagatgctacctcagacaccctctcatctagtagaagatctgcaggatgtgatcaaacaggaatctgatgaatctggaattgttgctgagtttcaagaaaatggaccacccttactgaagaaaatcaaacaagaggtggaatctccaactgataaatcaggaaacttcttctgctcacaccactgggaaggggacagtctgaatacccaactgttcacgcagacctcgcctgtggcagatgcaccgaatattcttacaagctccgttttaatggcaccagcatcagaagatgaagacaatgttctcaaagcatttacagtacctaaaaacaggtccctggcgagccccttgcaggcaaccaaagctcagagactgttccaattttaaatgaagtctgaaattagtcagacagaaaataattgcaatgtatttgactgtcagaataagaaagtcaactgtcaatgttgtgaggccgatctgaagttgaccatctgctgtcaggttttaatatcaaaagagatttcccttgtaaccctaaagtgggtgtgtgttgatgaaatataaccaattccaaattaatcctgagccagccttgtagcagtacctgggaacctgcatcctgtggaaagatggaggagcagatgacatcttccagtcaagctcgtaaatacgtgaatgcattctcagcccggacgctggtcatgtgagacatttccagaaaagcattatggttttcagaacacttcaagttgacttgggatatatcattcctcaacatgaaacttttcatgaatgggagaagaacctatttttgttgtggtacaacagttgagagcagcaccaagtgcatttagttgaatgaagtcttcttggatttcacccaactaaaaggatttttaaaaataaataacagtcttacctaaattattaggtaatgaattgtagccagttgttaatatcttaatgcagatttttttaaaaaaaacataaaatgatttatctgtattttaaaggatccaacagatcagtattttttcctgtgatgggttttttgaaatttgacacattaaaaggtactccagtatttcacttttctcgatcactaaacatatgcatatatttttaaaaatcagtaaaagcattactctaagtgtagacttaataccatgtgacatttaatccagattgtaaatgctcatttatggttaatgacattgaaggtacatttattgtaccaaaccattttatgagttttctgttagcttgctttaaaaattattactgtaagaaatagttttataaaaaattatatttttattcagtaatttaattttgtaaatgccaaatgaaaaacgttttttgctgctatggtcttagcctgtagacatgctgctagtatcagaggggcagtagagcttggacagaaagaaaagaaacttggtgttaggtaattgactatgcactagtatttcagactttttaattttatatatatatacattttttttccttctgcaatacatttgaaaacttgtttgggagactctgcattttttattgtggtttttttgttattgttggtttatacaagcatgcgttgcacttcttttttgggagatgtgtgttgttgatgttctatgttttgttttgagtgtagcctgactgttttataatttgggagttctgcatttgatccgcatcccctgtggtttctaagtgtatggtctcagaactgttgcatggatcctgtgtttgcaactggggagacagaaactgtggttgatagccagtcactgccttaagaacatttgatgcaagatggccagcactgaacttttgagatatgacggtgtacttactgccttgtagcaaaataaagatgtgcccttatttt

SEQ ID NO: 34260 - DNA, 3571 bp, Homo sapiens
  source 1..3571: mol_type = unassigned DNA
aatatcaacctgtttcctcctcctccttctcctcctcctccgtgacctcctcctcctctttctcctgagaaacttcgccccagcggtgcggagcgccgctgcgcagccggggagggacgcaggcaggcggcgggcagcgggaggcggcagcccggtgcggtccccgcggctctcggcggagccccgcgcccgccgcgccatggcccgaagaccccggcacagcatatatagcagtgacgaggatgatgaggactttgagatgtgtgaccatgactatgatgggctgcttcccaagtctggaaagcgtcacttggggaaaacaaggtggacccgggaagaggatgaaaaactgaagaagctggtggaacagaatggaacagatgactggaaagttattgccaattatctcccgaatcgaacagatgtgcagtgccagcaccgatggcagaaagtactaaaccctgagctcatcaagggtccttggaccaaagaagaagatcagagagtgatagagcttgtacagaaatacggtccgaaacgttggtctgttattgccaagcacttaaaggggagaattggaaaacaatgtagggagaggtggcataaccacttgaatccagaagttaagaaaacctcctggacagaagaggaagacagaattatttaccaggcacacaagagactggggaacagatgggcagaaatcgcaaagctactgcctggacgaactgataatgctatcaagaaccactggaattctacaatgcgtcggaaggtcgaacaggaaggttatctgcaggagtcttcaaaagccagccagccagcagtggccacaagcttccagaagaacagtcatttgatgggttttgctcaggctccgcctacagctcaactccctgccactggccagcccactgttaacaacgactattcctattaccacatttctgaagcacaaaatgtctccagtcatgttccataccctgtagcgttacatgtaaatatagtcaatgtccctcagccagctgccgcagccattcagagacactataatgatgaagaccctgagaaggaaaagcgaataaaggaattagaattgctcctaatgtcaaccgagaatgagctaaaaggacagcaggtgctaccaacacagaaccacacatgcagctaccccgggtggcacagcaccaccattgccgaccacaccagacctcatggagacagtgcacctgtttcctgtttgggagaacaccactccactccatctctgccagcggatcctggctccctacctgaagaaagcgcctcgccagcaaggtgcatgatcgtccaccagggcaccattctggataatgttaagaacctcttagaatttgcagaaacactccaatttatagattctttcttaaacacttccagtaaccatgaaaactcagacttggaaatgccttctttaacttccacccccctcattggtcacaaattgactgttacaacaccatttcatagagaccagactgtgaaaactcaaaaggaaaatactgtttttagaaccccagctatcaaaaggtcaatcttagaaagctctccaagaactcctacaccattcaaacatgcacttgcagctcaagaaattaaatacggtcccctgaagatgctacctcagacaccctctcatctagtagaagatctgcaggatgtgatcaaacaggaatctgatgaatctggaattgttgctgagtttcaagaaaatggaccacccttactgaagaaaatcaaacaagaggtggaatctccaactgataaatcaggaaacttcttctgctcacaccactgggaaggggacagtctgaatacccaactgttcacgcagacctcgcctgtggcagatgcaccgactggagtgcaatggcacgatttcggctcactgcaacctctgcctcccgggttcaagcgattctcctgcctcagtctcccgagaagctgggattacaggcacccgccaccacgcccagctaattttgaatttttagtagagacggggtttctccatgttggtcaggctggtcttgaactcctgacctcaggtgatctacccgcctcggcctcccaaagtgctaggattacaggcgtgagccaccgcgcccggccagataatattcttacaagctccgttttaatggcaccagcatcagaagatgaagacaatgttctcaaagcatttacagtacctaaaaacaggtccctggcgagccccttgcagccttgtagcagtacctgggaacctgcatcctgtggaaagatggaggagcagatgacatcttccagtcaagctcgtaaatacgtgaatgcattctcagcccggacgctggtcatgtgagacatttccagaaaagcattatggttttcagaacacttcaagttgacttgggatatatcattcctcaacatgaaacttttcatgaatgggagaagaacctatttttgttgtggtacaacagttgagagcagcaccaagtgcatttagttgaatgaagtcttcttggatttcacccaactaaaaggatttttaaaaataaataacagtcttacctaaattattaggtaatgaattgtagccagttgttaatatcttaatgcagatttttttaaaaaaaacataaaatgatttatctgtattttaaaggatccaacagatcagtattttttcctgtgatgggttttttgaaatttgacacattaaaaggtactccagtatttcacttttctcgatcactaaacatatgcatatatttttaaaaatcagtaaaagcattactctaagtgtagacttaataccatgtgacatttaatccagattgtaaatgctcatttatggttaatgacattgaaggtacatttattgtaccaaaccattttatgagttttctgttagcttgctttaaaaattattactgtaagaaatagttttataaaaaattatatttttattcagtaatttaattttgtaaatgccaaatgaaaaacgttttttgctgctatggtcttagcctgtagacatgctgctagtatcagaggggcagtagagcttggacagaaagaaaagaaacttggtgttaggtaattgactatgcactagtatttcagactttttaattttatatatatatacattttttttccttctgcaatacatttgaaaacttgtttgggagactctgcattttttattgtggtttttttgttattgttggtttatacaagcatgcgttgcacttcttttttgggagatgtgtgttgttgatgttctatgttttgttttgagtgtagcctgactgttttataatttgggagttctgcatttgatccgcatcccctgtggtttctaagtgtatggtctcagaactgttgcatggatcctgtgtttgcaactggggagacagaaactgtggttgatagccagtcactgccttaagaacatttgatgcaagatggccagcactgaacttttgagatatgacggtgtacttactgccttgtagcaaaataaagatgtgcccttattttacct

SEQ ID NO: 34261 - DNA, 3672 bp, Homo sapiens
  source 1..3672: mol_type = unassigned DNA
aatatcaacctgtttcctcctcctccttctcctcctcctccgtgacctcctcctcctctttctcctgagaaacttcgccccagcggtgcggagcgccgctgcgcagccggggagggacgcaggcaggcggcgggcagcgggaggcggcagcccggtgcggtccccgcggctctcggcggagccccgcgcccgccgcgccatggcccgaagaccccggcacagcatatatagcagtgacgaggatgatgaggactttgagatgtgtgaccatgactatgatgggctgcttcccaagtctggaaagcgtcacttggggaaaacaaggtggacccgggaagaggatgaaaaactgaagaagctggtggaacagaatggaacagatgactggaaagttattgccaattatctcccgaatcgaacagatgtgcagtgccagcaccgatggcagaaagtactaaaccctgagctcatcaagggtccttggaccaaagaagaagatcagagagtgatagagcttgtacagaaatacggtccgaaacgttggtctgttattgccaagcacttaaaggggagaattggaaaacaatgtagggagaggtggcataaccacttgaatccagaagttaagaaaacctcctggacagaagaggaagacagaattatttaccaggcacacaagagactggggaacagatgggcagaaatcgcaaagctactgcctggacgaactgataatgctatcaagaaccactggaattctacaatgcgtcggaaggtcgaacaggaaggttatctgcaggagtcttcaaaagccagccagccagcagtggccacaagcttccagaagaacagtcatttgatgggttttgctcaggctccgcctacagctcaactccctgccactggccagcccactgttaacaacgactattcctattaccacatttctgaagcacaaaatgtctccagtcatgttccataccctgtagcgttacatgtaaatatagtcaatgtccctcagccagctgccgcagccattcagagacactataatgatgaagaccctgagaaggaaaagcgaataaaggaattagaattgctcctaatgtcaaccgagaatgagctaaaaggacagcaggtgctaccaacacagaaccacacatgcagctaccccgggtggcacagcaccaccattgccgaccacaccagacctcatggagacagtgcacctgtttcctgtttgggagaacaccactccactccatctctgccagcggatcctggctccctacctgaagaaagcgcctcgccagcaaggtgcatgatcgtccaccagggcaccattctggataatgttaagaacctcttagaatttgcagaaacactccaatttatagattctgattcttcatcatggtgtgatctcagcagttttgaattctttgaagaagcagatttttcacctagccaacatcacacaggcaaagccctacagcttcagcaaagagagggcaatgggactaaacctgcaggagaacctagcccaagggtgaacaaacgtatgttgagtgagagttcacttgacccacccaaggtcttacctcctgcaaggcacagcacaattccactggtcatccttcgaaaaaaacggggccaggccagccccttagccactggagactgtagctccttcatatttgctgacgtcagcagttcaactcccaagcgttcccctgtcaaaagcctacccttctctccctcgcagttcttaaacacttccagtaaccatgaaaactcagacttggaaatgccttctttaacttccacccccctcattggtcacaaattgactgttacaacaccatttcatagagaccagactgtgaaaactcaaaaggaaaatactgtttttagaaccccagctatcaaaaggtcaatcttagaaagctctccaagaactcctacaccattcaaacatgcacttgcagctcaagaaattaaatacggtcccctgaagatgctacctcagacaccctctcatctagtagaagatctgcaggatgtgatcaaacaggaatctgatgaatctggaattgttgctgagtttcaagaaaatggaccacccttactgaagaaaatcaaacaagaggtggaatctccaactgataaatcaggaaacttcttctgctcacaccactgggaaggggacagtctgaatacccaactgttcacgcagacctcgcctgtggcagatgcaccgaatattcttacaagctccgttttaatggcaccagcatcagaagatgaagacaatgttctcaaagcatttacagtacctaaaaacaggtccctggcgagccccttgcagccttgtagcagtacctgggaacctgcatcctgtggaaagatggaggagcagatgacatcttccagtcaagctcgtaaatacgtgaatgcattctcagcccggacgctggtcatgtgagacatttccagaaaagcattatggttttcagaacacttcaagttgacttgggatatatcattcctcaacatgaaacttttcatgaatgggagaagaacctatttttgttgtggtacaacagttgagagcagcaccaagtgcatttagttgaatgaagtcttcttggatttcacccaactaaaaggatttttaaaaataaataacagtcttacctaaattattaggtaatgaattgtagccagttgttaatatcttaatgcagatttttttaaaaaaaacataaaatgatttatctgtattttaaaggatccaacagatcagtattttttcctgtgatgggttttttgaaatttgacacattaaaaggtactccagtatttcacttttctcgatcactaaacatatgcatatatttttaaaaatcagtaaaagcattactctaagtgtagacttaataccatgtgacatttaatccagattgtaaatgctcatttatggttaatgacattgaaggtacatttattgtaccaaaccattttatgagttttctgttagcttgctttaaaaattattactgtaagaaatagttttataaaaaattatatttttattcagtaatttaattttgtaaatgccaaatgaaaaacgttttttgctgctatggtcttagcctgtagacatgctgctagtatcagaggggcagtagagcttggacagaaagaaaagaaacttggtgttaggtaattgactatgcactagtatttcagactttttaattttatatatatatacattttttttccttctgcaatacatttgaaaacttgtttgggagactctgcattttttattgtggtttttttgttattgttggtttatacaagcatgcgttgcacttcttttttgggagatgtgtgttgttgatgttctatgttttgttttgagtgtagcctgactgttttataatttgggagttctgcatttgatccgcatcccctgtggtttctaagtgtatggtctcagaactgttgcatggatcctgtgtttgcaactggggagacagaaactgtggttgatagccagtcactgccttaagaacatttgatgcaagatggccagcactgaacttttgagatatgacggtgtacttactgccttgtagcaaaataaagatgtgcccttatttt

SEQ ID NO: 34262 - DNA, 3302 bp, Homo sapiens
  source 1..3302: mol_type = unassigned DNA
ttcctcctcctccttctcctcctcctccgtgacctcctcctcctctttctcctgagaaacttcgccccagcggtgcggagcgccgctgcgcagccggggagggacgcaggcaggcggcgggcagcgggaggcggcagcccggtgcggtccccgcggctctcggcggagccccgcgcccgccgcgccatggcccgaagaccccggcacagcatatatagcagtgacgaggatgatgaggactttgagatgtgtgaccatgactatgatgggctgcttcccaagtctggaaagcgtcacttggggaaaacaaggtggacccgggaagaggatgaaaaactgaagaagctggtggaacagaatggaacagatgactggaaagttattgccaattatctcccgaatcgaacagatgtgcagtgccagcaccgatggcagaaagtactaaaccctgagctcatcaagggtccttggaccaaagaagaagatcagagagtgatagagcttgtacagaaatacggtccgaaacgttggtctgttattgccaagcacttaaaggggagaattggaaaacaatgtagggagaggtggcataaccacttgaatccagaagttaagaaaacctcctggacagaagaggaagacagaattatttaccaggcacacaagagactggggaacagatgggcagaaatcgcaaagctactgcctggacgaactgataatgctatcaagaaccactggaattctacaatgcgtcggaaggtcgaacaggaaggttatctgcaggagtcttcaaaagccagccagccagcagtggccacaagcttccagaagaacagtcatttgatgggttttgctcaggctccgcctacagctcaactccctgccactggccagcccactgttaacaacgactattcctattaccacatttctgaagcacaaaatgtctccagtcatgttccataccctgtagcgttacatgtaaatatagtcaatgtccctcagccagctgccgcagccattcagagacactataatgatgaagaccctgagaaggaaaagcgaataaaggaattagaattgctcctaatgtcaaccgagaatgagctaaaaggacagcaggtgctaccaacacagaaccacacatgcagctaccccgggtggcacagcaccaccattgccgaccacaccagacctcatggagacagtgcacctgtttcctgtttgggagaacaccactccactccatctctgccagcggatcctggctccctacctgaagaaagcgcctcgccagcaaggtgcatgatcgtccaccagggcaccattctggataatgttaagaacctcttagaatttgcagaaacactccaatttatagattctttcttaaacacttccagtaaccatgaaaactcagacttggaaatgccttctttaacttccacccccctcattggtcacaaattgactgttacaacaccatttcatagagaccagactgtgaaaactcaaaaggaaaatactgtttttagaaccccagctatcaaaaggtcaatcttagaaagctctccaagaactcctacaccattcaaacatgcacttgcagctcaagaaattaaatacggtcccctgaagatgctacctcagacaccctctcatctagtagaagatctgcaggatgtgatcaaacaggaatctgatgaatctggaattgttgctgagtttcaagaaaatggaccacccttactgaagaaaatcaaacaagaggtggaatctccaactgataaatcaggaaacttcttctgctcacaccactgggaaggggacagtctgaatacccaactgttcacgcagacctcgcctgtggcagatgcaccgaatattcttacaagctccgttttaatggcaccagcatcagaagatgaagacaatgttctcaaagcatttacagtacctaaaaacaggtccctggcgagccccttgcagccttgtagcagtacctgggaacctgcatcctgtggaaagatggaggagcagatgacatcttccagtcaagctcgtaaatacgtgaatgcattctcagcccggacgctggtcatgtgagacatttccagaaaagcattatggttttcagaacacttcaagttgacttgggatatatcattcctcaacatgaaacttttcatgaatgggagaagaacctatttttgttgtggtacaacagttgagagcagcaccaagtgcatttagttgaatgaagtcttcttggatttcacccaactaaaaggatttttaaaaataaataacagtcttacctaaattattaggtaatgaattgtagccagttgttaatatcttaatgcagatttttttaaaaaaaacataaaatgatttatctgtattttaaaggatccaacagatcagtattttttcctgtgatgggttttttgaaatttgacacattaaaaggtactccagtatttcacttttctcgatcactaaacatatgcatatatttttaaaaatcagtaaaagcattactctaagtgtagacttaataccatgtgacatttaatccagattgtaaatgctcatttatggttaatgacattgaaggtacatttattgtaccaaaccattttatgagttttctgttagcttgctttaaaaattattactgtaagaaatagttttataaaaaattatatttttattcagtaatttaattttgtaaatgccaaatgaaaaacgttttttgctgctatggtcttagcctgtagacatgctgctagtatcagaggggcagtagagcttggacagaaagaaaagaaacttggtgttaggtaattgactatgcactagtatttcagactttttaattttatatatatatacattttttttccttctgcaatacatttgaaaacttgtttgggagactctgcattttttattgtggtttttttgttattgttggtttatacaagcatgcgttgcacttcttttttgggagatgtgtgttgttgatgttctatgttttgttttgagtgtagcctgactgttttataatttgggagttctgcatttgatccgcatcccctgtggtttctaagtgtatggtctcagaactgttgcatggatcctgtgtttgcaactggggagacagaaactgtggttgatagccagtcactgccttaagaacatttgatgcaagatggccagcactgaacttttgagatatgacggtgtacttactgccttgtagcaaaataaagatgtgcccttattttacctac

SEQ ID NO: 34263 - DNA, 3304 bp, Homo sapiens
  source 1..3304: mol_type = unassigned DNA
aatatcaacctgtttcctcctcctccttctcctcctcctccgtgacctcctcctcctctttctcctgagaaacttcgccccagcggtgcggagcgccgctgcgcagccggggagggacgcaggcaggcggcgggcagcgggaggcggcagcccggtgcggtccccgcggctctcggcggagccccgcgcccgccgcgccatggcccgaagaccccggcacagcatatatagcagtgacgaggatgatgaggactttgagatgtgtgaccatgactatgatgggctgcttcccaagtctggaaagcgtcacttggggaaaacaaggtggacccgggaagaggatgaaaaactgaagaagctggtggaacagaatggaacagatgactggaaagttattgccaattatctcccgaatcgaacagatgtgcagtgccagcaccgatggcagaaagtactaaaccctgagctcatcaagggtccttggaccaaagaagaagatcagagagtgatagagcttgtacagaaatacggtccgaaacgttggtctgttattgccaagcacttaaaggggagaattggaaaacaatgtagggagaggtggcataaccacttgaatccagaagttaagaaaacctcctggacagaagaggaagacagaattatttaccaggcacacaagagactggggaacagatgggcagaaatcgcaaagctactgcctggacgaactgataatgctatcaagaaccactggaattctacaatgcgtcggaaggtcgaacaggaaggttatctgcaggagtcttcaaaagccagccagccagcagtggccacaagcttccagaagaacagtcatttgatgggttttgctcaggctccgcctacagctcaactccctgccactggccagcccactgttaacaacgactattcctattaccacatttctgaagcacaaaatgtctccagtcatgttccataccctgtagcgttacatgtaaatatagtcaatgtccctcagccagctgccgcagccattcagagacactataatgatgaagaccctgagaaggaaaagcgaataaaggaattagaattgctcctaatgtcaaccgagaatgagctaaaaggacagcagacacagaaccacacatgcagctaccccgggtggcacagcaccaccattgccgaccacaccagacctcatggagacagtgcacctgtttcctgtttgggagaacaccactccactccatctctgccagcggatcctggctccctacctgaagaaagcgcctcgccagcaaggtgcatgatcgtccaccagggcaccattctggataatgttaagaacctcttagaatttgcagaaacactccaatttatagattctttcttaaacacttccagtaaccatgaaaactcagacttggaaatgccttctttaacttccacccccctcattggtcacaaattgactgttacaacaccatttcatagagaccagactgtgaaaactcaaaaggaaaatactgtttttagaaccccagctatcaaaaggtcaatcttagaaagctctccaagaactcctacaccattcaaacatgcacttgcagctcaagaaattaaatacggtcccctgaagatgctacctcagacaccctctcatctagtagaagatctgcaggatgtgatcaaacaggaatctgatgaatctggaattgttgctgagtttcaagaaaatggaccacccttactgaagaaaatcaaacaagaggtggaatctccaactgataaatcaggaaacttcttctgctcacaccactgggaaggggacagtctgaatacccaactgttcacgcagacctcgcctgtggcagatgcaccgaatattcttacaagctccgttttaatggcaccagcatcagaagatgaagacaatgttctcaaagcatttacagtacctaaaaacaggtccctggcgagccccttgcagccttgtagcagtacctgggaacctgcatcctgtggaaagatggaggagcagatgacatcttccagtcaagctcgtaaatacgtgaatgcattctcagcccggacgctggtcatgtgagacatttccagaaaagcattatggttttcagaacacttcaagttgacttgggatatatcattcctcaacatgaaacttttcatgaatgggagaagaacctatttttgttgtggtacaacagttgagagcagcaccaagtgcatttagttgaatgaagtcttcttggatttcacccaactaaaaggatttttaaaaataaataacagtcttacctaaattattaggtaatgaattgtagccagttgttaatatcttaatgcagatttttttaaaaaaaacataaaatgatttatctgtattttaaaggatccaacagatcagtattttttcctgtgatgggttttttgaaatttgacacattaaaaggtactccagtatttcacttttctcgatcactaaacatatgcatatatttttaaaaatcagtaaaagcattactctaagtgtagacttaataccatgtgacatttaatccagattgtaaatgctcatttatggttaatgacattgaaggtacatttattgtaccaaaccattttatgagttttctgttagcttgctttaaaaattattactgtaagaaatagttttataaaaaattatatttttattcagtaatttaattttgtaaatgccaaatgaaaaacgttttttgctgctatggtcttagcctgtagacatgctgctagtatcagaggggcagtagagcttggacagaaagaaaagaaacttggtgttaggtaattgactatgcactagtatttcagactttttaattttatatatatatacattttttttccttctgcaatacatttgaaaacttgtttgggagactctgcattttttattgtggtttttttgttattgttggtttatacaagcatgcgttgcacttcttttttgggagatgtgtgttgttgatgttctatgttttgttttgagtgtagcctgactgttttataatttgggagttctgcatttgatccgcatcccctgtggtttctaagtgtatggtctcagaactgttgcatggatcctgtgtttgcaactggggagacagaaactgtggttgatagccagtcactgccttaagaacatttgatgcaagatggccagcactgaacttttgagatatgacggtgtacttactgccttgtagcaaaataaagatgtgcccttattttacct

SEQ ID NO: 34264 - DNA, 1630 bp, Homo sapiens
  source 1..1630: mol_type = unassigned DNA
atggcccgaagaccccggcacagcatatatagcagtgacgaggatgatgaggactttgagatgtgtgaccatgactatgatgggctgcttcccaagtctggaaagcgtcacttggggaaaacaaggtggacccgggaagagaatcgaacagatgtgcagtgccagcaccgatggcagaaagtactaaaccctgagctcatcaagggtccttggaccaaagaagaagatcagagaaactgataatgctatcaagaaccactggaattctacaatgcgtcggaaggtcgaacaggaaggttatctgcaggagtcttcaaaagccagccagccagcagtggccacaagcttccagaagaacagtcatttgatgggttttgctcaggctccgcctacagctcaactccctgccactggccagcccactgttaacaacgactattcctattaccacatttctgaagcacaaaatgtctccagtcatgttccataccctgtagcgttacatgtaaatatagtcaatgtccctcagccagctgccgcagccattcagagacactataatgatgaagaccctgagaaggaaaagcgaataaaggaattagaattgctcctaatgtcaaccgagaatgagctaaaaggacagcaggtgctaccaacacagaaccacacatgcagctaccccgggtggcacagcaccaccattgccgaccacaccagacctcatggagacagtgcacctgtttcctgtttgggagaacaccactccactccatctctgccagcggatcctggctccctacctgaagaaagcgcctcgccagcaaggtgcatgatcgtccaccagggcaccattctggataatgttaagaacctcttagaatttgcagaaacactccaatttatagattctttcttaaacacttccagtaaccatgaaaactcagacttggaaatgccttctttaacttccacccccctcattggtcacaaattgactgttacaacaccatttcatagagaccagactgtgaaaactcaaaaggaaaatactgtttttagaaccccagctatcaaaaggtcaatcttagaaagctctccaagaactcctacaccattcaaacatgcacttgcagctcaagaaattaaatacggtcccctgaagatgctacctcagacaccctctcatctagtagaagatctgcaggatgtgatcaaacaggaatctgatgaatctggaattgttgctgagtttcaagaaaatggaccacccttactgaagaaaatcaaacaagaggtggaatctccaactgataaatcaggaaacttcttctgctcacaccactgggaaggggacagtctgaatacccaactgttcacgcagacctcgcctgtggcagatgcaccgaatattcttacaagctccgttttaatggcaccagcatcagaagatgaagacaatgttctcaaagcatttacagtacctaaaaacaggtccctggcgagccccttgcagccttgtagcagtacctgggaacctgcatcctgtggaaagatggaggagcagatgacatcttccagtcaagctcgtaaatacgtgaatgcattctcagcccggacgctggtcatgtga

SEQ ID NO: 34265 - DNA, 1824 bp, Homo sapiens
  source 1..1824: mol_type = unassigned DNA
atggcccgaagaccccggcacagcatatatagcagtgacgaggatgatgaggactttgagatgtgtgaccatgactatgatgggctgcttcccaagtctggaaagcgtcacttggggaaaacaaggtggacccgggaagaggatgaaaaactgaagaagctggtggaacagaatggaacagatgactggaaagttattgccaattatctcccgaatcgaacagatgtgcagtgccagcaccgatggcagaaagtactaaaccctgagctcatcaagggtccttggaccaaagaagaagatcagagaaactgataatgctatcaagaaccactggaattctacaatgcgtcggaaggtcgaacaggaaggttatctgcaggagtcttcaaaagccagccagccagcagtggccacaagcttccagaagaacagtcatttgatgggttttgctcaggctccgcctacagctcaactccctgccactggccagcccactgttaacaacgactattcctattaccacatttctgaagcacaaaatgtctccagtcatgttccataccctgtagcgttacatgtaaatatagtcaatgtccctcagccagctgccgcagccattcagagacactataatgatgaagaccctgagaaggaaaagcgaataaaggaattagaattgctcctaatgtcaaccgagaatgagctaaaaggacagcaggtgctaccattatgtgggccattactgaattctgacatctttagcgactgggcagccaactgggatggctccttgtgctttgcaacatacatagttaaccaacaaagacaataaaagagaagtgatgcccaacacagaaccacacatgcagctaccccgggtggcacagcaccaccattgccgaccacaccagacctcatggagacagtgcacctgtttcctgtttgggagaacaccactccactccatctctgccagcggatcctggctccctacctgaagaaagcgcctcgccagcaaggtgcatgatcgtccaccagggcaccattctggataatgttaagaacctcttagaatttgcagaaacactccaatttatagattctttcttaaacacttccagtaaccatgaaaactcagacttggaaatgccttctttaacttccacccccctcattggtcacaaattgactgttacaacaccatttcatagagaccagactgtgaaaactcaaaaggaaaatactgtttttagaaccccagctatcaaaaggtcaatcttagaaagctctccaagaactcctacaccattcaaacatgcacttgcagctcaagaaattaaatacggtcccctgaagatgctacctcagacaccctctcatctagtagaagatctgcaggatgtgatcaaacaggaatctgatgaatctggaattgttgctgagtttcaagaaaatggaccacccttactgaagaaaatcaaacaagaggtggaatctccaactgataaatcaggaaacttcttctgctcacaccactgggaaggggacagtctgaatacccaactgttcacgcagacctcgcctgtggcagatgcaccgaatattcttacaagctccgttttaatggcaccagcatcagaagatgaagacaatgttctcaaagcatttacagtacctaaaaacaggtccctggcgagccccttgcagccttgtagcagtacctgggaacctgcatcctgtggaaagatggaggagcagatgacatcttccagtcaagctcgtaaatacgtgaatgcattctcagcccggacgctggtcatgtga

SEQ ID NO: 34266 - DNA, 1818 bp, Homo sapiens
  source 1..1818: mol_type = unassigned DNA
atggcccgaagaccccggcacagcatatatagcagtgacgaggatgatgaggactttgagatgtgtgaccatgactatgatgggctgcttcccaagtctggaaagcgtcacttggggaaaacaaggtggacccgggaagaggatgaaaaactgaagaagctggtggaacagaatggaacagatgactggaaagttattgccaattatctcccgaatcgaacagatgtgcagtgccagcaccgatggcagaaagtactaaaccctgagctcatcaagggtccttggaccaaagaagaagatcagagagtgatagagcttgtacagaaatacggtccgaaacgttggtctgttattgccaagcacttaaaggggagaattggaaaacaatgtagggagaggtggcataaccacttgaatccagaagttaagaaaacctcctggacagaagaggaagacagaattatttaccaggcacacaagagactggggaacagatgggcagaaatcgcaaagctactgcctggacgaactgataatgctatcaagaaccactggaattctacaatgcgtcggaaggtcgaacaggaaggttatctgcaggagtcttcaaaagccagccagccagcagtggccacaagcttccagaagaacagtcatttgatgggttttgctcaggctccgcctacagctcaactccctgccactggccagcccactgttaacaacgactattcctattaccacatttctgaagcacaaaatgtctccagtcatgttccataccctgtagcgttacatgtaaatatagtcaatgtccctcagccagctgccgcagccattcagacacagaaccacacatgcagctaccccgggtggcacagcaccaccattgccgaccacaccagacctcatggagacagtgcacctgtttcctgtttgggagaacaccactccactccatctctgccagcggatcctggctccctacctgaagaaagcgcctcgccagcaaggtgcatgatcgtccaccagggcaccattctggataatgttaagaacctcttagaatttgcagaaacactccaatttatagattctttcttaaacacttccagtaaccatgaaaactcagacttggaaatgccttctttaacttccacccccctcattggtcacaaattgactgttacaacaccatttcatagagaccagactgtgaaaactcaaaaggaaaatactgtttttagaaccccagctatcaaaaggtcaatcttagaaagctctccaagaactcctacaccattcaaacatgcacttgcagctcaagaaattaaatacggtcccctgaagatgctacctcagacaccctctcatctagtagaagatctgcaggatgtgatcaaacaggaatctgatgaatctggaattgttgctgagtttcaagaaaatggaccacccttactgaagaaaatcaaacaagaggtggaatctccaactgataaatcaggaaacttcttctgctcacaccactgggaaggggacagtctgaatacccaactgttcacgcagacctcgcctgtggcagatgcaccgaatattcttacaagctccgttttaatggcaccagcatcagaagatgaagacaatgttctcaaagcatttacagtacctaaaaacaggtccctggcgagccccttgcagccttgtagcagtacctgggaacctgcatcctgtggaaagatggaggagcagatgacatcttccagtcaagctcgtaaatacgtgaatgcattctcagcccggacgctggtcatgtga

SEQ ID NO: 34267 - DNA, 2639 bp, Homo sapiens
  source 1..2639: mol_type = unassigned DNA
gctgacgccttcgagcgcggcccggggcccggagcggccggagcagcccgggtcctgaccccggcccggctcccgctccgggctctgccggcgggcgggcgagcgcggcgcggtccgggccggggggatgtctcggcggacgcgctgcgaggatctggatgagctgcactaccaggacacagattcagatgtgccggagcagagggatagcaagtgcaaggtcaaatggacccatgaggaggacgagcagctgagggccctggtgaggcagtttggacagcaggactggaagttcctggccagccacttccctaaccgcactgaccagcaatgccagtacaggtggctgagagttttgaatccagaccttgtcaaggggccatggaccaaagaggaagaccaaaaagtcatcgagctggttaagaagtatggcacaaagcagtggacactgattgccaagcacctgaagggccggctggggaagcagtgccgtgaacgctggcacaaccacctcaaccctgaggtgaagaagtcttgctggaccgaggaggaggaccgcatcatctgcgaggcccacaaggtgctgggcaaccgctgggccgagatcgccaagatgttgccagggaggacagacaatgctgtgaagaatcactggaactctaccatcaaaaggaaggtggacacaggaggcttcttgagcgagtccaaagactgcaagcccccagtgtacttgctgctggagctcgaggacaaggacggcctccagagtgcccagcccacggaaggccagggaagtcttctgaccaactggccctccgtccctcctaccataaaggaggaggaaaacagtgaggaggaacttgcagcagccaccacatcgaaggaacaggagcccatcggtacagatctggacgcagtgcgaacaccagagcccttggaggaattcccgaagcgtgaggaccaggaaggctccccaccagaaacgagcctgccttacaagtgggtggtggaggcagctaacctcctcatccctgctgtgggttctagcctctctgaagccctggacttgatcgagtcggaccctgatgcttggtgtgacctgagtaaatttgacctccctgaggaaccatctgcagaggacagtatcaacaacagcctagtgcagctgcaagcgtcacatcagcagcaagtcctgccaccccgccagccttccgccctggtgcccagtgtgaccgagtaccgcctggatggccacaccatctcagacctgagccggagcagccggggcgagctgatccccatctcccccagcactgaagtcgggggctctggcattggcacaccgccctctgtgctcaagcggcagaggaagaggcgtgtggctctgtcccctgtcactgagaatagcaccagtctgtccttcctggattcctgtaacagcctcacgcccaagagcacacctgttaagaccctgcccttctcgccctcccagtttctgaacttctggaacaaacaggacacattggagctggagagcccctcgctgacatccaccccagtgtgcagccagaaggtggtggtcaccacaccactgcaccgggacaagacacccctgcaccagaaacatgctgcgtttgtaaccccagatcagaagtactccatggacaacactccccacacgccaaccccgttcaagaacgccctggagaagtacggacccctgaagcccctgccacagaccccgcacctggaggaggacttgaaggaggtgctgcgttctgaggctggcatcgaactcatcatcgaggacgacatcaggcccgagaagcagaagaggaagcctgggctgcggcggagccccatcaagaaagtccggaagtctctggctcttgacattgtggatgaggatgtgaagctgatgatgtccacactgcccaagtctctatccttgccgacaactgccccttcaaactcttccagcctcaccctgtcaggtatcaaagaagacaacagcttgctcaaccagggcttcttgcaggccaagcccgagaaggcagcagtggcccagaagccccgaagccacttcacgacacctgcccctatgtccagtgcctggaagacggtggcctgcggggggaccagggaccagcttttcatgcaggagaaagcccggcagctcctgggccgcctgaagcccagccacacatctcggaccctcatcttgtcctgaggtgttgagggtgtcacgagcccattctcatgtttacaggggttgtgggggcagagggggtctgtgaatctgagagtcattcaggtgacctcctgcagggagccttctgccaccagcccctccccagactctcaggtggaggcaacagggccatgtgctgccctgttgccgagcccagctgtgggcggctcctggtgctaacaacaaagttccacttccaggtctgcctggttccctccccaaggccacagggagctccgtcagcttctcccaagcccacgtcaggcctggcctcatctcagaccctgcttaggatgggggatgtggccaggggtgctcctgtgctcaccctctcttggtgcatttttttggaagaataaaattgcctctctctttgtgctggtctgga

SEQ ID NO: 34268 - DNA, 2432 bp, Homo sapiens
  source 1..2432: mol_type = unassigned DNA
gactgcagttcctgcgagcgaggagcgcgggacctgctgacacgctgacgccttcgagcgcggcccggggcccggagcggccggagcagcccgggtcctgaccccggcccggctcccgctccgggctctgccggcgggcgggcgagcgcggcgcggtccgggccggggggatgtctcggcggacgcgctgcgaggatctggatgagctgcactaccaggacacagattcagatgtgccggagcagagggatagcaagtgcaaggtcaaatggacccatgaggagaaccgcactgaccagcaatgccagtacaggtggctgagagttttgaatccagaccttgtcaaggggccatggaccaaagaggaagaccaaaaagtcatcgagctggttaagaagtatggcacaaagcagtggacactgattgccaagcacctgaagggccggctggggaagcagtgccgtgaacgctggcacaaccacctcaaccctgaggtgaagaagtcttgctggaccgaggaggaggaccgcatcatctgcgaggcccacaaggtgctgggcaaccgctgggccgagatcgccaagatgttgccagggaggacagacaatgctgtgaagaatcactggaactctaccatcaaaaggaaggtggacacaggaggcttcttgagcgagtccaaagactgcaagcccccagtgtacttgctgctggagctcgaggacaaggacggcctccagagtgcccagcccacggaaggccagggaagtcttctgaccaactggccctccgtccctcctaccataaaggaggaggaaaacagtgaggaggaacttgcagcagccaccacatcgaaggaacaggagcccatcggtacagatctggacgcagtgcgaacaccagagcccttggaggaattcccgaagcgtgaggaccaggaaggctccccaccagaaacgagcctgccttacaagtgggtggtggaggcagctaacctcctcatccctgctgtgggttctagcctctctgaagccctggacttgatcgagtcggaccctgatgcttggtgtgacctgagtaaatttgacctccctgaggaaccatctgcagaggacagtatcaacaacagcctagtgcagctgcaagcgtcacatcagcagcaagtcctgccaccccgccagccttccgccctggtgcccagtgtgaccgagtaccgcctggatggccacaccatctcagacctgagccggagcagccggggcgagctgatccccatctcccccagcactgaagtcgggggctctggcattggcacaccgccctctgtgctcaagcggcagaggaagaggcgtgtggctctgtcccctgtcactgagaatagcaccagtctgtccttcctggattcctgtaacagcctcacgcccaagagcacacctgttaagaccctgcccttctcgccctcccagtttctgaacttctggaacaaacaggacacattggagctggagagcccctcgctgacatccaccccagtgtgcagccagaaggtggtggtcaccacaccactgcaccgggacaagacacccctgcaccagaaacatgctgcgtttgtaaccccagatcagaagtactccatggacaacactccccacacgccaaccccgttcaagaacgccctggagaagtacggacccctgaagcccctgccacagaccccgcacctggaggaggacttgaaggaggtgctgcgttctgaggctggcatcgaactcatcatcgaggacgacatcaggcccgagaagcagaagaggaagcctgggctgcggcggagccccatcaagaaagtccggaagtctctggctcttgacattgtggatgaggatgtgaagctgatgatgtccacactgcccaagtctctatccttgccgacaactgccccttcaaactcttccagcctcaccctgtcaggtatcaaagaagacaacagcttgctcaaccagggcttcttgcaggccaagcccgagaaggcagcagtggcccagaagccccgaagccacttcacgacacctgcccctatgtccagtgcctggaagacggtggcctgcggggggaccagggaccagcttttcatgcaggagaaagcccggcagctcctgggccgcctgaagcccagccacacatctcggaccctcatcttgtcctgaggtgttgagggtgtcacgagcccattctcatgtttacaggggttgtgggggcagagggggtctgtgaatctgagagtcattcaggtgacctcctgcagggagccttctgccaccagcccctccccagactctcaggtggaggcaacagggccatgtgctgccctgttgccgagcccagctgtgggcggctcctggtgctaacaacaaagttccacttccaggtctgcctgg

SEQ ID NO: 34269 - DNA, 2602 bp, Homo sapiens
  source 1..2602: mol_type = unassigned DNA
atctgtctggacgcgctgggtggatgcggggggctcctgggaactgtgttggagccgagcaagcgctagccaggcgcaagcgcgcacagactgtagccatccgaggacacccccgcccccccggcccacccggagacacccgcgcagaatcgcctccggatcccctgcagtcggcgggagtgttggaggtcggcgccggcccccgccttccgcgccccccacgggaaggaagcacccccggtattaaaacgaacggggcggaaagaagccctcagtcgccggccgggaggcgagccgatgccgagctgctccacgtccaccatgccgggcatgatctgcaagaacccagacctcgagtttgactcgctacagccctgcttctacccggacgaagatgacttctacttcggcggccccgactcgacccccccgggggaggacatctggaagaagtttgagctgctgcccacgcccccgctgtcgcccagccgtggcttcgcggagcacagctccgagcccccgagctgggtcacggagatgctgcttgagaacgagctgtggggcagcccggccgaggaggacgcgttcggcctggggggactgggtggcctcacccccaacccggtcatcctccaggactgcatgtggagcggcttctccgcccgcgagaagctggagcgcgccgtgagcgagaagctgcagcacggccgcgggccgccaaccgccggttccaccgcccagtccccgggagccggcgccgccagccctgcgggtcgcgggcacggcggggctgcgggagccggccgcgccggggccgccctgcccgccgagctcgcccacccggccgccgagtgcgtggatcccgccgtggtcttcccctttcccgtgaacaagcgcgagccagcgcccgtgcccgcagccccggccagtgccccggcggcgggccctgcggtcgcctcgggggcgggtattgccgccccagccggggccccgggggtcgcccctccgcgcccaggcggccgccagaccagcggcggcgaccacaaggccctcagtacctccggagaggacaccctgagcgattcagatgatgaagatgatgaagaggaagatgaagaggaagaaatcgacgtggtcactgtggagaagcggcgttcctcctccaacaccaaggctgtcaccacattcaccatcactgtgcgtcccaagaacgcagccctgggtcccgggagggctcagtccagcgagctgatcctcaaacgatgccttcccatccaccagcagcacaactatgccgccccctctccctacgtggagagtgaggatgcacccccacagaagaagataaagagcgaggcgtccccacgtccgctcaagagtgtcatccccccaaaggctaagagcttgagcccccgaaactctgactcggaggacagtgagcgtcgcagaaaccacaacatcctggagcgccagcgccgcaacgaccttcggtccagctttctcacgctcagggaccacgtgccggagttggtaaagaatgagaaggccgccaaggtggtcattttgaaaaaggccactgagtatgtccactccctccaggccgaggagcaccagcttttgctggaaaaggaaaaattgcaggcaagacagcagcagttgctaaagaaaattgaacacgctcggacttgctagacgcttctcaaaactggacagtcactgccactttgcacattttgattttttttttaaacaaacattgtgttgacattaagaatgttggtttactttcaaatcggtcccctgtcgagttcggctctgggtgggcagtaggaccaccagtgtggggttctgctgggaccttggagagcctgcatcccaggatgctgggtggccctgcagcctcctccacctcacctccatgacagcgctaaacgttggtgacggttgggagcctctggggctgttgaagtcaccttgtgtgttccaagtttccaaacaacagaaagtcattccttctttttaaaatggtgcttaagttccagcagatgccacataaggggtttgccatttgatacccctggggaacatttctgtaaataccattgacacatccgccttttgtatacatcctgggtaatgagaggtggcttttgcggccagtattagactggaagttcatacctaagtactgtaataatacctcaatgtttgaggagcatgttttgtatacaaatatattgttaatctctgttatgtactgtactaattcttacactgcctgtatactttagtatgacgctgatacataactaaatttgatacttatattttcgtatgaaaatgagttgtgaaagttttgagtagatattactttatcactttttgaactaagaaacttttgtaaagaaatttactatatatatatgcctttttcctagcctgtttcttcctgttaatgtatttgttcatgtttggtgcatagaactgggtaaatgcaaagttctgtgtttaatttcttcaaaatgtatatatttagtgctgcatcttatagcactttgaaatacctcatgtttatgaaaataaatagcttaaaattaaatga

SEQ ID NO: 34270 - DNA, 1834 bp, Homo sapiens
  source 1..1834: mol_type = unassigned DNA
atctgtctggacgcgctgggtggatgcggggggctcctgggaactgtgttggagccgagcaagcgctagccaggcgcaagcgcgcacagactgtagccatccgaggacacccccgcccccccggcccacccggagacacccgcgcagaatcgcctccggatcccctgcagtcggcgggagtgttggaggtcggcgccggcccccgccttccgcgccccccacgggaaggaagcacccccggtattaaaacgaacggggcggaaagaagccctcagtcgccggccgggaggcgagccgatgccgagctgctccacgtccaccatgccgggcatgatctgcaagaacccagacctcgagtttgactcgctacagccctgcttctacccggacgaagatgacttctacttcggcggccccgactcgacccccccgggggaggacatctggaagaagtttgagctgctgcccacgcccccgctgtcgcccagccgtggcttcgcggagcacagctccgagcccccgagctgggtcacggagatgctgcttgagaacgagctgtggggcagcccggccgaggaggacgcgttcggcctggggggactgggtggcctcacccccaacccggtcatcctccaggactgcatgtggagcggcttctccgcccgcgagaagctggagcgcgccgtgagcgagaagctgcagcacggccgcgggccgccaaccgccggttccaccgcccagtccccgggggtcgcccctccgcgcccaggcggccgccagaccagcggcggcgaccacaaggccctcagtacctccggagaggacaccctgagcgattcagatgatgaagatgatgaagaggaagatgaagaggaagaaatcgacgtggtcactgtggagaagcggcgttcctcctccaacaccaaggctgtcaccacattcaccatcactgtgcgtcccaagaacgcagccctgggtcccgggagggctcagtccagcgagctgatcctcaaacgatgccttcccatccaccagcagcacaactatgccgccccctctccctacgtggagagtgaggatgcacccccacagaagaagataaagagcgaggcgtccccacgtccgctcaagagtgtcatccccccaaaggctaagagcttgagcccccgaaactctgactcggaggacagtgagcgtcgcagaaaccacaacatcctggagcgccagcgccgcaacgaccttcggtccagctttctcacgctcagggaccacgtgccggagttggtaaagaatgagaaggccgccaaggtggtcattttgaaaaaggccactgagtatgtccactccctccaggccgaggagcaccagcttttgctggaaaaggaaaaattgcaggcaagacagcagcagttgctaaagaaaattgaacacgctcggacttgctagacgcttctcaaaactggacagtcactgccactttgcacattttgattttttttttaaacaaacattgtgttgacattaagaatgttggtttactttcaaatcggtcccctgtcgagttcggctctgggtgggcagtaggaccaccagtgtggggttctgctgggaccttggagagcctgcatcccaggatgctgggtggccctgcagcctcctccacctcacctccatgacagcgctaaacgttggtgacggttgggagcctctggggctgttgaagtcaccttgtgtgttccaagtttccaaacaacagaaagtcattccttctttttaaaatggtgcttaagttccagcagatgccacataaggggtttgccatttgatacccctg

SEQ ID NO: 34271 - DNA, 1953 bp, Homo sapiens
  source 1..1953: mol_type = unassigned DNA
attagcgcagggacctccgggccacagctcagagaatcggaaggcctcctcccccttcccgagcgctgccactggggccgaggtttccagcaagaacccgcgtgtccctgcgcacgcacacacggtgcacacgtcagtccggcgcctccccgtgccccgactcacgcaggtcctcccgcgcgcccgcaacacgcccgcaggctcctgtgtctgctgccggggcagcggggcccggaaggcagaagatggctgtgccacccacgtatgccgatcttggcaaatctgccagggatgtcttcaccaagggctatggatttggcttaataaagcttgatttgaaaacaaaatctgagaatggattggaatttacaagctcaggctcagccaacactgagaccaccaaagtgacgggcagtctggaaaccaagtacagatggactgagtacggcctgacgtttacagagaaatggaataccgacaatacactaggcaccgagattactgtggaagatcagcttgcacgtggactgaagctgaccttcgattcatccttctcacctaacactgggaaaaaaaatgctaaaatcaagacagggtacaagcgggagcacattaacctgggctgcgacatggatttcgacattgctgggccttccatccggggtgctctggtgctaggttacgagggctggctggccggctaccagatgaattttgagactgcaaaatcccgagtgacccagagcaactttgcagttggctacaagactgatgaattccagcttcacactaatgtgaatgacgggacagagtttggcggctccatttaccagaaagtgaacaagaagttggagaccgctgtcaatcttgcctggacagcaggaaacagtaacacgcgcttcggaatagcagccaagtatcagattgaccctgacgcctgcttctcggctaaagtgaacaactccagcctgataggtttaggatacactcagactctaaagccaggtattaaactgacactgtcagctcttctggatggcaagaacgtcaatgctggtggccacaagcttggtctaggactggaatttcaagcataaatgaatactgtacaattgtttaattttaaactattttgcagcatagctaccttcagaatttagtgtatcttttaatgttgtatgtctgggatgcaagtattgctaaatatgttagccctccaggttaaagttgattcagctttaagatgttacccttccagaggtacagaagaaacctatttccaaaaaaggtcctttcagtggtagactcggggagaacttggtggcccctttgagatgccaggtttcttttttatctagaaatggctgcaagtggaagcggataatatgtaggcactttgtaaattcatattgagtaaatgaatgaaattgtgatttcctgagaatcgaaccttggttccctaaccctaattgatgagaggctcgctgcttgatggtgtgtacaaactcacctgaatgggacttttttagacagatcttcatgacctgttcccaccccagttcatcatcatctcttttacaccaaaaggtctgcagggtgtggtaactgtttcttttgtgccattttggggtggagaaggtggatgtgatgaagccaataattcaggacttattccttcttgtgttgtgtttttttttggcccttgcaccagagtatgaaatagcttccaggagctccagctataagcttggaagtgtctgtgtgattgtaatcacatggtgacaacactcagaatctaaattggacttctgttgtattctcaccactcaatttgttttttagcagtttaatgggtacattttagagtcttccattttgttggaattagatcctccccttcaaatgctgtaattaacaacacttaaaaaacttgaataaaatattgaaacctca

SEQ ID NO: 34272 - DNA, 1807 bp, Homo sapiens
  source 1..1807: mol_type = unassigned DNA
gccgctcgctcggctccgctccctggctcggctccctgcctccgcgtcgcagcccccgccgtagccgcctccgagcccgccgccacatcctctgagaagatggctgtgccacccacgtatgccgatcttggcaaatctgccagggatgtcttcaccaagggctatggatttggcttaataaagcttgatttgaaaacaaaatctgagaatggattggaatttacaagctcaggctcagccaacactgagaccaccaaagtgacgggcagtctggaaaccaagtacagatggactgagtacggcctgacgtttacagagaaatggaataccgacaatacactaggcaccgagattactgtggaagatcagcttgcacgtggactgaagctgaccttcgattcatccttctcacctaacactgggaaaaaaaatgctaaaatcaagacagggtacaagcgggagcacattaacctgggctgcgacatggatttcgacattgctgggccttccatccggggtgctctggtgctaggttacgagggctggctggccggctaccagatgaattttgagactgcaaaatcccgagtgacccagagcaactttgcagttggctacaagactgatgaattccagcttcacactaatgtgaatgacgggacagagtttggcggctccatttaccagaaagtgaacaagaagttggagaccgctgtcaatcttgcctggacagcaggaaacagtaacacgcgcttcggaatagcagccaagtatcagattgaccctgacgcctgcttctcggctaaagtgaacaactccagcctgataggtttaggatacactcagactctaaagccaggtattaaactgacactgtcagctcttctggatggcaagaacgtcaatgctggtggccacaagcttggtctaggactggaatttcaagcataaatgaatactgtacaattgtttaattttaaactattttgcagcatagctaccttcagaatttagtgtatcttttaatgttgtatgtctgggatgcaagtattgctaaatatgttagccctccaggttaaagttgattcagctttaagatgttacccttccagaggtacagaagaaacctatttccaaaaaaggtcctttcagtggtagactcggggagaacttggtggcccctttgagatgccaggtttcttttttatctagaaatggctgcaagtggaagcggataatatgtaggcactttgtaaattcatattgagtaaatgaatgaaattgtgatttcctgagaatcgaaccttggttccctaaccctaattgatgagaggctcgctgcttgatggtgtgtacaaactcacctgaatgggacttttttagacagatcttcatgacctgttcccaccccagttcatcatcatctcttttacaccaaaaggtctgcagggtgtggtaactgtttcttttgtgccattttggggtggagaaggtggatgtgatgaagccaataattcaggacttattccttcttgtgttgtgtttttttttggcccttgcaccagagtatgaaatagcttccaggagctccagctataagcttggaagtgtctgtgtgattgtaatcacatggtgacaacactcagaatctaaattggacttctgttgtattctcaccactcaatttgttttttagcagtttaatgggtacattttagagtcttccattttgttggaattagatcctccccttcaaatgctgtaattaacaacacttaaaaaacttgaataaaatattgaaacctca

SEQ ID NO: 34273 - DNA, 1873 bp, Homo sapiens
  source 1..1873: mol_type = unassigned DNA
gtcccgggcggggcctgggggcggagcgcgccgggccgggcgcgcaggaggggaggcgggtccgcgccgccgccgtccgcgccgccccgcccttggcccagccgctcgctcggctccgctccctggctcggctccctgcctccgcgtcgcagcccccgccgtagccgcctccgagcccgccgccacatcctctgagcagaagatggctgtgccacccacgtatgccgatcttggcaaatctgccagggatgtcttcaccaagggctatggatttggcttaataaagcttgatttgaaaacaaaatctgagaatggattggaatttacaagctcaggctcagccaacactgagaccaccaaagtgacgggcagtctggaaaccaagtacagatggactgagtacggcctgacgtttacagagaaatggaataccgacaatacactaggcaccgagattactgtggaagatcagcttgcacgtggactgaagctgaccttcgattcatccttctcacctaacactgggaaaaaaaatgctaaaatcaagacagggtacaagcgggagcacattaacctgggctgcgacatggatttcgacattgctgggccttccatccggggtgctctggtgctaggttacgagggctggctggccggctaccagatgaattttgagactgcaaaatcccgagtgacccagagcaactttgcagttggctacaagactgatgaattccagcttcacactaatgtgaatgacgggacagagtttggcggctccatttaccagaaagtgaacaagaagttggagaccgctgtcaatcttgcctggacagcaggaaacagtaacacgcgcttcggaatagcagccaagtatcagattgaccctgacgcctgcttctcggctaaagtgaacaactccagcctgataggtttaggatacactcagactctaaagccaggtattaaactgacactgtcagctcttctggatggcaagaacgtcaatgctggtggccacaagcttggtctaggactggaatttcaagcataaatgaatactgtacaattgtttaattttaaactattttgcagcatagctaccttcagaatttagtgtatcttttaatgttgtatgtctgggatgcaagtattgctaaatatgttagccctccaggttaaagttgattcagctttaagatgttacccttccagaggtacagaagaaacctatttccaaaaaaggtcctttcagtggtagactcggggagaacttggtggcccctttgagatgccaggtttcttttttatctagaaatggctgcaagtggaagcggataatatgtaggcactttgtaaattcatattgagtaaatgaatgaaattgtgatttcctgagaatcgaaccttggttccctaaccctaattgatgagaggctcgctgcttgatggtgtgtacaaactcacctgaatgggacttttttagacagatcttcatgacctgttcccaccccagttcatcatcatctcttttacaccaaaaggtctgcagggtgtggtaactgtttcttttgtgccattttggggtggagaaggtggatgtgatgaagccaataattcaggacttattccttcttgtgttgtgtttttttttggcccttgcaccagagtatgaaatagcttccaggagctccagctataagcttggaagtgtctgtgtgattgtaatcacatggtgacaacactcagaatctaaattggacttctgttgtattctcaccactcaatttgttttttagcagtttaatgggtacattttagagtcttccattttgttggaattagatcctccccttcaaatgctgtaattaac

SEQ ID NO: 34274 - DNA, 931 bp, Homo sapiens
  source 1..931: mol_type = unassigned DNA
ggcagtcccaaaaagcctctcaggcacacaacccagcacagcaaggcagtcacaccaagattcccctcttcccgcggcctcgccatggcgacccacggacagacttgcgcgcgtccaatgtgtattcctccatcatatgctgaccttggcaaagctgccagagatattttcaacaaaggatttggttttgggttggtgaaactggatgtgaaaacaaagtcttgcagtggcgtggaattttcaacgtccggttcatctaatacagacactggtaaagttactgggaccttggagaccaaatacaagtggtgtgagtatggtctgactttcacagaaaagtggaacactgataacactctgggaacagaaatcgcaattgaagaccagatttgtcaaggtttgaaactgacatttgatactaccttctcaccaaacacaggaaagaaaagtggtaaaatcaagtcttcttacaagagggagtgtataaaccttggttgtgatgttgactttgattttgctggacctgcaatccatggttcagctgtctttggttatgagggctggcttgctggctaccagatgacctttgacagtgccaaatcaaagctgacaaggaataactttgcagtgggctacaggactggggacttccagctacacactaatgtcaatgatgggacagaatttggaggatcaatttatcagaaagtttgtgaagatcttgacacttcagtaaaccttgcttggacatcaggtaccaactgcactcgttttggcattgcagctaaatatcagttggatcccactgcttccatttctgcaaaagtcaacaactctagcttaattggagtaggctatactcagactctgaggcctggtgtgaagcttacactctctgctctggtagatgggaagagcattaatgctggag

SEQ ID NO: 34275 - DNA, 1467 bp, Homo sapiens
  source 1..1467: mol_type = unassigned DNA
gctgctggagctgcagcccgaccgcgagcgtgccaagcggcttcagcagctagcggagcggtggcggcggcccccctcaggacaccaccagattcccctcttcccgcggcctcgccatggcgacccacggacagacttgcgcgcgtcgatcggatcaatcacttttctagaggaagtagcagtccctcttgtgagagcgcaaggtcattacttgtgctcctaagggcgtggacgtgctttgtggaatgaatgagctggtgtaatgagctcagattgcctgcccttaagcagcacagcattggccgaggacttgagagtcacattacaatgtgtattcctccatcatatgctgaccttggcaaagctgccagagatattttcaacaaaggatttggttttgggttggtgaaactggatgtgaaaacaaagtcttgcagtggcgtggaattttcaacgtccggttcatctaatacagacactggtaaagttactgggaccttggagaccaaatacaagtggtgtgagtatggtctgactttcacagaaaagtggaacactgataacactctgggaacagaaatcgcaattgaagaccagatttgtcaaggtttgaaactgacatttgatactaccttctcaccaaacacaggaaagaaaagtggtaaaatcaagtcttcttacaagagggagtgtataaaccttggttgtgatgttgactttgattttgctggacctgcaatccatggttcagctgtctttggttatgagggctggcttgctggctaccagatgacctttgacagtgccaaatcaaagctgacaaggaataactttgcagtgggctacaggactggggacttccagctacacactaatgtcaatgatgggacagaatttggaggatcaatttatcagaaagtttgtgaagatcttgacacttcagtaaaccttgcttggacatcaggtaccaactgcactcgttttggcattgcagctaaatatcagttggatcccactgcttccatttctgcaaaagtcaacaactctagcttaattggagtaggctatactcagactctgaggcctggtgtgaagcttacactctctgctctggtagatgggaagagcattaatgctggaggccacaaggttgggctcgccctggagttggaggcttaatccagctgaaagaaacctttgggaatggatatcagaagatttggccttaatatatttccattgtgaccagcagcaggcttttttcccccaagaagatgatcaaaacaaaggatgatctcaacaagagctgtattttaagtatttagacagttctttgttagctggtttctagttggttatctagttaccaatgctgcagtcctgcagtcacctatacattatttaaatgtatttaactgttaaatgcgctacccaccaataatgaaatagacctttatgaaaactgtg

SEQ ID NO: 34276 - DNA, 1557 bp, Homo sapiens
  source 1..1557: mol_type = unassigned DNA
ggcgcggcggacagccccgggggcagcggcggggtcctgtctgggagaggacagggttgcggcgggcggaacggtgtctccttcacttcgccctccagctgctggagctgcagcccgaccgcgagcgtgccaagcggcttcagcagctagcggagcggtggcggcggcccccctcaggacaccaccagattcccctcttcccgcggcctcgccatggcgacccacggacagacttgcgcgcgtccaatgtgtattcctccatcatatgctgaccttggcaaagctgccagagatattttcaacaaaggatttggttttgggttggtgaaactggatgtgaaaacaaagtcttgcagtggcgtggaattttcaacgtccggttcatctaatacagacactggtaaagttactgggaccttggagaccaaatacaagtggtgtgagtatggtctgactttcacagaaaagtggaacactgataacactctgggaacagaaatcgcaattgaagaccagatttgtcaaggtttgaaactgacatttgatactaccttctcaccaaacacaggaaagaaaagtggtaaaatcaagtcttcttacaagagggagtgtataaaccttggttgtgatgttgactttgattttgctggacctgcaatccatggttcagctgtctttggttatgagggctggcttgctggctaccagatgacctttgacagtgccaaatcaaagctgacaaggaataactttgcagtgggctacaggactggggacttccagctacacactaatgtcaatgatgggacagaatttggaggatcaatttatcagaaagtttgtgaagatcttgacacttcagtaaaccttgcttggacatcaggtaccaactgcactcgttttggcattgcagctaaatatcagttggatcccactgcttccatttctgcaaaagtcaacaactctagcttaattggagtaggctatactcagactctgaggcctggtgtgaagcttacactctctgctctggtagatgggaagagcattaatgctggaggccacaaggttgggctcgccctggagttggaggcttaatccagctgaaagaaacctttgggaatggatatcagaagatttggccttaatatatttccattgtgaccagcagcaggcttttttcccccaagaagatgatcaaaacaaaggatgatctcaacaagagctgtattttaagtatttagacagttctttgttagctggtttctagttggttatctagttaccaatgctgcagtcctgcagtcacctatacattatttaaatgtatttaactgttaaatgcgctacccaccaataatgaaatagacctttatgaaaactgtgcaattgtgtgcatgtttgtttttatgttcctttagaaaacattgactgttaccattgaatgagatggatcagtggatattaagatgaggttacaaattttgttaagttcagccattattacttttggtatcccagaacatgacaaattatgaataaaacaagtatacataa

SEQ ID NO: 34277 - DNA, 681 bp, Homo sapiens
  source 1..681: mol_type = unassigned DNA
cccaccgacggacggaggcagcccacctgcaggaccggggcgctgtcggtccacgtggccgctctggagcagattcccctcttcccgcggcctcgccatggcgacccacggacagacttgcgcgcgtccaatgtgtattcctccatcatatgctgaccttggcaaagctgccagagatattttcaacaaaggatttggttttgggttggtgaaactggatgtgaaaacaaagtcttgcagtggcgtggaattttcaacgtccggttcatctaatacagacactggtaaagttactgggaccttggagaccaaatacaagtggtgtgagtatggtctgactttcacagaaaagtggaacactgataacactctgggaacagaaatcgcaattgaagaccagatttgtcaaggtttgaaactgacatttgatactaccttctcaccaaacacaggaaagaaaagtggtaaaatcaagtcttcttacaagagggagtgtataaaccttggttgtgatgttgactttgattttgctggacctgcaatccatggttcagctgtctttggttatgagggctggcttgctggctaccagatgacctttgacagtgccaaatcaaagctgacaaggaataactttgcagtgggctacaggactggggacttccagctacacactaatgt

SEQ ID NO: 34278 - DNA, 457 bp, Homo sapiens
  source 1..457: mol_type = unassigned DNA
gttaattggggattctgcctttggaggatcggatcaatcacttttctagaggaagtagcagtccctcttgtgagagcgcaaggtcattacttgtgctcctaagggcgtggacgtgctttgtggaatgaatgagctggtgtaatgagctcagattgcctgcccttaagcagcacagcattggccgaggacttgagagtcacattacaatgtgtattcctccatcatatgctgaccttggcaaagctgccagagatattttcaacaaaggatttggttttgggttggtgaaactggatgtgaaaacaaagtcttgcagtggcgtggaattttcaacgtccggttcatctaatacagacactggtaaagttactgggaccttggagaccaaatacaagtggtgtgagtatggtctgactttcacagaaaagtggaacactgataacactctgggaacaga

SEQ ID NO: 34279 - DNA, 738 bp, Homo sapiens
  source 1..738: mol_type = unassigned DNA
aagatggccgcgctgccccgcggcccctcgcccctctctgcccgggatctccctttggccctttgaccccagcttaccgcacttcttgtccctcccgcagattcccctcttcccgcggcctcgccatggcgacccacggacagacttgcgcgcgtccaatgtgtattcctccatcatatgctgaccttggcaaagctgccagagatattttcaacaaaggatttggttttgggttggtgaaactggatgtgaaaacaaagtcttgcagtggcgtggaattttcaacgtccggttcatctaatacagacactggtaaagttactgggaccttggagaccaaatacaagtggtgtgagtatggtctgactttcacagaaaagtggaacactgataacactctgggaacagaaatcgcaattgaagaccagatttgtcaaggtttgaaactgacatttgatactaccttctcaccaaacacaggaaagaaaagtggtaaaatcaagtcttcttacaagagggagtgtataaaccttggttgtgatgttgactttgattttgctggacctgcaatccatggttcagctgtctttggttatgagggctggcttgctggctaccagatgacctttgacagtgccaaatcaaagctgacaaggaataactttgcagtgggctacaggactggggacttccagctacacactaatgtcaatgatgggacagaatttggaggatcaa

SEQ ID NO: 34280 - DNA, 1581 bp, Homo sapiens
  source 1..1581: mol_type = unassigned DNA
tccttcacttcgccctccagctgctggagctgcagcccgaccgcgagcgtgccaagcggcttcagcagctagcggagcggtggcggcggcccccctcaggacaccaccagattcccctcttcccgcggcctcgccatggcgacccacggacagacttgcgcgcgtccaatgtgtattcctccatcatatgctgaccttggcaaagctgccagagatattttcaacaaaggatttggttttgggttggtgaaactggatgtgaaaacaaagtcttgcagtggcgtgatatcacaatttctggctgtagtctctttattattttcacatcagctgtcttccttaggcttggcgtggtgatgcttgtgatcccagctactcaggaggctgaggaattttcaacgtccggttcatctaatacagacactggtaaagttactgggaccttggagaccaaatacaagtggtgtgagtatggtctgactttcacagaaaagtggaacactgataacactctgggaacagaaatcgcaattgaagaccagatttgtcaaggtttgaaactgacatttgatactaccttctcaccaaacacaggaaagaaaagtggtaaaatcaagtcttcttacaagagggagtgtataaaccttggttgtgatgttgactttgattttgctggacctgcaatccatggttcagctgtctttggttatgagggctggcttgctggctaccagatgacctttgacagtgccaaatcaaagctgacaaggaataactttgcagtgggctacaggactggggacttccagctacacactaatgtcaatgatgggacagaatttggaggatcaatttatcagaaagtttgtgaagatcttgacacttcagtaaaccttgcttggacatcaggtaccaactgcactcgttttggcattgcagctaaatatcagttggatcccactgcttccatttctgcaaaagtcaacaactctagcttaattggagtaggctatactcagactctgaggcctggtgtgaagcttacactctctgctctggtagatgggaagagcattaatgctggaggccacaaggttgggctcgccctggagttggaggcttaatccagctgaaagaaacctttgggaatggatatcagaagatttggccttaatatatttccattgtgaccagcagcaggcttttttcccccaagaagatgatcaaaacaaaggatgatctcaacaagagctgtattttaagtatttagacagttctttgttagctggtttctagttggttatctagttaccaatgctgcagtcctgcagtcacctatacattatttaaatgtatttaactgttaaatgcgctacccaccaataatgaaatagacctttatgaaaactgtgcaattgtgtgcatgtttgtttttatgttcctttagaaaacattgactgttaccattgaatgagatggatcagtggatattaagatgaggttacaaattttgttaagttcagccattattacttttggtatcccagaacatgacaaattatgaataaaacaagtatacat

SEQ ID NO: 34281 - DNA, 1424 bp, Homo sapiens
  source 1..1424: mol_type = unassigned DNA
ggcagtcccaaaaagcctctcaggcacacaacccagcacagcaaggcagtcacaccaagattcccctcttcccgcggcctcgccatggcgacccacggacagacttgcgcgcgtccaatgtgtattcctccatcatatgctgaccttggcaaagctgccagagatattttcaacaaaggatttggttttgggttggtgaaactggatgtgaaaacaaagtcttgcagtggcgtggaattttcaacgtccggttcatctaatacagacactggtaaagttactgggaccttggagaccaaatacaagtggtgtgagtatggtctgactttcacagaaaagtggaacactgataacactctgggaacagaaatcgcaattgaagaccagatttgtcaaggtttgaaactgacatttgatactaccttctcaccaaacacaggaaagaaaagtggtaaaatcaagtcttcttacaagagggagtgtataaaccttggttgtgatgttgactttgattttgctggacctgcaatccatggttcagctgtctttggttatgagggctggcttgctggctaccagatgacctttgacagtgccaaatcaaagctgacaaggaataactttgcagtgggctacaggactggggacttccagctacacactaatgtcaatgatgggacagaatttggaggatcaatttatcagaaagtttgtgaagatcttgacacttcagtaaaccttgcttggacatcaggtaccaactgcactcgttttggcattgcagctaaatatcagttggatcccactgcttccatttctgcaaaagtcaacaactctagcttaattggagtaggctatactcagactctgaggcctggtgtgaagcttacactctctgctctggtagatgggaagagcattaatgctggaggccacaaggttgggctcgccctggagttggaggcttaatccagctgaaagaaacctttgggaatggatatcagaagatttggccttaatatatttccattgtgaccagcagcaggcttttttcccccaagaagatgatcaaaacaaaggatgatctcaacaagagctgtattttaagtatttagacagttctttgttagctggtttctagttggttatctagttaccaatgctgcagtcctgcagtcacctatacattatttaaatgtatttaactgttaaatgcgctacccaccaataatgaaatagacctttatgaaaactgtgcaattgtgtgcatgtttgtttttatgttcctttagaaaacattgactgttaccattgaatgagatggatcagtggatattaagatgaggttacaaattttgttaagttcagccattattacttttggtatcccagaacatgacaaattatgaataaaacaagtatac

SEQ ID NO: 34282 - DNA, 1355 bp, Homo sapiens
  source 1..1355: mol_type = unassigned DNA
agcagagacaggccctcggggtggaggtctttggtttcataagagcctgagagagatttttctaagatatgtgtaacacaccaacgtactgtgacctaggaaaggctgctaaggatgtcttcaacaaaggatatggctttggcatggtcaagatagacctgaaaaccaagtcttgtagtggagtggaattttctacttctggtcatgcttacactgatacagggaaagcatcaggcaacctagaaaccaaatataaggtctgtaactatggacttaccttcacccagaaatggaacacagacaatactctagggacagaaatctcttgggagaataagttggctgaagggttgaaactgactcttgataccatatttgtaccgaacacaggaaagaagagtgggaaattgaaggcctcctataaacgggattgttttagtgttggcagtaatgttgatatagatttttctggaccaaccatctatggctgggctgtgttggccttcgaagggtggcttgctggctatcagatgagttttgacacagccaaatccaaactgtcacagaataatttcgccctgggttacaaggctgcggacttccagctgcacacacatgtgaacgatggcactgaatttggaggttctatctaccagaaggtgaatgagaagattgaaacatccataaaccttgcttggacagctgggagtaacaacacccgttttggcattgctgctaagtacatgctggattgtagaacttctctctctgctaaagtaaataatgccagcctgattggactgggttatactcagacccttcgaccaggagtcaaattgactttatcagctttaatcgatgggaagaacttcagtgcaggaggtcacaaggttggcttgggatttgaactggaagcttaatgtggtttgaggaaagcatcagatttgtccctggaagtgaagagaaatgaacccactatgttttggccttaaaattcttctgtgaaatttcaaaagtgtgaactttttattcttccaaagaattgtaatcctccccacactgaagtctaggggttgcgaatccctcctgagggagatgcttgaaggcatgcctggaagttgtcatgtttgtgccacgtttcagttcagttctgaagtgttattaaatgtgttcctcagcgacagtgtagcgtcatgttagaggagacgatctgacccaccagtttgtacatcacgtcctgcatgtcccacaccattttttcatgaccttgtaatatactggtctctgtgctatagtggaatctttggttttgcatcatagtaaaataaaataaacccatcacatttggaacataa

SEQ ID NO: 34283 - DNA, 1429 bp, Homo sapiens
  source 1..1429: mol_type = unassigned DNA
aggcgcggctgggggtgcgaggctgcgcaggcgcggacggcgttggtttgaagaccttcagcgttgccctggcggagcagagacaggccctcggggtggaggtctttggtttcataagagcctgagagagatttttctaagatatgtgtaacacaccaacgtactgtgacctaggaaaggctgctaaggatgtcttcaacaaaggatatggctttggcatggtcaagatagacctgaaaaccaagtcttgtagtggagtggtggaattttctacttctggtcatgcttacactgatacagggaaagcatcaggcaacctagaaaccaaatataaggtctgtaactatggacttaccttcacccagaaatggaacacagacaatactctagggacagaaatctcttgggagaataagttggctgaagggttgaaactgactcttgataccatatttgtaccgaacacaggaaagaagagtgggaaattgaaggcctcctataaacgggattgttttagtgttggcagtaatgttgatatagatttttctggaccaaccatctatggctgggctgtgttggccttcgaagggtggcttgctggctatcagatgagttttgacacagccaaatccaaactgtcacagaataatttcgccctgggttacaaggctgcggacttccagctgcacacacatgtgaacgatggcactgaatttggaggttctatctaccagaaggtgaatgagaagattgaaacatccataaaccttgcttggacagctgggagtaacaacacccgttttggcattgctgctaagtacatgctggattgtagaacttctctctctgctaaagtaaataatgccagcctgattggactgggttatactcagacccttcgaccaggagtcaaattgactttatcagctttaatcgatgggaagaacttcagtgcaggaggtcacaaggttggcttgggatttgaactggaagcttaatgtggtttgaggaaagcatcagatttgtccctggaagtgaagagaaatgaacccactatgttttggccttaaaattcttctgtgaaatttcaaaagtgtgaactttttattcttccaaagaattgtaatcctccccacactgaagtctaggggttgcgaatccctcctgagggagatgcttgaaggcatgcctggaagttgtcatgtttgtgccacgtttcagttcagttctgaagtgttattaaatgtgttcctcagcgacagtgtagcgtcatgttagaggagacgatctgacccaccagtttgtacatcacgtcctgcatgtcccacaccattttttcatgaccttgtaatatactggtctctgtgctatagtggaatctttggttttgcatcatagtaaaataaaataaacccatcacatttggaac

SEQ ID NO: 34284 - DNA, 580 bp, Homo sapiens
  source 1..580: mol_type = unassigned DNA
gaggctgcgcaggcgcggacggcgttggtttgaagaccttcagcgttgccctggcggagcagagacaggccctcggggtggagatatgtgtaacacaccaacgtactgtgacctaggaaaggctgctaaggatgtcttcaacaaaggatatggctttggcatggtcaagatagacctgaaaaccaagtcttgtagtggagtggaattttctacttctggtcatgcttacactgatacagggaaagcatcaggcaacctagaaaccaaatataaggtctgtaactatggacttaccttcacccagaaatggaacacagacaatactctagggacagaaatctcttgggagaataagttggctgaagggttgaaactgactcttgataccatatttgtaccgaacacaggaaagaagagtgggaaattgaaggcctcctataaacgggattgttttagtgttggcagtaatgttgatatagatttttctggaccaaccatctatggctgggctgtgttggccttcgaagggtggcttgctggctatcagatgagttttgacacagccaaatccaaactgtca

SEQ ID NO: 34285 - DNA, 949 bp, Homo sapiens
  source 1..949: mol_type = unassigned DNA
agcagagacaggccctcggggtggaggtctttggtttcataagagcctgagagagatttttctaagatatgtgtaacacaccaacgtactgtgacctaggaaaggctgctaaggatgtcttcaacaaaggatatggctttggcatggtcaagatagacctgaaaaccaagtcttgtagtggagtgatggaattttctacttctggtcatgcttacactgatacagggaaagcatcaggcaacctagaaaccaaatataaggtctgtaactatggacttaccttcacccagaaatggaacacagacaatactctagggacagaaatctcttgggagaataagttggctgaagggttgaaactgactcttgataccatatttgtaccgaacacaggaaagaagagtgggaaattgaaggcctcctataaacgggattgttttagtgttggcagtaatgttgatatagatttttctggaccaaccatctatggctgggctgtgttggccttcgaagggtggcttgctggctatcagatgagttttgacacagccaaatccaaactgtcacagaataatttcgccctgggttacaaggctgcggacttccagctgcacacacatgtgaacgatggcactgaatttggaggttctatctaccagaaggtgaatgagaagattgaaacatccataaaccttgcttggacagctgggagtaacaacacccgttttggcattgctgctaagtacatgctggattgtagaacttctctctctgctaaagtaaataatgccagcctgattggactgggttatactcagacccttcgaccaggagtcaaattgactttatcagctttaatcgatgggaagaacttcagtgcaggaggtcacaaggttggcttgggatttgaactggaagcttaatgtggtttgaggaaagcatcagattt

SEQ ID NO: 34286 - DNA, 625 bp, Homo sapiens
  source 1..625: mol_type = unassigned DNA
aggcgcggacggcgttggtttgaagaccttcagcgttgccctggcggagcagagacaggccctcggggtggagtttctttaaaaatttccattgttgtcttatacaggtctttggtttcataagagcctgagagagatttttctaagatatgtgtaacacaccaacgtactgtgacctaggaaaggctgctaaggatgtcttcaacaaaggatatggctttggcatggtcaagatagacctgaaaaccaagtcttgtagtggagtggaattttctacttctggtcatgcttacactgatacagggaaagcatcaggcaacctagaaaccaaatataaggtctgtaactatggacttaccttcacccagaaatggaacacagacaatactctagggacagaaatctcttgggagaataagttggctgaagggttgaaactgactcttgataccatatttgtaccgaacacaggaaagaagagtgggaaattgaaggcctcctataaacgggattgttttagtgttggcagtaatgttgatatagatttttctggaccaaccatctatggctgggctgtgttggccttcgaagggtggcttgctggctatcagatgagttttgacac

SEQ ID NO: 34287 - DNA, 1313 bp, Homo sapiens
  source 1..1313: mol_type = unassigned DNA
atggttggagacacattaaaacttctgtctccactgatgacaagatacttctttctgcttttttattctactgattcttcagacctcaatgaaaatcaacatcccctagattttgatgaaatggcttttggaaaagtaaaatcagggattagcttcctcattcagactggagttgggatcctgggaaattcctttctcctttgtttttataacttaattttgttcactggacacaagctgagacccacggacttgattctcagccaactggccttggctaactccatggtccttttctttaaagggatacctcagacaatggcagcttttggattgaaatatttgctgaatgacactggatgtaagtttgtcttttattatcacagggtgggcacaagagtttccctcagcaccatctgccttctcaatggattccaagccattaagctcaaccccagtatatgcaggtggatggagatcaagattagatccccaaggtttattgacttctgttgtctcctctgctgggccccccatgtcttgatgaatgcatctgttcttctattagtgaatggcccactgaatagcaaaaacagtagtgcaaaaaacaattatggatactgttcttacaaagcatcaaagagatttagctcattacatgcagtcttatatttttcccctgattttatgagtttgggcttcatggtctgggccagtggctccatggtcttcttcctctacagacacaagcagcaagtccaacacaatcacagcaacagactctcctgcagaccttcccaggaagccagagccacacacaccatcatggtcctggtgagctccttttttgttttctattcagtccatagttttctgacaatttggacaactgtagttgcaaacccaggccagtggatagtgaccaactctgtgttggtcgcctcatgtttcccagcacgcagcccttttgtcctcatcatgagtgatactcatatctctcagttctgttttgcctgcaggacaaggaaaacactctttcctaatctggttgtcatgccatgagtcttttctcttcatggaattcagctatttatcataactcttgctaagatttaggaaatattaactactagttatttgtgatagcaacatacacatggccagtaatgctcttgtccaggaagatctaataccagagctaaaaatgaaagtcatggatactgttacacaaagaacactctatataactgtgttaagtccttcagacaagttcaggaaatcaaaaagtttaaaaagggaattctttagagatt

SEQ ID NO: 34288 - DNA, 1686 bp, Homo sapiens
  source 1..1686: mol_type = unassigned DNA
tgcgcaccaatgaatgtgcatggagatggagaggcgggcctgcaagtgcgaacaagccaatcacggaatcccggcggccggcggcccgggaggcagtcgcgcgctcgcatccccaagatggcggccgttaaggacagttgtggcaaaggagaaatggccacagggaatgggcggcggctccacctggggattcctgaggccgtgtttgtggaagatgtagattccttcatgaaacagcctgggaatgagactgcagatacagtattaaagaagctggatgaacagtaccagaagtataagtttatggaactcaaccttgctcaaaagaaaagaaggctaaaaggtcagattcctgaaattaaacagactttggaaattctaaaatacatgcagaagaaaaaagagtccaccaactcaatggagaccagattcttgctggcagataacctgtattgcaaagcttcagttcctcctaccgataaaatgtgtctgtggttgggggctaatgtaatgcttgaatatgatattgatgaagctcaggcattgttggaaaagaatttatcgactgccacaaagaatcttgattccctggaggaagaccttgactttcttcgagatcaatttactaccacagaagtcaatatggccagggtttataattgggatgtaaaaagaagaaacaaggatgactctaccaagaacaaagcataatgctggcaattaaaaatgtggtttagttttccaaacatgttatcttaaatacccctttatccttacaggttgacataactttgaatgttttaacagcaagaattttaagaaaagataaacaccattttatttatttataaaaacaaaattagtttcaaatatttttgacattgtgatttttttttccacatttctcagcaaagctaatggtattttaatcattatttttgcctgtcataagaaaactcttagctgaaatggccgaaaactgtgagacatgctatggaagctgaatgccggacgctagcacagtttactttttccctttctaatcggctgatgttactctcacttgatgtggttaaaccattttagaggtagagaagacagacagtttgaatatttgtaaacttgtttttctttggtatatttaggacttagtggtcctctgttgctattgtcttctataagtggagtttcatgacttactgcttaacgaataactaactactatgatattctggacattttaggaaatggtaatttgccttgctacacattaagagggctattaagactacattttttctaacctcagataagtgcagtgtctttgcaatgccaacataagggagatcttggccaacgtgaaataaaattactcattcaaaactctgcctaaggtgattttgtagttcttaacagttctccagagcatcttgaacaggaatattaagataaatgtgaatctgcaatggctgaaaagagttgtgagcttttttattcatgataaaaccttataggaatagtataaaaaatccctgtggaaagctactagtacattgaccagcgctgggtgatacagattctgataaaaacataaatgtattagttcatctccatgtagtaaaaagtatacttatacaatgttttgtacttgtatttcatgaaattaaaacagtgatgctaaaacta

SEQ ID NO: 34289 - DNA, 944 bp, Homo sapiens
  source 1..944: mol_type = unassigned DNA
attactcagcttttcatctgctgtgttgaaagccaacttatcatttttcacattattgtatacatctaaaagacatcataaacgaagactggaagtgaaaactgaaaaactgagaaagttttatttgttggaggttccaactccattgggagctccttctctaatggcacctcaacccatgattcatacccagcaaggcctaaggaccagtagtccttccactccatccccagagcatcaggaagatgtagattccttcatgaaacagcctgggaatgagactgcagatacagtattaaagaagctggatgaacagtaccagaagtataagtttatggaactcaaccttgctcaaaagaaaagaaggctaaaaggtcagattcctgaaattaaacagactttggaaattctaaaatacatgcagaagaaaaaagagtccaccaactcaatggagaccagattcttgctggcagataacctgtattgcaaagcttcagttcctcctaccgataaaatgtgtctgtggttgggggctaatgtaatgcttgaatatgatattgatgaagctcaggcattgttggaaaagaatttatcgactgccacaaagaatcttgattccctggaggaagaccttgactttcttcgagatcaatttactaccacagaagtcaatatggccagggtttataattgggatgtaaaaagaagaaacaaggatgactctaccaagaacaaagcataatgctggcaattaaaaatgtggtttagttttccaaacatgttatcttaaatacccctttatccttacaggttgacataactttgaatgttttaacagcaagaattttaagaaaagataaacaccattttatttatttataaaaacaaaattagtttcaaatatttttgacattgtgatttttttttccacatttctcagcaaa

SEQ ID NO: 34290 - DNA, 4264 bp, Homo sapiens
  source 1..4264: mol_type = unassigned DNA
tgtccctgcgtgtcggggtccgctcgtgcgcgcctctccggggtctgtgcgcgtggccctccgctcgcgccggagggcgtgggcgtggcctcggcgtgggtgtggccgctcggggaggggcctcccgggggcggggccggcctggtccgcgcggtgacgcgccctgcagccccgagcgagcgagcgagcgagcgagttgccgagcgcgccccgtccctcgcgcgcgatgctcccctggacggcgctcggcctggccctgagcttgcggctggcgctggcgcggagcggcgcggagcgcggagctcaaggacctgggcgtcaccgtgttcattgtcagcaccggccgaggcaacttcctggagctgtcagccgctgcctcagcccctgccgagaagcacctgcactttgtggacgtggatgacctgcacatcattgtccaagagctgaggggctccattctcgacgcgatgcggccgcagcagctccatgccacggagatcacgtccagcggcttccgcctggcctggccacccctgctgaccgcagactcgggctactatgtgctggagctggtgcccagcgcccagccgggggctgcaagacgccagcagctgccagggaacgccacggactggatctgggccggcctcgacccggacacggactacgacgtggcgctagtgcctgagtccaacgtgcgcctcctgaggccccagatcctgcgggtgcgcacgcggcccggtgaggcagggccgggggcttcgggcccggagtcgggggctgggccggcccccacgcagctcgccgccctccccgccccagaggaggccgggccagagcgcatcgtcatctcccacgcccggccgcgcagcctccgcgtgagttgggccccagcgctgggctcagccgcggcgctcggctaccacgtgcagttcgggccgctgcggggcggggaggcgcagcgggtggaggtgcccgcgggccgcaactgcaccacgctgcagggcctggcgccgggcaccgcctacctggtgaccgtgaccgccgccttccgctcgggccgcgagagcgcgctgtccgccaaggcctgcacgcccgacggcccgcgcccgcgcccacgccccgtgccccgcgccccgaccccggggaccgccagccgtgagccgtaagccggcgtccccgcccagccgagagggccggcgcctacctgagggcccctgtgtcccgaacccggagcggaggcgcccaacccggcagacgggtgcaggcccggcctttccccacgcggactccgcgcgaccccggccctctccctgcggccgcagggcttccccgcctggcgcctgccctccagggctggggcctcgcctggcgggaccccgcagcagccccggccccatccccgcccagagccgggcgtcgtgtgggtccgtgggtgataattgagagcgtcagacccaggactgttcagggaggagccccggtcagactcccacgtgtgaagaccgggccccaagtggcaagggctggcctggggcgggcagcttgggtcctggacgttgataggaagcggaaggggaatcgcgggaagctggcccaggtcaggtccgcaaaggcttctgaagaagaggaagggcgagtaggggcacctggacgctgatggtggccaggatgctcagctggccaggagggcagcacctgctggggacggtggccctgccttcatgcccaggacaccagctgggtccagctagcagccactgggaatcagaggaatggggcagagctgggcattcaggaccttgaggacacgtgaccccacccgcccaccgccactatcaggccccgggaccgcactgacaggaaaccttccgtcgtgagggagcacttcccaggggccgcagggacgacactctccagggaggccccagcaaccacaccatcttcttgctgtgagaggtctcaccccgggctacctcctgtcactactcactgccctggggtccgtgggcaagttgcccagggtgggggtgcctagccaggtgcagtccccgccccgcctagtcctcggcgtcacgcaatgctcacctcgcctcttccccactaacatcccagactttaaaattcagtaaatcagatgtacaccgagcctgcagtctcgctaggatgctttactcctccacaaacagcagccgccgacaggacagcttgtgaacgtctccgccttttggggtgtccggggagaggaggtggagctgtcccctcccagtgtcaggcctccttggtcctcatgtgcaccttttattcagagagcttgggcccccttcctttggagctgggcccagggcaggtggctggaatgcagaggacaagggggctggggcctctgcagggccattcccaccgcagtctctgccacggcccggagccctgggcccagggccacgcgggctccctctgctggcaaagccacaccctgcaccgcatggggtccactgcccctttccccacgtggactctgcgtgaccccaggaactgcagcattgaggtggtctcagtccctccctcaggtctggtgggcattgtgccaggggccaccttcgggacagctggccttggcaccgtctcccaagaacccagctctgtgcatcccgtggccccaccagaaacccaaggccacaccgcccaccagctgggtgtggtcaccattcatggagggccggctggggccaggctcaccacgcagagtttgccctccggtgtgatgatgcatgagacacagtaggcccccctgcctgtgtgtgcagggggtgtctgtgggggggccctgctggctggactttgggtttctcctgagctccccttagcccccaagtcaggccacggaggcctgagtaggacccatgggctgtgtgtgtcactgcaggtggcgtgctcacaactgcactgctggtcggcaggtggccagggttgcaggcccgggcctcgggccccacctcctctggaggggtaggatctccttcgtgcagcccctgccccctaccctgttctccggagtgttggcagatctgagcccacggtcacgtgagaggagatgcctcttgcacactgagcccaggcccagctcacggagcaccctgcaggtggcagcggggcaccaggggctcattcctggtggcctcagtggcttctgtggacgactcagactcacatgagaagctgggaggagctccagctctgcaatcccgagagggcagagcgggggccctggccacaaccctgctccccacatacccgtctggcagaggctctgcctcccctctgcccatctctgcacaccaaggctgagcacagcacaaggcctcacggagagggtgaaaaggcactgccgtctccatctcagtgccaaggaatgcccctttcagaagccctcgtctgagaagtgctgccccttatgtagccccaggcattttaaaatctttgaatctgcaccaagtctcagaacagctctggccccggagtgctccgtccaggccgctgtgaaccggctgtccccgcgtctcctccacctcccctgacacaatcctggccccgactcagtccacccagggtgcagtgcagaggctgatacccgccaggacttccttgccaagggcccggccacgtcacaaggccactgcacgcttttcgacatgcacctggaaatcgggaagggccatgctgcagttgcttctagttgagacgagaagagcgacaaggttgtgatccacgtggcaggtgttcagaaggctgggggcgggcagcgctggggagagccctgggtacttcgaggagaccccgaagggaggctgctcccacacctgcgccagtttccaccctctctgtgagcagggctgcggtcacctcccacatctgaagagaaccaacctgaggatttcacgctggctgcgtgccagaccagtccctgacaggttgtgcgaggcccttcgctggacagcccattgctggccactggacggagaggcagagggggctgaaattcgggcccatgcctctgtgagcgatgacggagcaacagctctccagcacgtgaagctctccagacagctgttcgtgagaagccagacagaggcctggggtctcagtccagatttctggggagtggggtgtccaagcgtgggccacgctgctgggagccacctagggaagcaggtcgcctgtttctatagtgacggtaataaaccaagtcaattttctatagtga

SEQ ID NO: 34291 - DNA, 4511 bp, Homo sapiens
  source 1..4511: mol_type = unassigned DNA
gcgcggtgacgcgccctgcagccccgagcgagcgagcgagcgagcgagttgccgagcgcgccccgtccctcgcgcgcgatgctcccctggacggcgctcggcctggccctgagcttgcggctggcgctggcgcggagcggcgcggagcgcggtccaccagcatcagccccccgaggggacctgatgttcctgctggacagctcagccagcgtctctcactacgagttctcccgggttcgggagtttgtggggcagctggtggctccactgcccctgggcaccggggccctgcgtgccagtctggtgcacgtgggcagtcggccatacaccgagttccccttcggccagcacagctcgggtgaggctgcccaggatgcggtgcgtgcttctgcccagcgcatgggtgacacccacactggcctggcgctggtctatgccaaggaacagctgtttgctgaagcatcaggtgcccggccaggggtgcccaaagtgctggtgtgggtgacagatggcggctccagcgaccctgtgggcccccccatgcaggagctcaaggacctgggcgtcaccgtgttcattgtcagcaccggccgaggcaacttcctggagctgtcagccgctgcctcagcccctgccgagaagcacctgcactttgtggacgtggatgacctgcacatcattgtccaagagctgaggggctccattctcgacgcgatgcggccgcagcagctccatgccacggagatcacgtccagcggcttccgcctggcctggccacccctgctgaccgcagactcgggctactatgtgctggagctggtgcccagcgcccagccgggggctgcaagacgccagcagctgccagggaacgccacggactggatctgggccggcctcgacccggacacggactacgacgtggcgctagtgcctgagtccaacgtgcgcctcctgaggccccagatcctgcgggtgcgcacgcggcccggtgaggcagggccgggggcttcgggcccggagtcgggggctgggccggcccccacgcagctcgccgccctccccgccccagaggaggccgggccagagcgcatcgtcatctcccacgcccggccgcgcagcctccgcgtgagttgggccccagcgctgggctcagccgcggcgctcggctaccacgtgcagttcgggccgctgcggggcggggaggcgcagcgggtggaggtgcccgcgggccgcaactgcaccacgctgcagggcctggcgccgggcaccgcctacctggtgaccgtgaccgccgccttccgctcgggccgcgagagcgcgctgtccgccaaggcctgcacgcccgacggcccgcgcccgcgcccacgccccgtgccccgcgccccgaccccggggaccgccagccgtgagccgtaagccggcgtccccgcccagccgagagggccggcgcctacctgagggcccctgtgtcccgaacccggagcggaggcgcccaacccggcagacgggtgcaggcccggcctttccccacgcggactccgcgcgaccccggccctctccctgcggccgcagggcttccccgcctggcgcctgccctccagggctggggcctcgcctggcgggaccccgcagcagccccggccccatccccgcccagagccgggcgtcgtgtgggtccgtgggtgataattgagagcgtcagacccaggactgttcagggaggagccccggtcagactcccacgtgtgaagaccgggccccaagtggcaagggctggcctggggcgggcagcttgggtcctggacgttgataggaagcggaaggggaatcgcgggaagctggcccaggtcaggtccgcaaaggcttctgaagaagaggaagggcgagtaggggcacctggacgctgatggtggccaggatgctcagctggccaggagggcagcacctgctggggacggtggccctgccttcatgcccaggacaccagctgggtccagctagcagccactgggaatcagaggaatggggcagagctgggcattcaggaccttgaggacacgtgaccccacccgcccaccgccactatcaggccccgggaccgcactgacaggaaaccttccgtcgtgagggagcacttcccaggggccgcagggacgacactctccagggaggccccagcaaccacaccatcttcttgctgtgagaggtctcaccccgggctacctcctgtcactactcactgccctggggtccgtgggcaagttgcccagggtgggggtgcctagccaggtgcagtccccgccccgcctagtcctcggcgtcacgcaatgctcacctcgcctcttccccactaacatcccagactttaaaattcagtaaatcagatgtacaccgagcctgcagtctcgctaggatgctttactcctccacaaacagcagccgccgacaggacagcttgtgaacgtctccgccttttggggtgtccggggagaggaggtggagctgtcccctcccagtgtcaggcctccttggtcctcatgtgcaccttttattcagagagcttgggcccccttcctttggagctgggcccagggcaggtggctggaatgcagaggacaagggggctggggcctctgcagggccattcccaccgcagtctctgccacggcccggagccctgggcccagggccacgcgggctccctctgctggcaaagccacaccctgcaccgcatggggtccactgcccctttccccacgtggactctgcgtgaccccaggaactgcagcattgaggtggtctcagtccctccctcaggtctggtgggcattgtgccaggggccaccttcgggacagctggccttggcaccgtctcccaagaacccagctctgtgcatcccgtggccccaccagaaacccaaggccacaccgcccaccagctgggtgtggtcaccattcatggagggccggctggggccaggctcaccacgcagagtttgccctccggtgtgatgatgcatgagacacagtaggcccccctgcctgtgtgtgcagggggtgtctgtgggggggccctgctggctggactttgggtttctcctgagctccccttagcccccaagtcaggccacggaggcctgagtaggacccatgggctgtgtgtgtcactgcaggtggcgtgctcacaactgcactgctggtcggcaggtggccagggttgcaggcccgggcctcgggccccacctcctctggaggggtaggatctccttcgtgcagcccctgccccctaccctgttctccggagtgttggcagatctgagcccacggtcacgtgagaggagatgcctcttgcacactgagcccaggcccagctcacggagcaccctgcaggtggcagcggggcaccaggggctcattcctggtggcctcagtggcttctgtggacgactcagactcacatgagaagctgggaggagctccagctctgcaatcccgagagggcagagcgggggccctggccacaaccctgctccccacatacccgtctggcagaggctctgcctcccctctgcccatctctgcacaccaaggctgagcacagcacaaggcctcacggagagggtgaaaaggcactgccgtctccatctcagtgccaaggaatgcccctttcagaagccctcgtctgagaagtgctgccccttatgtagccccaggcattttaaaatctttgaatctgcaccaagtctcagaacagctctggccccggagtgctccgtccaggccgctgtgaaccggctgtccccgcgtctcctccacctcccctgacacaatcctggccccgactcagtccacccagggtgcagtgcagaggctgatacccgccaggacttccttgccaagggcccggccacgtcacaaggccactgcacgcttttcgacatgcacctggaaatcgggaagggccatgctgcagttgcttctagttgagacgagaagagcgacaaggttgtgatccacgtggcaggtgttcagaaggctgggggcgggcagcgctggggagagccctgggtacttcgaggagaccccgaagggaggctgctcccacacctgcgccagtttccaccctctctgtgagcagggctgcggtcacctcccacatctgaagagaaccaacctgaggatttcacgctggctgcgtgccagaccagtccctgacaggttgtgcgaggcccttcgctggacagcccattgctggccactggacggagaggcagagggggctgaaattcgggcccatgcctctgtgagcgatgacggagcaacagctctccagcacgtgaagctctccagacagctgttcgtgagaagccagacagaggcctggggtctcagtccagatttctggggagtggggtgtccaagcgtgggccacgctgctgggagccacctagggaagcaggtcgcctgtttctatagtgacggtaataaaccaagtcaattttctatagtga

SEQ ID NO: 34292 - DNA, 2147 bp, Homo sapiens
  source 1..2147: mol_type = unassigned DNA
tgtccctgcgtgtcggggtccgctcgtgcgcgcctctccggggtctgtgcgcgtggccctccgctcgcgccggagggcgtgggcgtggcctcggcgtgggtgtggccgctcggggaggggcctcccgggggcggggccggcctggtccgcgcggtgacgcgccctgcagccccgagcgagcgagcgagcgagcgagttgccgagcgcgccccgtccctcgcgcgcgatgctcccctggacggcgctcggcctggccctgagcttgcggctggcgctggcgcggagcggcgcggagcgcggagctcaaggacctgggcgtcaccgtgttcattgtcagcaccggccgaggcaacttcctggagctgtcagccgctgcctcagcccctgccgagaagcacctgcactttgtggacgtggatgacctgcacatcattgtccaagagctgaggggctccattctcgacgcgatgcggccgcagcagctccatgccacggagatcacgtccagcggcttccgcctggcctggccacccctgctgaccgcagactcgggctactatgtgctggagctggtgcccagcgcccagccgggggctgcaagacgccagcagctgccagggaacgccacggactggatctgggccggcctcgacccggacacggactacgacgtggcgctagtgcctgagtccaacgtgcgcctcctgaggccccagatcctgcgggtgcgcacgcggcccggtgaggcagggccgggggcttcgggcccggagtcgggggctgggccggcccccacgcagctcgccgccctccccgccccagaggaggccgggccagagcgcatcgtcatctcccacgcccggccgcgcagcctccgcgtgagttgggccccagcgctgggctcagccgcggcgctcggctaccacgtgcagttcgggccgctgcggggcggggaggcgcagcgggtggaggtgcccgcgggccgcaactgcaccacgctgcagggcctggcgccgggcaccgcctacctggtgaccgtgaccgccgccttccgctcgggccgcgagagcgcgctgtccgccaaggcctgcacgcccgacggcccgcgcccgcgcccacgccccgtgccccgcgccccgaccccggggaccgccagccgtgagccgtaagccggcgtccccgcccagccgagagggccggcgcctacctgagggcccctgtgtcccgaacccggagcggaggcgcccaacccggcagacgggtgcaggcccggcctttccccacgcggactccgcgcgaccccggccctctccctgcggccgcagggcttccccgcctggcgcctgccctccagggctggggcctcgcctggcgggaccccgcagcagccccggccccatccccgcccagagccgggcgtcgtgtgggtccgtgggtgataattgagagcgtcagacccaggactgttcagggaggagccccggtcagactcccacgtgtgaagaccgggccccaagtggcaagggctggcctggggcgggcagcttgggtcctggacgttgataggaagcggaaggggaatcgcgggaagctggcccaggtcaggtccgcaaaggcttctgaagaagaggaagggcgagtaggggcacctggacgctgatggtggccaggatgctcagctggccaggagggcagcacctgctggggacggtggccctgccttcatgcccaggacaccagctgggtccagctagcagccactgggaatcagaggaatggggcagagctgggcattcaggaccttgaggacacgtgaccccacccgcccaccgccactatcaggccccgggaccgcactgacaggaaaccttccgtcgtgagggagcacttcccaggggccgcagggacgacactctccagggaggccccagcaaccacaccatcttcttgctgtgagaggtctcaccccgggctacctcctgtcactactcactgccctggggtccgtgggcaagttgcccagggtgggggtgcctagccaggtgcagtccccgccccgcctagtcctcggcgtcacgcaatgctcacctcgcctcttccccactaacatcccagactttaaaattcagtaaatcagatgtacaccg

SEQ ID NO: 34293 - DNA, 1891 bp, Homo sapiens
  source 1..1891: mol_type = unassigned DNA
ggtgccactcgcgcgccggccgcgctccgggcttctcttttccctccgacgcgccacggctgcccagacattccggctgccgggtctggagagctccccgaacccctccgcggagaggagcgaggcggcgccagggtggcccccggggcgcgcttggtctcggagaagcggggacgaggccggaggatgagcgactgagggcgacgcgggcactgacgcgagttggggccgcgactaccggcagctgacagcgcgatgagcgactccccagagacgccctagcccggtgtgcgcgccaggcggagcgcgcaggtggggctgggctgttagtggtccgccccacgcgggtcgccggccggcccaggatgggcgctggcaacccgggcccgcgcccgccgctgctacccctgcgcccgctgcgagcccggcgtccggcccgcgccctgcgctcatggacggcggctcccggctggcggcggcgcgcccccgggctgtgaatgcgactcgcccctcggccgcgctccccgcccgcccgcccgccgggacgtggtaggggatgcccagctccactgcgatggcagttggcgcgctctccagttccctcctggtcacctgctgcctgatggtggctctgtgcagtccgagcatcccgctggagaagctggcccaggcaccagagcagccgggccaggagaagcgtgagcacgcctctcgggacggcccggggcgggtgaacgagctcgggcgcccggcgagggacgagggcggcagcggccgggactggaagagcaagagcggccgtgggctcgccggccgtgagccgtggagcaagctgaagcaggcctgggtctcccagggcgggggcgccaaggccggggatctgcaggtccggccccgcggggacaccccgcaggcggaagccctggccgcagccgcccaggacgcgattggcccggaactcgcgcccacgcccgagccacccgaggagtacgtgtacccggactaccgtggcaagggctgcgtggacgagagcggcttcgtgtacgcgatcggggagaagttcgcgccgggcccctcggcctgcccgtgcctgtgcaccgaggaggggccgctgtgcgcgcagcccgagtgcccgaggctgcacccgcgctgcatccacgtcgacacgagccagtgctgcccgcagtgcaaggagaggaagaactactgcgagttccggggcaagacctatcagactttggaggagttcgtggtgtctccatgcgagaggtgtcgctgtgaagccaacggtgaggtgctatgcacagtgtcagcgtgtccccagacggagtgtgtggaccctgtgtacgagcctgatcagtgctgtcccatctgcaaaaatggtccaaactgctttgcagaaaccgcggtgatccctgctggcagagaagtgaagactgacgagtgcaccatatgccactgtacttatgaggaaggcacatggagaatcgagcggcaggccatgtgcacgagacatgaatgcaggcaaatgtagacgcttcccagaacacaaactctgactttttctagaacattttactgatgtgaacattctagatgactctgggaactatcagtcaaagaagacttttgatgaggaataatggaaaattgttggtacttttccttttcttgataacagttactacaacagaaggaaatggatatatttcaaaacatcaacaagaactttgggcataaaatccttctctaaataaatgtgctattttcacagtaagtacacaaaagtacactattatatatcaaatgtatttctataatccctccattagagagcttatataagtgttttctatagatgcagattaaaaatgctgtgttgtcaaccgtc

SEQ ID NO: 34294 - DNA, 1284 bp, Homo sapiens
  source 1..1284: mol_type = unassigned DNA
gcgagtaggaagtggtgagttcggagtagagatggccgcgcttgcaccgctgcccccgctccccgcacagttcaagagcatacagcatcatctgaggacggctcaggagcatgacaagcgagaccctgtggtggcttattactctaaagaagcagttgggtgataatgaagctattactcaagaaatagtgggctgtgcccatttggagaattatgctttgaaaatgtttttgtatgcagacaatgaagatcgtgctggacgatttcacaaaaacatgatcaagtccttctatactgcaagtcttttgatagatgtcataacagtatttggagaactcactgatgaaaatgtgaaacacaggaagtatgccagatggaaggcaacatacatccataattgtttaaagaatggggagactcctcaagcaggccctgttggaattgaagaagataatgatattgaagaaaatgaagatgctggagcagcctctctgcccactcagccaactcagccatcatcatcttcaacttatgacccaagcaacatgccatcaggcaactatactggaatacagattcctccgggtgcacacgctccagctaatacaccagcagaagtgcctcacagcacaggtgtagcaagtaatactatccaacctactccacagactatacctgccattgatcccgcacttttcaatacaatttcccagggggatgttcgtctaaccccagaagactttgctagagctcagaagtactgcaaatatgctggcagtgctttgcagtatgaagatgtaagcactgctgtccagaatctacaaaaggctctcaagttactgacgacaggcagagaatgaagcctttgtatgacagacccatgtatttttggcatgaggaactaacagtccattactctatcttcagcctatcaggatcacagttttaaggaagacttggttttgttgaatatgacaatgaaatctgtgtgtatcagatttttattgaagcattcatcagcagcctcaaccagttttcattgtccatttactagattcaatcgtctctgagtatatagggctgatgttagcaagaccctaaaaatgtccattgaaccctgcttcaaaaaatgaaaacacacctctataaaatgtgtactgggaataagctttgtatttacatacattaggggaattttttaaaatctgtaatgtttggacaaacagatgatattactttgctataaaattataaatgtaacttttaataaagatagccagaata

SEQ ID NO: 34295 - DNA, 3287 bp, Homo sapiens
  source 1..3287: mol_type = unassigned DNA
agacggaagcggaagtgccggtggagcgcgagtaggaagtggtgagttcggagtagagatggccgcgcttgcaccgctgcccccgctccccgcacagttcaagagcatacagcatcatctgaggacggctcaggagcatgacaagcgagaccctgtggtggcttattactgtcgtttatacgcaatgcagactggaatgaagatcgatagtaaaactcctgaatgtcgcaaatttttatcaaagttaatggatcagttagaagctctaaagaagcagttgggtgataatgaagctattactcaagaaatagtgggctgtgcccatttggagaattatgctttgaaaatgtttttgtatgcagacaatgaagatcgtgctggacgatttcacaaaaacatgatcaagtccttctatactgcaagtcttttgatagatgtcataacagtatttggagaactcactgatgaaaatgtgaaacacaggaagtatgccagatggaaggcaacatacatccataattgtttaaagaatggggagactcctcaagcaggccctgttggaattgaagaagataatgatattgaagaaaatgaagatgctggagcagcctctctgcccactcagccaactcagccatcatcatcttcaacttatgacccaagcaacatgccatcaggcaactatactggaatacagattcctccgggtgcacacgctccagctaatacaccagcagaagtgcctcacagcacaggtgtagcaagtaatactatccaacctactccacagactatacctgccattgatcccgcacttttcaatacaatttcccagggggatgttcgtctaaccccagaagactttgctagagctcagaagtactgcaaatatgctggcagtgctttgcagtatgaagatgtaagcactgctgtccagaatctacaaaaggctctcaagttactgacgacaggcagagaatgaagcctttgtatgacagacccatgtatttttggcatgaggaactaacagtccattactctatcttcagcctatcaggatcacagttttaaggaagacttggttttgttgaatatgacaatgaaatctgtgtgtatcagatttttattgaagcattcatcagcagcctcaaccagttttcattgtccatttactagattcaatcgtctctgagtatatagggctgatgttagcaagaccctaaaaatgtccattgaaccctgcttcaaaaaatgaaaacacacctctataaaatgtgtactgggaataagctttgtatttacatacattaggggaattttttaaaatctgtaatgtttggacaaacagatgatattactttgctataaaattataaatgtaacttttaataaagatagccagaatattctaaattagaaattacgtttttgtttccctcaagacataaaacaaatataaacattctaaactgctggatgaatctgaaaagacattaagttcaaattttaatttattctcatattaaatataactccattaaaagtttaaaatttcatgggagaaaatataataaggtaaagaggtagaatcactttcagacttaagaataatgttgatttcccaagtgctttaccttatctgttaaagcgtaagatgaattggtatttgcttcataggcagtttgactgcatgtattagagaatgaaaagaagatatttgtagtaatgcctggaaacttggtgctttaaattaaggtactcctctgctgctgtagaatggattccacacagtggatagctatgggtgattcagaatattatgtttagattcccatttgttaagtttataagttttgtggggaattatgaacttactgtgtactacctgcatttgtgctgtgtgaaaaataaatacaaggattcgtttagctaattcaacttactacaaagacaaatgtctgtttttatttgcctgctaggattgtcttttttaaaagtcatttttatttataggaatatgggtgtttctataggaagaaacaggttttttgttttttgttttttaagataaatttgacaaagttaactgaaatttatctggtccattttattcatgctactaagatgggaatctttaaacacaagggtcagcaagctttggcccatggattggccacctgttacgtaaataaagtttctttgaaacaagcctacactcattcatttatgttttgtctgtggttgctttccacaactgcagagttgtatggcttgcaagtctaaaaacatttactatttggccctctaagaaaaagttaagacacctagtctaatggccttttgggaaaaaacaaatcactaactcataatcatttatatccattattttctgcataaatgtaatgctattgtacagggtttggtagaataaatattcagactgactaaactgttctaaatcctcacaaaaaagtccccaaacaacatgcctcctaaaaaacattttcctatcttttacaagaggtatgaacatttgtagggttccacatttgcatctagaaatccaatgctctttagaatgttattacgaatagaaagatggccaggatgacctttagtgttacatgatgttcagcaaattttaattcaaaccttgatatgcctggacactgaaaagtaaacgcatcacctcctattttataccctaccttctggttcccaattgggagagcacatagagggaaggagacaatatagaaactacggagtccgctggtagtgggctgcatggtgtgacagagcccttctctgtaaaatggaaatgacaccactagccatctcaatagttacaagaattaaaagagatacagtacctgaagtgcttagcgcatggtagcatttcataaatgtttagtgtcaatactaatgctctaataatgtaaattgttaataatttatttccctaatatcaggaaatcccagttgtctatgtggcccagtgcttaaaaacgccttcttgcatgaggggattgaactatacaatgtttgttaactttgtatttgtattttttcctataaaatcttaaaataaaattaggagatgtgttctgatgtaacagtaggattagcaattttcatttattccttccatatatatttactgaatggctactatatgcctggtattgttctttgaaagcagaaacagcaggaaaaaaagtccctccctcatagagtttacattctaaaagggaggaaatagataataaaatatacattacatttaa

SEQ ID NO: 34296 - DNA, 3234 bp, Homo sapiens
  source 1..3234: mol_type = unassigned DNA
gagttcggagtagagatggccgcgcttgcaccgctgcccccgctccccgcacagttcaagagcatacagcatcatctgaggacggctcaggagcatgacaagcgagaccctgtggtggcttattactgtcgtttatacgcaatgcagactggaatgaagatcgatagtaaaactcctgaatgtcgcaaatttttatcaaagttaatggatcagttagaagctctaaagaagcagttgggtgataatgaagctattactcaagaaatagtgggctgtgcccatttggagaattatgctttgaaaatgtttttgtatgcagacaatgaagatcgtgctggacgatttcacaaaaacatgatcaagtccttctatactgcaagtcttttgatagatgtcataacagtatttggagaactcactgatgaaaatgtgaaacacaggaagtatgccagatggaaggcaacatacatccataattgtaaagaatggggagactcctcaagcaggccctgttggttgaagaagataatgatattgaagaaaatgaagatgctggagcagcctctctgcccactcagccaactcagccatcatcatcttcaacttatgacccaacatgccatcaggcaactatactggaatacagattcctccgggtgcacacgctccagctaatacaccagcagaagtgcctcacagcacaggtgtagcaagtaatactatccaacctactccacagactatacctgccattgatcccgcacttttcaatacaatttcccagggggatgttcgtctaaccccagaagactttgctagagctcagaagtactgcaaatatgctggcagtgctttgcagtatgaagatgtaagcactgctgtccagaatctacaaaaggctctcaagttactgacgacaggcagagaatgaagcctttgtatgacagacccatgtatttttggcatgaggaactaacagtccattactctatcttcagcctatcaggatcacagttttaaggaagacttggttttgttgaatatgacaatgaaatctgtgtgtatcagatttttattgaagcattcatcagcagcctcaaccagttttcattgtccatttactagattcaatcgtctctgagtatatagggctgatgttagcaagaccctaaaaatgtccattgaaccctgcttcaaaaaatgaaaacacacctctataaaatgtgtactgggaataagctttgtatttacatacattaggggaattttttaaaatctgtaatgtttggacaaacagatgatattactttgctataaaattataaatgtaacttttaataaagatagccagaatattctaaattagaaattacgtttttgtttccctcaagacataaaacaaatataaacattctaaactgctggatgaatctgaaaagacattaagttcaaattttaatttattctcatattaaatataactccattaaaagtttaaaatttcatgggagaaaatataataaggtaaagaggtagaatcactttcagacttaagaataatgttgatttcccaagtgctttaccttatctgttaaagcgtaagatgaattggtatttgcttcataggcagtttgactgcatgtattagagaatgaaaagaagatatttgtagtaatgcctggaaacttggtgctttaaattaaggtactcctctgctgctgtagaatggattccacacagtggatagctatgggtgattcagaatattatgtttagattcccatttgttaagtttataagttttgtggggaattatgaacttactgtgtactacctgcatttgtgctgtgtgaaaaataaatacaaggattcgtttagctaattcaacttactacaaagacaaatgtctgtttttatttgcctgctaggattgtcttttttaaaagtcatttttatttataggaatatgggtgtttctataggaagaaacaggttttttgttttttgttttttaagataaatttgacaaagttaactgaaatttatctggtccattttattcatgctactaagatgggaatctttaaacacaagggtcagcaagctttggcccatggattggccacctgttacgtaaataaagtttctttgaaacaagcctacactcattcatttatgttttgtctgtggttgctttccacaactgcagagttgtatggcttgcaagtctaaaaacatttactatttggccctctaagaaaaagttaagacacctagtctaatggccttttgggaaaaaacaaatcactaactcataatcatttatatccattattttctgcataaatgtaatgctattgtacagggtttggtagaataaatattcagactgactaaactgttctaaatcctcacaaaaaagtccccaaacaacatgcctcctaaaaaacattttcctatcttttacaagaggtatgaacatttgtagggttccacatttgcatctagaaatccaatgctctttagaatgttattacgaatagaaagatggccaggatgacctttagtgttacatgatgttcagcaaattttaattcaaaccttgatatgcctggacactgaaaagtaaacgcatcacctcctattttataccctaccttctggttcccaattgggagagcacatagagggaaggagacaatatagaaactacggagtccgctggtagtgggctgcatggtgtgacagagcccttctctgtaaaatggaaatgacaccactagccatctcaatagttacaagaattaaaagagatacagtacctgaagtgcttagcgcatggtagcatttcataaatgtttagtgtcaatactaatgctctaataatgtaaattgttaataatttatttccctaatatcaggaaatcccagttgtctatgtggcccagtgcttaaaaacgccttcttgcatgaggggattgaactatacaatgtttgttaactttgtatttgtattttttcctataaaatcttaaaataaaattaggagatgtgttctgatgtaacagtaggattagcaattttcatttattccttccatatatatttactgaatggctactatatgcctggtattgttctttgaaagcagaaacagcaggaaaaaaagtccctccctcatagagtttacattctaaaagggaggaaatagataataaaatatacattacattt

SEQ ID NO: 34297 - DNA, 1383 bp, Homo sapiens
  source 1..1383: mol_type = unassigned DNA
gtaggaagtggtgagttcggagtagagatggccgcgcttgcaccgctgcccccgctccccgcacagttcaagagcatacagcatcatctgaggacggctcaggagcatgacaagcgagaccctgtggtggcttattactctaaagaagcagttgggtgataatgaagctattactcaagaaatagtgggctgtgcccatttggagaattatgctttgaaaatgtttttgtatgcagacaatgaagatcgtgctggacgatttcacaaaaacatgatcaagtccttctatactgcaagtcttttgatagatgtcataacagtatttggagaactcactgatgaaaatgtgaaacacaggaagtatgccagatggaaggcaacatacatccataattgtttaaagaatggggagactcctcaagcaggccctgttggaattgaagaagataatgatattgaagaaaatgaagatgctggagcagcctctctgcccactcagccaactcagccatcatcatcttcaacttatgacccaagcaacatgccatcaggcaactatactggaatacagattcctccgggtgcacacgctccagctaatacaccagcagaagtgcctcacagcacaggggatgttcgtctaaccccagaagactttgctagagctcagaagtactgcaaatatgctggcagtgctttgcagtatgaagatgtaagcactgctgtccagaatctacaaaaggctctcaagttactgacgacaggcagagaatgaagcctttgtatgacagacccatgtatttttggcatgaggaactaacagtccattactctatcttcagcctatcaggatcacagttttaaggaagacttggttttgttgaatatgacaatgaaatctgtgtgtatcagatttttattgaagcattcatcagcagcctcaaccagttttcattgtccatttactagattcaatcgtctctgagtatatagggctgatgttagcaagaccctaaaaatgtccattgaaccctgcttcaaaaaatgaaaacacacctctataaaatgtgtactgggaataagctttgtatttacatacattaggggaattttttaaaatctgtaatgtttggacaaacagatgatattactttgctataaaattataaatgtaacttttaataaagatagccagaatattctaaattagaaattacgtttttgtttccctcaagacataaaacaaatataaacattctaaactgctggatgaatctgaaaagacattaagttcaaattttaatttattctcatattaaatataactccattaaaagtttaaaatttcatgggagaaaatataataaggtaaagaggtagaat

SEQ ID NO: 34298 - DNA, 2880 bp, Homo sapiens
  source 1..2880: mol_type = unassigned DNA
aggcccatgatcaccctcctctcagcccacggacaggaagtcgctccccagctgccccgccccgctccccagcgccccggaagtgatctgtggcggctgctgcagagccgccaggaggagggtggatctccccagagcaaagcgtcggagtcctcctcctccttctcctcctcctcctcctcctcctccagccgcccaggctcccccgccacccgtcagactcctccttcgaccgctcccggcgcggggccttccaggcgacaaggaccgagtaccctccggccggagccacgcagccgcggcttccggagccctcggggcggcggactggctcgcggtgcagattcttcttaatcctttggtgaaaactgagacacaaaatggctgcaaataagcccaagggtcagaattctttggctttacacaaagtcatcatggtgggcagtggtggcgtgggcaagtcagctctgactctacagttcatgtacgatgagtttgtggaggactatgagcctaccaaagcagacagctatcggaagaaggtagtgctagatggggaggaagtccagatcgatatcttagatacagctgggcaggaggactacgctgcaattagagacaactacttccgaagtggggaggggttcctctgtgttttctctattacagaaatggaatcctttgcagctacagctgacttcagggagcagattttaagagtaaaagaagatgagaatgttccatttctactggttggtaacaaatcagatttagaagataaaagacaggtttctgtagaagaggcaaaaaacagagctgagcagtggaatgttaactacgtggaaacatctgctaaaacacgagctaatgttgacaaggtattttttgatttaatgagagaaattcgagcgagaaagatggaagacagcaaagaaaagaatggaaaaaagaagaggaaaagtttagccaagagaatcagagaaagatgctgcattttataatcaaagcccaaactcctttcttatcttgaccatactaataaatataatttataagcattgccattgaaggcttaattgactgaaattactttaacattttggaaattgttgtatatcactaaaagcatgaattggaactgcaatgaaagtcaaatttactttaaaaagaaattaatatggcttcaccaagaagcaaagttcaacttatttcataattgcctacatttatcatggtcctgaatgtagcgtgtaagcttgtgtttcttgggcagtctttcttgaaattgaagaggtgaaatgggggtggggagtgggaggaaaggtgacttcctctggtgtttattataaagcttaaattttatatcattttaaaatgtcttggtcttctactgccttgaaaaatgacaattgtgaacatgatagttaaactaccactttttttaaccattattatgcaaaatttagaagaaaagttattggcatggttgttgcatatagttaaactgagagtaattcatctgtgaatctgctttaattacctggtgagtaacttagaaaagtggtgtaaacttgtacatggaattttttgaatatgccttaatttagaaactgaaaaatatctggttatatcattctgggtgtgttcttactgacaccaggggtccgctgccccatgtgtcctggtgagaaaatatatgcctggcacagcttttgtatagaaaattcttgagaagtaactgtccgctagaagtctgtccaaatttaaaatgtgtgccatattctggttcttgaaaataagattccagagctctttgatcgcttttaataaactgcaagttcattttaaatgaagggccagcatatatacttgcaagataattttcagctgcaaggattcagcaccagttatgtttgaatgaaccctccttttctctgagattctggtccctggaaatccctttctgctagtggtgagcatgtaagtgttaagtttttaatctgggagcagggcataggaagaaaatgtcagtagtgctaatgcattttgcactagaacgcttcgggaaaatattcatgcttgccatctgttcatttctaaatttatattcataaagttacagtttgatacaggaattattaggagtaattcttttctgtttctgtttataatgaagaacactgtagctacattttcagaagttaacatcaagccatcaaacctgggtatagtgcagaaaacgtggcacacactgaccacacattaggctgtgtcaccattgtgtggtgtacctgctggaagaattctagcatgctacttggggacataatttcagtgggaaatatgccactgaccgattttttttttttcctctttgcagtggggctaggacagttgattcaacaaagtatttttttcttttttctcagtcctaatttgaacaggtcaaagatgtgttcaggcattccaggtaacaggtgtgtatgtaaagttaaaaataggctttttaggaactcactctttagatatttacatccagcttctcatgttaaatatttgtccttaaagggtttgagatgtacatctttcatttcgtatttctcataggctatgccatgtgcggaattcaagttaccaatgtaacactggccagcgggcccagcaatctccatgtgtacttattacagtcttatttaaccaggggtcctaaccactaacattgtgactttgctttgagacctttcctctcctgggtactgaggtgctatgaagccaactgacaaagatgcatcacgtgtcttaggctgatgccactacccgatttgtttatttgcaatttgagccatttaaagaccaataaacttccttttttaaaatgtt

SEQ ID NO: 34299 - DNA, 882 bp, Homo sapiens
  source 1..882: mol_type = unassigned DNA
ggtgtgtccgggcggcggcgggccgaggccctgacgcgggttcgggctgccgagattgcacatcccacgttctgcccggggacgagctgcgagatgagcccggctggaatccggggcaccgcgttcgccgctgtggggcgagtgagcccccgagagtgagcggctgcggagaggtcccctgcgcccggcagccggtctcagttggcctcgtccgaaggtcaccccgcacctttcgtccacggcgcccaagttcccgcccgggcggtgcccgcgacctggggcaacccgctgccgccgcagtccccgcgcctcactccacccctctcccctccttccctttctttccactccttgcctgtgctagagccgctgctttttaagcatctccgccagggttttttgtttgtttgttttgtttgtttgtgtttttttttttttttgccagttaaaggaatggtttttcagacttaaagtcattagactctccgcactgaactgaatacctggccttgggcgcttgcacagctttagcccattttcagattcttcttaatcctttggtgaaaactgagacacaaaatggctgcaaataagcccaagggtcagaattctttggctttacacaaagtcatcatggtgggcagtggtggcgtgggcaagtcagctctgactctacagttcatgtacgatgagtttgtggaggactatgagcctaccaaagcagacagctatcggaagaaggtagtgctagatggggaggaagtccagatcgatatcttagatacagctgggcaggaggactacgctgcaattagagacaactacttccgaagtggggaggggttcctctgtgttttctctattacagaaatggaatccttt

SEQ ID NO: 34300 - DNA, 2339 bp, Homo sapiens
  source 1..2339: mol_type = unassigned DNA
gtggcttccgaggagagggcaagaacggaagcgagggcgcgctctcgagaggaggggttgcctaggcgacgccggaggcgcgctcggggggtgggaaagcgagcccggcagctcaatgacaaatcggtggaggacggctggggtccggccccgggagggggcggggcgcgtttaagagctgcgggccgggtgcggacggcggaggcggcgggactggtccctgctcttcagtgggtcatctgtgtgtcacagcctcagaagaccagcgagatggctgccaacaagagtaagggccagagctccttggccctccacaaggtgatcatggttggcagcggaggcgttggcaagtcagccctgacgcttcagttcatgtatgacgagtttgtagaagactatgaacctaccaaagctgacagttatagaaagaaagtggttcttgatggggaagaagttcagatagatattctggacaccgctgggcaagaggactacgcagccattcgagataactactttcggagtggggaagggtttcttcttgtgttctcaatcacagaacatgaatcctttacagcaactgccgaattcagggaacagattctccgtgtgaaggctgaagaagataaaattccactgctcgtcgtgggaaacaagtctgacctagaggagcggaggcaggtgcctgtggaggaggccaggagtaaagccgaagagtggggcgtgcagtacgtggagacgtcagcgaagacccgggccaacgtggacaaggtgttctttgacctaatgagagaaatcagaacaaagaagatgtcagaaaacaaagacaagaatggcaagaaaagcagcaagaacaagaaaagttttaaagaaagatgttgcttactatgagtgtcaaggtgacggatgaagccagctgctcctaaggacacagggctgggttggtaaagagaaggctatggttgacttcttgcttgtgcttcccactctccccgacttcattcactcaaacttctttaaatggggaaaaatatttgtgactctgtggctggcagaagaaataagcccatgcaagtggaagggctgctttgtcaggaggttgtggaatttctttcttctccccttcttccctcccaaaagcttagctatgtataaagtgccacagataggaaacagctgttaattacaaagagaaagaattgtcatagcatcttattttgttcctagttttataacattaccatccttcgttttgaactacagatgttgtagtgggttttggaggagggagtggagtaagatgccctcccacttttatcagtttagtagtagtactgagaaaaatcccttcagctctaagaacactgaaaaatccaccgattttttgggtaagcttcttggcaataccctgtggatctgaaacagctaaaaaaatgaatttgaattgcgccagataggtcaataccaagcttctgattcctcctcacatatgaaaagtgaaagttgtgagttgttttcctcttatttaaacattggcctattataatctgtgttggttatttttctcctgtaagcatcctgatttttctgtaggaacttttctttggcagaccaagtgaagactcaggaatggtgtgcattataaatgacacacattgccacttgtgtagatatttttaagttctttggctaagtcctctcctaactgcctgtcctctggttaggcccctccctctccactagtggtgaatgcatgtgtctgtctgatcagcatcactgcacacggaggtctagtgagcctcttgctaagtgtcacacacactcttcccaaagacgtgatgagttaaagttgtattctgaaatcatgaagccagagcctgtgccagaccttctgctacctctcatagaattgctctgtaattctaaatttaaaattagaagtagagagagataagccatcgcccctttgcctctgagaattggctgctgtttctaatataattattttctaagatagccagatagttagaaaaagattttcattgatgacatatctttaaactttcttgcatcagtattctaaattgagcaaactgaaagattttcatcaggaaaggagcactgtgggaagagcccagtattcacattttttccccatttttcagaagcgacatttcatatataggtgccaaaagtgaatcggggtgcggagagtgggaaccttttgaatttatgattgtcacagagatggtagaaattatgatctgactggaaaacaatcctgtatcccctcccaaagaatcatgggctttttttttgaataaaaaagcagacaaata

SEQ ID NO: 34301 - DNA, 2308 bp, Homo sapiens
  source 1..2308: mol_type = unassigned DNA
aaagcgagcccggcagctcaatgacaaatcggtggaggacggctggggtccggccccgggagggggcggggcgcgtttaagagctgcgggccgggtgcggacggcggaggcggcgggactggtccctgctcttcagtgggtcatctgtgtgtcacagcctcagaagaccagcgagatggctgccaacaagagtaagggccagagctccttggccctccacaaggtgatcatggttggcagcggaggcgttggcaagtcagccctgacgcttcagttcatgaatgtttcaaaatcattggcatatgacaagaaaaagtatacagcaaacaaaaaagtagaaggtattctagagtttgtagaagactatgaacctaccaaagctgacagttatagaaagaaagtggttcttgatggggaagaagttcagatagatattctggacaccgctgggcaagaggactacgcagccattcgagataactactttcggagtggggaagggtttcttcttgtgttctcaatcacagaacatgaatcctttacagcaactgccgaattcagggaacagattctccgtgtgaaggctgaagaagataaaattccactgctcgtcgtgggaaacaagtctgacctagaggagcggaggcaggtgcctgtggaggaggccaggagtaaagccgaagagtggggcgtgcagtacgtggagacgtcagcgaagacccgggccaacgtggacaaggtgttctttgacctaatgagagaaatcagaacaaagaagatgtcagaaaacaaagacaagaatggcaagaaaagcagcaagaacaagaaaagttttaaagaaagatgttgcttactatgagtgtcaaggtgacggatgaagccagctgctcctaaggacacagggctgggttggtaaagagaaggctatggttgacttcttgcttgtgcttcccactctccccgacttcattcactcaaacttctttaaatggggaaaaatatttgtgactctgtggctggcagaagaaataagcccatgcaagtggaagggctgctttgtcaggaggttgtggaatttctttcttctccccttcttccctcccaaaagcttagctatgtataaagtgccacagataggaaacagctgttaattacaaagagaaagaattgtcatagcatcttattttgttcctagttttataacattaccatccttcgttttgaactacagatgttgtagtgggttttggaggagggagtggagtaagatgccctcccacttttatcagtttagtagtagtactgagaaaaatcccttcagctctaagaacactgaaaaatccaccgattttttgggtaagcttcttggcaataccctgtggatctgaaacagctaaaaaaatgaatttgaattgcgccagataggtcaataccaagcttctgattcctcctcacatatgaaaagtgaaagttgtgagttgttttcctcttatttaaacattggcctattataatctgtgttggttatttttctcctgtaagcatcctgatttttctgtaggaacttttctttggcagaccaagtgaagactcaggaatggtgtgcattataaatgacacacattgccacttgtgtagatatttttaagttctttggctaagtcctctcctaactgcctgtcctctggttaggcccctccctctccactagtggtgaatgcatgtgtctgtctgatcagcatcactgcacacggaggtctagtgagcctcttgctaagtgtcacacacactcttcccaaagacgtgatgagttaaagttgtattctgaaatcatgaagccagagcctgtgccagaccttctgctacctctcatagaattgctctgtaattctaaatttaaaattagaagtagagagagataagccatcgcccctttgcctctgagaattggctgctgtttctaatataattattttctaagatagccagatagttagaaaaagattttcattgatgacatatctttaaactttcttgcatcagtattctaaattgagcaaactgaaagattttcatcaggaaaggagcactgtgggaagagcccagtattcacattttttccccatttttcagaagcgacatttcatatataggtgccaaaagtgaatcggggtgcggagagtgggaaccttttgaatttatgattgtcacagagatggtagaaattatgatctgactggaaaacaatcctgtatcccctcccaaagaatcatgggctttttttttgaataaaaaagcagacaaatag

SEQ ID NO: 34302 - DNA, 981 bp, Homo sapiens
  source 1..981: mol_type = unassigned DNA
ctcccgctcgggaccgtccacttcctcagtcctccggccgcggcttgggcagggtcagggctgggaagtgttgcaaaaacttaactgccctcggaacttgcacgcgccgtgaactgggcggtgttcctaaagggcttcggtttgctggttttgttttggtcctgtcttgcaaatgagcataaagttgtttctcccccagcctcctcccctttcctttctgataggggccagcggcgaaggggcttctaaggggaagcgcctggactgggcatcgccgtcccggttcttgccgcctgtgggagtgtgaggttaaccgtgctcggtgcagggttgcggggcgcggagcttgctgcgtccacactgcttgtgtgagcagtgtcctctctgtgctcatttccaacgagaaacgttggaactttggtgttcttatcagctcttcagtgggtcatctgtgtgtcacagcctcagaagaccagcgagatggctgccaacaagagtaagggccagagctccttggccctccacaaggtgatcatggttggcagcggaggcgttggcaagtcagccctgacgcttcagttcatgtatgacgagtttgtagaagactatgaacctaccaaagctgacagttatagaaagaaagtggttcttgatggggaagaagttcagatagatattctggacaccgctgggcaagaggactacgcagccattcgagataactactttcggagtggggaagggtttcttcttgtgttctcaatcacagaacatgaatcctttacagcaactgccgaattcagggaacagattctccgtgtgaaggctgaagaagataaaattccactgctcgtcgtgggaaacaagtctgacctagaggagcggaggcaggtgcctgtggaggaggccaggagtaaagccgaagagtggggcgtgcagtacgtggagacgtcagcgaagacccgggccaacgtggacaag

SEQ ID NO: 34303 - DNA, 1252 bp, Homo sapiens
  source 1..1252: mol_type = unassigned DNA
agaggaggggttgcctaggcgacgccggaggcgcgctcggggggtgggaaagcgagcccggcagctcaatgacaaatcggtggaggacggctggggtccggccccgggagggggcggggcgcgtttaagagctgcgggccgggtgcggacggcggaggcggcgggactggtccctgcagctcttcagtgggtcatctgtgtgtcacagcctcagaagaccagcgagatggctgccaacaagagtaagggccagagctccttggccctccacaaggtgatcatggttggcagcggaggcgttggcaagtcagccctgacgcttcagttcatgtatgacgagtttgtagaagactatgaacctaccaaagctgacagttatagaaagaaagtggttcttgatggggaagaagttcagatagatattctggacaccgctgggcaagaggactacgcagccattcgagataactactttcggagtggggaagggtttcttcttgtgttctcaatcacagaacatgaatcctttacagcaactgccgaattcagggaacagattctccgtgtgaaggctgaagaagataaaattccactgctcgtcgtgggaaacaagtctgacctagaggagcggaggcaggtgcctgtggaggaggccaggagtaaagccgaagagtggggcgtgcagtacgtggagacgtcagcgaagacccgggccaacgtggacaaggtgttctttgacctaatgagagaaatcagaacaaagaagatgtcagaaaacaaagacaagaatggcaagaaaagcagcaagaacaagaaaagttttaaagaaagatgttgcttactatgagtgtcaaggtgacggatgaagccagctgctcctaaggacacagggctgggttggtaaagagaaggctatggttgacttcttgcttgtgcttcccactctccccgacttcattcactcaaacttctttaaatggggaaaaatatttgtgactctgtggctggcagaagaaataagcccatgcaagtggaagggctgctttgtcaggaggttgtggaatttctttcttctccccttcttccctcccaaaagcttagctatgtataaagtgccacagataggaaacagctgttaattacaaagagaaagaattgtcatagcatcttattttgttcctagttttataacattaccatccttcgttttgaactacagatgttgtagtgggttttggaggagggagtggag

SEQ ID NO: 34304 - DNA, 1583 bp, Homo sapiens
  source 1..1583: mol_type = unassigned DNA
gatttcagcagcgggagagcgggtggcaggaggaggtctctgcatgaaacagcggcagtcagctcttcagtgggtcatctgtgtgtcacagcctcagaagaccagcgagatggctgccaacaagagtaagggccagagctccttggccctccacaaggtgatcatggttggcagcggaggcgttggcaagtcagccctgacgcttcagttcatgtatgacgagtttgtagaagactatgaacctaccaaagctgacagttatagaaagaaagtggttcttgatggggaagaagttcagatagatattctggacaccgctgggcaagaggactacgcagccattcgagataactactttcggagtggggaagggtttcttcttgtgttctcaatcacagaacatgaatcctttacagcaactgccgaattcagggaacagattctccgtgtgaaggctgaagaagataaaattccactgctcgtcgtgggaaacaagtctgacctagaggagcggaggcaggtgcctgtggaggaggccaggagtaaagccgaagagtggggcgtgcagtacgtggagacgtcagcgaagacccgggccaacgtggacaaggtgttctttgacctaatgagagaaatcagaacaaagaagatgtcagaaaacaaagacaagaatggcaagaaaagcagcaagaacaagaaaagttttaaagaaagatgttgcttactatgagtgtcaaggtgacggatgaagccagctgctcctaaggacacagggctgggttggtaaagagaaggctatggttgacttcttgcttgtgcttcccactctccccgacttcattcactcaaacttctttaaatggggaaaaatatttgtgactctgtggctggcagaagaaataagcccatgcaagtggaagggctgctttgtcaggaggttgtggaatttctttcttctccccttcttccctcccaaaagcttagctatgtataaagtgccacagataggaaacagctgttaattacaaagagaaagaattgtcatagcatcttattttgttcctagttttataacattaccatccttcgttttgaactacagatgttgtagtgggttttggaggagggagtggagtaagatgccctcccacttttatcagtttagtagtagtactgagaaaaatcccttcagctctaagaacactgaaaaatccaccgattttttgggtaagcttcttggcaataccctgtggatctgaaacagctaaaaaaatgaatttgaattgcgccagataggtcaataccaagcttctgattcctcctcacatatgaaaagtgaaagttgtgagttgttttcctcttatttaaacattggcctattataatctgtgttggttatttttctcctgtaagcatcctgatttttctgtaggaacttttctttggcagaccaagtgaagactcaggaatggtgtgcattataaatgacacacattgccacttgtgtagatatttttaagttctttggctaagtcctctcctaactgcctgtcctctggttaggcccctccctctccactagt

SEQ ID NO: 34305 - DNA, 3155 bp, Homo sapiens
  source 1..3155: mol_type = unassigned DNA
agccgcgggaaattcccctcccgccaggctgctcgcctctcggctgggccagcactcggctctccccgctccgccccctgcccctggctcccgtacggtggacggcgacgctgggtgacccggggtgcaagaattcaggggttgggaaggtgtgagccgcaaacccagcggagggcgggaagaaggaggaggcctctagggtggtcgggggactgggggccccgccggcagaggtccctcggcctcctgactgactgactgcggccgcctccggccaggacgctgggagctgcctgcgggaaggtgcggggagcggagccatggcctccggtgcgtataacccgtatatagagataattgaacaacccaggcagaggggaatgcgttttagatacaaatgtgaagggcgatcagcaggcagcattccaggggagcacagcacagacaacaaccgaacatacccttctatccagattatgaactattatggaaaaggaaaagtgagaattacattagtaacaaagaatgacccatataaacctcatcctcatgatttagttggaaaagactgcagagacggctactatgaagcagaatttggacaagaacgcagacctttgtttttccaaaatttgggtattcgatgtgtgaagaaaaaagaagtaaaagaagctattattacaagaataaaggcaggaatcaatccattcaatgtccctgaaaaacagctgaatgatattgaagattgtgacctcaatgtggtgagactgtgttttcaagtttttctccctgatgaacatggtaatttgacgactgctcttcctcctgttgtctcgaacccaatttatgacaaccgtgctccaaatactgcagaattaaggatttgtcgtgtaaacaagaattgtggaagtgtcagaggaggagatgaaatatttctactttgtgacaaagttcagaaagatgacatagaagttcgttttgtgttgaacgattgggaagcaaaaggcatcttttcacaagctgatgtacaccgtcaagtagccattgttttcaaaactccaccatattgcaaagctatcacagaacccgtaacagtaaaaatgcagttgcggagaccttctgaccaggaagttagtgaatctatggattttagatatctgccagatgaaaaagatacttacggcaataaagcaaagaaacaaaagacaactctgcttttccagaaactgtgccaggatcacgtagaaacagggtttcgccatgttgaccaggatggtcttgaactcctgacatcaggtgatccacccaccttggcctcccaaagtgctgggattacagttaattttcctgagagaccaagacctggtctcctcggttcaattggagaaggaagatacttcaaaaaagaaccaaacttgttttctcatgatgcagttgtgagagaaatgcctacaggggtttcaagtcaagcagaatcctactatccctcacctgggcccatctcaagtggattgtcacatcatgcctcaatggcacctctgccttcttcaagctggtcatcagtggcccaccccaccccacgctcaggcaatacaaacccactgagtagtttttcaacaaggacacttccttctaattcgcaaggtatcccaccattcctgagaatacctgttgggaatgatttaaatgcttctaatgcttgcatttacaacaatgccgatgacatagtcggaatggaagcgtcatccatgccatcagcagatttatatggtatttctgatcccaacatgctgtctaattgttctgtgaatatgatgacaaccagcagtgacagcatgggagagactgataatccaagacttctgagcatgaatcttgaaaacccctcatgtaattcagtgttagacccaagagacttgagacagctccatcagatgtcctcttccagtatgtcagcaggcgccaattccaatactactgtttttgtttcacaatcagatgcatttgagggatctgacttcagttgtgcagataacagcatgataaatgagtcgggaccatcaaacagtactaatccaaacagtcatggttttgttcaagatagtcagtattcaggtattggcagtatgcaaaatgagcaattgagtgactcctttccatatgaattttttcaagtataacttgcaagatttaaatccttttaaatcttgataccacctatatagatgcagcattttgtatttgtctaactggggatataatactatatttatactgtatatataatactgactgagaatataatactgtatttgagaatataaaaaacttttttcagggaagaagcatacaactttggacatagcgaatacaaaattggaagctgtcataaaaagacaactcagaggccaggcgcaggggctcacacctgtaatcctagcactttgggaggccaaggcgggtggatcacttgagaccaggaattcgagaccagcctggccaacatggtgaaaccccgtctctactaaaaatacaaaaattagctgagcatggtggtacgtgcctgtactgtcagctacttgggaggctgaggcacaataattgtttgaacccaggaagcagaggttgcagtgagctgagatcacaccaccgcactccagcctgggtgacagagtgagactctgtctcaaaaaaaaaaaaacaaaaaaaacacacttttttatatttctttttataatgttttaatgtattcttaaatttcaagcaaatttaagataaaacttgtaatggctatgccattgaaaaacttaattttttatttttgaggcccatgggccaaggtaacccctaaggggttttcttaggcttcttggagcttagatttgtatgtatatcaaaatgtctttaaaatgttaagttgggcagaaggcagttgaagtgagctttcaaggtatgggaggttttctacattttatactatttcaatctatgcctttaaagttgcttatgattttagctgtacactcattttttaaggggaagaagtttccttggaccattcgcctttcttagatgtcctcactccctgtgatctcataaaactgcctatttgacatctctatctagaaatctaattaaagctcacactcagcata

SEQ ID NO: 34306 - DNA, 2398 bp, Homo sapiens
  source 1..2398: mol_type = unassigned DNA
caggggttgggaaggtgtgagccgcaaacccagcggagggcgggaagaaggaggaggcctctagggtggtcgggggactgggggccccgccggcagaggtccctcggcctcctgactgactgactgcggccgcctccggccaggacgctgggagctgcctgcgggaaggtgcggggagcggagccatggcctccggtgcgtataacccgtatatagagataattgaacaacccaggcagaggggaatgcgttttagatacaaatgtgaagggcgatcagcaggcagcattccaggggagcacagcacagacaacaaccgaacatacccttctatccagattatgaactattatggaaaaggaaaagtgagaattacattagtaacaaagaatgacccatataaacctcatcctcatgatttagttggaaaagactgcagagacggctactatgaagcagaatttggacaagaacgcagacctttgtttttccaaaatttgggtattcgatgtgtgaagaaaaaagaagtaaaagaagctattattacaagaataaaggcaggaatcaatccattcaatgtccctgaaaaacagctgaatgatattgaagattgtgacctcaatgtggtgagactgtgttttcaagtttttctccctgatgaacatggtaatttgacgactgctcttcctcctgttgtctcgaacccaatttatgacaaccgtgctccaaatactgcagaattaaggatttgtcgtgtaaacaagaattgtggaagtgtcagaggaggagatgaaatatttctactttgtgacaaagttcagaaagatgacatagaagttcgttttgtgttgaacgattgggaagcaaaaggcatcttttcacaagctgatgtacaccgtcaagtagccattgttttcaaaactccaccatattgcaaagctatcacagaacccgtaacagtaaaaatgcagttgcggagaccttctgaccaggaagttagtgaatctatggattttagatatctgccagatgaaaaagatacttacggcaataaagcaaagaaacaaaagacaactctgcttttccagaaactgtgccaggatcacgttaattttcctgagagaccaagacctggtctcctcggttcaattggagaaggaagatacttcaaaaaagaaccaaacttgttttctcatgatgcagttgtgagagaaatgcctacaggggtttcaagtcaagcagaatcctactatccctcacctgggcccatctcaagtggattgtcacatcatgcctcaatggcacctctgccttcttcaagctggtcatcagtggcccaccccaccccacgctcaggcaatacaaacccactgagtagtttttcaacaaggacacttccttctaattcgcaaggtatcccaccattcctgagaatacctgttgggaatgatttaaatgcttctaatgcttgcatttacaacaatgccgatgacatagtcggaatggaagcgtcatccatgccatcagcagatttatatggtatttctgatcccaacatgctgtctaattgttctgtgaatatgatgacaaccagcagtgacagcatgggagagactgataatccaagacttctgagcatgaatcttgaaaacccctcatgtaattcagtgttagacccaagagacttgagacagctccatcagatgtcctcttccagtatgtcagcaggcgccaattccaatactactgtttttgtttcacaatcagatgcatttgagggatctgacttcagttgtgcagataacagcatgataaatgagtcgggaccatcaaacagtactaatccaaacagtcatggttttgttcaagatagtcagtattcaggtattggcagtatgcaaaatgagcaattgagtgactcctttccatatgaattttttcaagtataacttgcaagatttaaatccttttaaatcttgataccacctatatagatgcagcattttgtatttgtctaactggggatataatactatatttatactgtatatataatactgactgagaatataatactgtatttgagaatataaaaaacttttttcagggaagaagcatacaactttggacatagcgaatacaaaattggaagctgtcataaaaagacaactcagaggccaggcgcaggggctcacacctgtaatcctagcactttgggaggccaaggcgggtggatcacttgagaccaggaattcgagaccagcctggccaacatggtgaaaccccgtctctactaaaaatacaaaaattagctgagcatggtggtacgtgcctgtactgtcagctacttgggaggctgaggcacaataattgtttgaacccaggaagcagaggttgc

SEQ ID NO: 34307 - DNA, 2681 bp, Homo sapiens
  source 1..2681: mol_type = unassigned DNA
cgtcctcggcgaggcgcgcacttggccccgacccccggcagcggctgtgcgtgcagcctcttcgtcctccgcgcggcgtgcacttgctcccggcccctgcgccgggcggcggcggggcagcgcgcaggcgcggccggattccgggcagtgacgcgacggcgggccgcgcggcgcatttccgcctctggcgaatggctcgtctgtagtgcacgccgcgggcccagctgcgaccccggccccgcccccgggaccccggccatggacgaactgttccccctcatcttcccggcagagccagcccaggcctctggcccctatgtggagatcattgagcagcccaagcagcggggcatgcgcttccgctacaagtgcgaggggcgctccgcgggcagcatcccaggcgagaggagcacagataccaccaagacccaccccaccatcaagatcaatggctacacaggaccagggacagtgcgcatctccctggtcaccaaggaccctcctcaccggcctcacccccacgagcttgtaggaaaggactgccgggatggcttctatgaggctgagctctgcccggaccgctgcatccacagtttccagaacctgggaatccagtgtgtgaagaagcgggacctggagcaggctatcagtcagcgcatccagaccaacaacaaccccttccaagaagagcagcgtggggactacgacctgaatgctgtgcggctctgcttccaggtgacagtgcgggacccatcaggcaggcccctccgcctgccgcctgtcctttctcatcccatctttgacaatcgtgcccccaacactgccgagctcaagatctgccgagtgaaccgaaactctggcagctgcctcggtggggatgagatcttcctactgtgtgacaaggtgcagaaagaggacattgaggtgtatttcacgggaccaggctgggaggcccgaggctccttttcgcaagctgatgtgcaccgacaagtggccattgtgttccggacccctccctacgcagaccccagcctgcaggctcctgtgcgtgtctccatgcagctgcggcggccttccgaccgggagctcagtgagcccatggaattccagtacctgccagatacagacgatcgtcaccggattgaggagaaacgtaaaaggacatatgagaccttcaagagcatcatgaagaagagtcctttcagcggacccaccgacccccggcctccacctcgacgcattgctgtgccttcccgcagctcagcttctgtccccaagccagcaccccagccctatccctttacgtcatccctgagcaccatcaactatgatgagtttcccaccatggtgtttccttctgggcagatcagccaggcctcggccttggccccggcccctccccaagtcctgccccaggctccagcccctgcccctgctccagccatggtatcagctctggcccaggccccagcccctgtcccagtcctagccccaggccctcctcaggctgtggccccacctgcccccaagcccacccaggctggggaaggaacgctgtcagaggccctgctgcagctgcagtttgatgatgaagacctgggggccttgcttggcaacagcacagacccagctgtgttcacagacctggcatccgtcgacaactccgagtttcagcagctgctgaaccagggcatacctgtggccccccacacaactgagcccatgctgatggagtaccctgaggctataactcgcctagtgacaggggcccagaggccccccgacccagctcctgctccactgggggccccggggctccccaatggcctcctttcaggagatgaagacttctcctccattgcggacatggacttctcagccctgctgagtcagatcagctcctaagggggtgacgcctgccctccccagagcactgggttgcaggggattgaagccctccaaaagcacttacggattctggtggggtgtgttccaactgcccccaactttgtggatgtcttccttggaggggggagccatattttattcttttattgtcagtatctgtatctctctctctttttggaggtgcttaagcagaagcattaacttctctggaaaggggggagctggggaaactcaaacttttcccctgtcctgatggtcagctcccttctctgtagggaactctggggtcccccatccccatcctccagcttctggtactctcctagagacagaagcaggctggaggtaaggcctttgagcccacaaagccttatcaagtgtcttccatcatggattcattacagcttaatcaaaataacgccccagataccagcccctgtatggcactggcattgtccctgtgcctaacaccagcgtttgaggggctggccttcctgccctacagaggtctctgccggctctttccttgctcaaccatggctgaaggaaaccagtgcaacagcactggctctctccaggatccagaaggggtttggtctgggacttccttgctctccctcttctcaagtgccttaatagtagggtaagttgttaagagtgggggagagcaggctggcagctctccagtcaggaggcatagtttttactgaacaatcaaagcacttggactcttgctctttctactctgaactaataaatctgttgccaagctg

SEQ ID NO: 34308 - DNA, 2700 bp, Homo sapiens
  source 1..2700: mol_type = unassigned DNA
tcttcgtcctcggcgaggcgcgcacttggccccgacccccggcagcggctgtgcgtgcagcctcttcgtcctccgcgcggcgtgcacttgctcccggcccctgcgccgggcggcggcggggcagcgcgcaggcgcggccggattccgggcagtgacgcgacggcgggccgcgcggcgcatttccgcctctggcgaatggctcgtctgtagtgcacgccgcgggcccagctgcgaccccggccccgcccccgggaccccggccatggacgaactgttccccctcatcttcccggcagagccagcccaggcctctggcccctatgtggagatcattgagcagcccaagcagcggggcatgcgcttccgctacaagtgcgaggggcgctccgcgggcagcatcccaggcgagaggagcacagataccaccaagacccaccccaccatcaagatcaatggctacacaggaccagggacagtgcgcatctccctggtcaccaaggaccctcctcaccggcctcacccccacgagcttgtaggaaaggactgccgggatggcttctatgaggctgagctctgcccggaccgctgcatccacagtttccagaacctgggaatccagtgtgtgaagaagcgggacctggagcaggctatcagtcagcgcatccagaccaacaacaaccccttccaagttcctatagaagagcagcgtggggactacgacctgaatgctgtgcggctctgcttccaggtgacagtgcgggacccatcaggcaggcccctccgcctgccgcctgtcctttctcatcccatctttgacaatcgtgcccccaacactgccgagctcaagatctgccgagtgaaccgaaactctggcagctgcctcggtggggatgagatcttcctactgtgtgacaaggtgcagaaagaggacattgaggtgtatttcacgggaccaggctgggaggcccgaggctccttttcgcaagctgatgtgcaccgacaagtggccattgtgttccggacccctccctacgcagaccccagcctgcaggctcctgtgcgtgtctccatgcagctgcggcggccttccgaccgggagctcagtgagcccatggaattccagtacctgccagatacagacgatcgtcaccggattgaggagaaacgtaaaaggacatatgagaccttcaagagcatcatgaagaagagtcctttcagcggacccaccgacccccggcctccacctcgacgcattgctgtgccttcccgcagctcagcttctgtccccaagccagcaccccagccctatccctttacgtcatccctgagcaccatcaactatgatgagtttcccaccatggtgtttccttctgggcagatcagccaggcctcggccttggccccggcccctccccaagtcctgccccaggctccagcccctgcccctgctccagccatggtatcagctctggcccaggccccagcccctgtcccagtcctagccccaggccctcctcaggctgtggccccacctgcccccaagcccacccaggctggggaaggaacgctgtcagaggccctgctgcagctgcagtttgatgatgaagacctgggggccttgcttggcaacagcacagacccagctgtgttcacagacctggcatccgtcgacaactccgagtttcagcagctgctgaaccagggcatacctgtggccccccacacaactgagcccatgctgatggagtaccctgaggctataactcgcctagtgacaggggcccagaggccccccgacccagctcctgctccactgggggccccggggctccccaatggcctcctttcaggagatgaagacttctcctccattgcggacatggacttctcagccctgctgagtcagatcagctcctaagggggtgacgcctgccctccccagagcactgggttgcaggggattgaagccctccaaaagcacttacggattctggtggggtgtgttccaactgcccccaactttgtggatgtcttccttggaggggggagccatattttattcttttattgtcagtatctgtatctctctctctttttggaggtgcttaagcagaagcattaacttctctggaaaggggggagctggggaaactcaaacttttcccctgtcctgatggtcagctcccttctctgtagggaactctggggtcccccatccccatcctccagcttctggtactctcctagagacagaagcaggctggaggtaaggcctttgagcccacaaagccttatcaagtgtcttccatcatggattcattacagcttaatcaaaataacgccccagataccagcccctgtatggcactggcattgtccctgtgcctaacaccagcgtttgaggggctggccttcctgccctacagaggtctctgccggctctttccttgctcaaccatggctgaaggaaaccagtgcaacagcactggctctctccaggatccagaaggggtttggtctgggacttccttgctctccctcttctcaagtgccttaatagtagggtaagttgttaagagtgggggagagcaggctggcagctctccagtcaggaggcatagtttttactgaacaatcaaagcacttggactcttgctctttctactctgaactaataaatctgttgccaagctggctaga

SEQ ID NO: 34309 - DNA, 2163 bp, Homo sapiens
  source 1..2163: mol_type = unassigned DNA
ggcgaatggctcgtctgtagtgcacgccgcgggcccagctgcgaccccggccccgcccccgggaccccggccatggacgaactgttccccctcatcttcccggcagagccagcccaggcctctggcccctatgtggagatcattgagcagcccaagcagcggggcatgcgcttccgctacaagtgcgaggggcgctccgcgggcagcatcccaggcgagaggagcacagataccaccaagacccaccccaccatcaagatcaatggctacacaggaccagggacagtgcgcatctccctggtcaccaaggaccctcctcaccggcctcacccccacgagcttgtaggaaaggactgccgggatggcttctatgaggctgagctctgcccggaccgctgcatccacagtttccagaacctgggaatccagtgtgtgaagaagcgggacctggagcaggctatcagtcagcgcatccagaccaacaacaaccccttccaagttcctatagaagagcagcgtggggactacgacctgaatgctgtgcggctctgcttccaggtgacagtgcgggacccatcaggcaggcccctccgcctgccgcctgtcctttctcatcccatctttgacaatcgtgcccccaacactgccgagctcaagatctgccgagtgaaccgaaactctggcagctgcctcggtggggatgagatcttcctactgtgtgacaaggtgcagaaagaggacattgaggtctgtccccaagccagcaccccagccctatccctttacgtcatccctgagcaccatcaactatgatgagtttcccaccatggtgtttccttctgggcagatcagccaggcctcggccttggccccggcccctccccaagtcctgccccaggctccagcccctgcccctgctccagccatggtatcagctctggcccaggccccagcccctgtcccagtcctagccccaggccctcctcaggctgtggccccacctgcccccaagcccacccaggctggggaaggaacgctgtcagaggccctgctgcagctgcagtttgatgatgaagacctgggggccttgcttggcaacagcacagacccagctgtgttcacagacctggcatccgtcgacaactccgagtttcagcagctgctgaaccagggcatacctgtggccccccacacaactgagcccatgctgatggagtaccctgaggctataactcgcctagtgacaggggcccagaggccccccgacccagctcctgctccactgggggccccggggctccccaatggcctcctttcaggagatgaagacttctcctccattgcggacatggacttctcagccctgctgagtcagatcagctcctaagggggtgacgcctgccctccccagagcactgggttgcaggggattgaagccctccaaaagcacttacggattctggtggggtgtgttccaactgcccccaactttgtggatgtcttccttggaggggggagccatattttattcttttattgtcagtatctgtatctctctctctttttggaggtgcttaagcagaagcattaacttctctggaaaggggggagctggggaaactcaaacttttcccctgtcctgatggtcagctcccttctctgtagggaactctggggtcccccatccccatcctccagcttctggtactctcctagagacagaagcaggctggaggtaaggcctttgagcccacaaagccttatcaagtgtcttccatcatggattcattacagcttaatcaaaataacgccccagataccagcccctgtatggcactggcattgtccctgtgcctaacaccagcgtttgaggggctggccttcctgccctacagaggtctctgccggctctttccttgctcaaccatggctgaaggaaaccagtgcaacagcactggctctctccaggatccagaaggggtttggtctgggacttccttgctctccctcttctcaagtgccttaatagtagggtaagttgttaagagtgggggagagcaggctggcagctctccagtcaggaggcatagtttttactgaacaatcaaagcacttggactcttgctctttctactctgaactaataaatctgttgccaagctg

SEQ ID NO: 34310 - DNA, 3183 bp, Homo sapiens
  source 1..3183: mol_type = unassigned DNA
ctcgtctgtagtgcacgccgcgggcccagctgcgaccccggccccgcccccgggaccccggccatggacgaactgttccccctcatcttcccggcagagccagcccaggcctctggcccctatgtggagatcattgagcagcccaagcagcggggcatgcgcttccgctacaagtgcgaggggcgctccgcgggcagcatcccaggcgagaggagcacagataccaccaagacccaccccaccatcaagatcaatggctacacaggaccagggacagtgcgcatctccctggtcaccaaggaccctcctcaccggcctcacccccacgagcttgtaggaaaggactgccgggatggcttctatgaggctgagctctgcccggaccgctgcatccacagtttccagaacctgggaatccagtgtgtgaagaagcgggacctggagcaggctatcagtcagcgcatccagaccaacaacaaccccttccaagttcctatagaagagcagcgtggggactacgacctgaatgctgtgcggctctgcttccaggtgacagtgcgggacccatcaggcaggcccctccgcctgccgcctgtcctttctcatcccatctttgacaatcgtgcccccaacactgccgagctcaagatctgccgagtgaaccgaaactctggcagctgcctcggtggggatgagatcttcctactgtgtgacaaggtgcagaaagaggacattgaggtgtatttcacgggaccaggctgggaggcccgaggctccttttcgcaagctgatgtgcaccgacaagtggccattgtgttccggacccctccctacgcagaccccagcctgcaggctcctgtgcgtgtctccatgcagctgcggcggccttccgaccgggagctcagtgagcccatggaattccagtacctgccagatacagacgatcgtcaccggattgaggagaaacgtaaaaggacatatgagaccttcaagagcatcatgaagaagagtcctttcagcggacccaccgacccccggcctccacctcgacgcattgctgtgccttcccgcagctcagcttctgtccccaagccaggtaaggatttccttttgtcccactggaacgacaggttcagctctgttcagctgaggagcagtggagatgaagactcctgggccccattacagacctactgaatcagaggctttgaaaggatggcgcaggaaccagcgacttcctgggatgctaatgcacactgaagcctgggaaccaccgtgccacttaaattctatattgggtatcttgggaatcagaagttaaaaatgcagaatctctgctctcatctctcacttgaattgggggaacaaaaatcacctctaaattagcaagatgtgtgtgcctgtgcgaggctcaaaaactgacaagctctgcacttcaggccgctgctcacttggtgctccatgggctcattgcctctcaggacttagtttttcagctgtaaactgaggagtccagcttatctctccaagtgtcccttcctctaaaaggctggaagagtttcgtgggcttgagtagtcagggaggactccaaggtggaggtgtggctagaactggaccctacaggctgggtcagatggggtaagaggaaggagatagggtgttggcagtgactccctagagagggattgagcctgagcaccatgaagaggggctggggtacagaggacggggtggatctctagggctttctctgacccctgcctctctgtctctctcctccagcaccccagccctatccctttacgtcatccctgagcaccatcaactatgatgagtttcccaccatggtgtttccttctgggcagatcagccaggcctcggccttggccccggcccctccccaagtcctgccccaggctccagcccctgcccctgctccagccatggtatcagctctggcccaggccccagcccctgtcccagtcctagccccaggccctcctcaggctgtggccccacctgcccccaagcccacccaggctggggaaggaacgctgtcagaggccctgctgcagctgcagtttgatgatgaagacctgggggccttgcttggcaacagcacagacccagctgtgttcacagacctggcatccgtcgacaactccgagtttcagcagctgctgaaccagggcatacctgtggccccccacacaactgagcccatgctgatggagtaccctgaggctataactcgcctagtgacaggggcccagaggccccccgacccagctcctgctccactgggggccccggggctccccaatggcctcctttcaggagatgaagacttctcctccattgcggacatggacttctcagccctgctgagtcagatcagctcctaagggggtgacgcctgccctccccagagcactgggttgcaggggattgaagccctccaaaagcacttacggattctggtggggtgtgttccaactgcccccaactttgtggatgtcttccttggaggggggagccatattttattcttttattgtcagtatctgtatctctctctctttttggaggtgcttaagcagaagcattaacttctctggaaaggggggagctggggaaactcaaacttttcccctgtcctgatggtcagctcccttctctgtagggaactctggggtcccccatccccatcctccagcttctggtactctcctagagacagaagcaggctggaggtaaggcctttgagcccacaaagccttatcaagtgtcttccatcatggattcattacagcttaatcaaaataacgccccagataccagcccctgtatggcactggcattgtccctgtgcctaacaccagcgtttgaggggctggccttcctgccctacagaggtctctgccggctctttccttgctcaaccatggctgaaggaaaccagtgcaacagcactggctctctccaggatccagaaggggtttggtctgggacttccttgctctccctcttctcaagtgccttaatagtagggtaagttgttaagagtgggggagagcaggctggcagctctccagtcaggaggcatagtttttactgaacaatcaaagcacttggactcttgctctttctactctgaactaataaatctgttgccaagctgg

SEQ ID NO: 34311 - DNA, 1113 bp, Homo sapiens
  source 1..1113: mol_type = unassigned DNA
ctcgtctgtagtgcacgccgcgggcccagctgcgaccccggccccgcccccgggaccccggccatggacgaactgttccccctcatcttcccggcagagccagcccaggcctctggcccctatgtggagatcattgagcagcccaagcagcggggcatgcgcttccgctacaagtgcgaggggcgctccgcgggcagcatcccaggcgagaggagcacagataccaccaagacccaccccaccatcaagatcaatggctacacaggaccagggacagtgcgcatctccctggtcaccaaggaccctcctcaccggcctcacccccacgagcttgtaggaaaggactgccgggatggcttctatgaggctgagctctgcccggaccgctgcatccacagtttccagaacctgggaatccagtgtgtgaagaagcgggacctggagcaggctatcagtcagcgcatccagaccaacaacaaccccttccaagttcctatagaagagcagcgtggggactacgacctgaatgctgtgcggctctgcttccaggtgacagtgcgggacccatcaggcaggcccctccgcctgccgcctgtcctttctcatcccatctttgacaatcgtgcccccaacactgccgagctcaagatctgccgagtgaaccgaaactctggcagctgcctcggtggggatgagatcttcctactgtgtgacaaggtgcagaaagcccatggaattccagtacctgccagatacagacgatcgtcaccggattgaggagaaacgtaaaaggacatatgagaccttcaagagcatcatgaagaagagtcctttcagcggacccaccgacccccggcctccacctcgacgcattgctgtgccttcccgcagctcagcttctgtccccaagccagcaccccagccctatccctttacgtcatccctgagcaccatcaactatgatgagtttcccaccatggtgtttccttctgggcagatcagccaggcctcggccttggccccggcccctccccaagtcctgccccaggctccagcccctgcccctgctccagccatggtatcagctctggcccagaggccccccgacccagc

SEQ ID NO: 34312 - DNA, 1437 bp, Homo sapiens
  source 1..1437: mol_type = unassigned DNA
gcatttccgcctctggcgaatggctcgtctgtagtgcacgccgcgggcccagctgcgaccccggccccgcccccgggaccccggccatggacgaactgttccccctcatcttcccggcagagccagcccaggcctctggcccctatgtggagatcattgagcagcccaagcagcggggcatgcgcttccgctacaagtgcgaggggcgctccgcgggcagcatcccaggcgagaggagcacagataccaccaagacccaccccaccatcaaggtttggatgtctgggcctctgtactttggacagatcaatggctacacaggaccagggacagtgcgcatctccctggtcaccaaggaccctcctcaccggcctcacccccacgagcttgtaggaaaggactgccgggatggcttctatgaggctgagctctgcccggaccgctgcatccacagtttccagaacctgggaatccagtgtgtgaagaagcgggacctggagcaggctatcagtcagcgcatccagaccaacaacaaccccttccaagttcctatagaagagcagcgtggggactacgacctgaatgctgtgcggctctgcttccaggtgacagtgcgggacccatcaggcaggcccctccgcctgccgcctgtcctttctcatcccatctttgacaatcgtgcccccaacactgccgagctcaagatctgccgagtgaaccgaaactctggcagctgcctcggtggggatgagatcttcctactgtgtgacaaggtgcagaaagaggacattgaggtgtatttcacgggaccaggctgggaggcccgaggctccttttcgcaagctgatgtgcaccgacaagtggccattgtgttccggacccctccctacgcagaccccagcctgcaggctcctgtgcgtgtctccatgcagctgcggcggccttccgaccgggagctcagtgagcccatggaattccagtacctgccagatacagacgatcgtcaccggattgaggagaaacgtaaaaggacatatgagaccttcaagagcatcatgaagaagagtcctttcagcggacccaccgacccccggcctccacctcgacgcattgctgtgccttcccgcagctcagcttctgtccccaagccagcaccccagccctatccctttacgtcatccctgagcaccatcaactatgatgagtttcccaccatggtgtttccttctgggcagatcagccaggcctcggccttggccccggcccctccccaagtcctgccccaggctccagcccctgcccctgctccagccatggtatcagctctggcccaggccccagagcactgggttgcaggggattgaagccctccaaaagcacttacggattctggtggggtgtgttccaactgcccccaactttgtggatgtcttcctt

SEQ ID NO: 34313 - DNA, 2287 bp, Homo sapiens
  source 1..2287: mol_type = unassigned DNA
cccgcccggcccggccccgcgccccgcgcagccccgggcgccgcgcgtcctgcccggcctgcggccccagcccttgcgccgctcgtccgacccgcgatcgtccaccagaccgtgcctcccggccgcccggccggcccgcgtgcatgcttcggtctgggccagcctctgggccgtccgtccccactggccgggccatgccgagtcgccgcgtcgccagaccgccggctgcgccggagctgggggccttagggtcccccgacctctcctcactctcgctcgccgtttccaggagcacagatgaattggagatcatcgacgagtacatcaaggagaacggcttcggcctggacgggggacagccgggcccgggcgaggggctgccacgcctggtgtctcgcggggctgcgtccctgagcacggtcaccctgggccctgtggcgcccccagccacgccgccgccttggggctgccccctgggccgactagtgtccccagcgccgggcccgggcccgcagccgcacctggtcatcacggagcagcccaagcagcgcggcatgcgcttccgctacgagtgcgagggccgctcggccggcagcatccttggggagagcagcaccgaggccagcaagacgctgcccgccatcgagctccgggattgtggagggctgcgggaggtggaggtgactgcctgcctggtgtggaaggactggcctcaccgagtccacccccacagcctcgtggggaaagactgcaccgacggcatctgcagggtgcggctccggcctcacgtcagcccccggcacagttttaacaacctgggcatccagtgtgtgaggaagaaggagattgaggctgccattgagcggaagattcaactgggcattgacccctacaacgctgggtccctgaagaaccatcaggaagtagacatgaatgtggtgaggatctgcttccaggcctcatatcgggaccagcagggacagatgcgccggatggatcctgtgctttccgagcccgtctatgacaagaaatccacaaacacatcagagctgcggatttgccgaattaacaaggaaagcgggccgtgcaccggtggcgaggagctctacttgctctgcgacaaggtgcagaaagaggacatatcagtggtgttcagcagggcctcctgggaaggtcgggctgacttctcccaggccgacgtgcaccgccagattgccattgtgttcaagacgccgccctacgaggacctggagattgtcgagcccgtgacagtcaacgtcttcctgcagcggctcaccgatggggtctgcagcgagccattgcctttcacgtacctgcctcgcgaccatgacagctacggcgtggacaagaagcggaaacgggggatgcccgacgtccttggggagctgaacagctctgacccccatggcatcgagagcaaacggcggaagaaaaagccggccatcctggaccacttcctgcccaaccacggctcaggcccgttcctcccgccgtcagccctgctgccagaccctgacttcttctctggcaccgtgtccctgcccggcctggagccccctggcgggcctgacctcctggacgatggctttgcctacgaccctacggcccccacactcttcaccatgctggacctgctgcccccggcaccgccacacgctagcgctgttgtgtgcagcggaggtgccggggccgtggttggggagacccccggccctgaaccactgacactggactcgtaccaggccccgggccccggggatggaggcaccgccagccttgtgggcagcaacatgttccccaatcattaccgcgaggcggcctttgggggcggcctcctatccccggggcctgaagccacgtagccccgcgatgccagaggaggggcactgggtggggagggaggtggaggagccgtgcaatcccaaccaggatgtctagcacccccatccccttggcccttcctcatgcttctgaagtggacatattcagccttggcgagaagctccgttgcacgggtttccccttgagcccattttacagatgaggaaactgagtccggagaggaaaagggacatggctcccgtgcactagcttgttacagctgcctctgtccccacatgtgggggcaccttctccagtaggattcggaaaagattgtacatatgggaggagggggcagattcctggccctccctccccagacttgaaggtggggggtaggttggttgttcagagtcttcccaataaagatgagtttttgagcctc

SEQ ID NO: 34314 - DNA, 2219 bp, Homo sapiens
  source 1..2219: mol_type = unassigned DNA
cgcgcagccccgggcgccgcgcgtcctgcccggcctgcggccccagcccttgcgccgctcgtccgacccgcgatcgtccaccagaccgtgcctcccggccgcccggccggcccgcgtgcatgcttcggtctgggccagcctctgggccgtccgtccccactggccgggccatgccgagtcgccgcgtcgccagaccgccggctgcgccggagctgggggccttagggtcccccgacctctcctcactctcgctcgccgtttccaggagcacagagatcatcgacgagtacatcaaggagaacggcttcggcctggacgggggacagccgggcccgggcgaggggctgccacgcctggtgtctcgcggggctgcgtccctgagcacggtcaccctgggccctgtggcgcccccagccacgccgccgccttggggctgccccctgggccgactagtgtccccagcgccgggcccgggcccgcagccgcacctggtcatcacggagcagcccaagcagcgcggcatgcgcttccgctacgagtgcgagggccgctcggccggcagcatccttggggagagcagcaccgaggccagcaagacgctgcccgccatcgagctccgggattgtggagggctgcgggaggtggaggtgactgcctgcctggtgtggaaggactggcctcaccgagtccacccccacagcctcgtggggaaagactgcaccgacggcatctgcagggtgcggctccggcctcacgtcagcccccggcacagttttaacaacctgggcatccagtgtgtgaggaagaaggagattgaggctgccattgagcggaagattcaactgggcattgacccctacaacgctgggtccctgaagaaccatcaggaagtagacatgaatgtggtgaggatctgcttccaggcctcatatcgggaccagcagggacagatgcgccggatggatcctgtgctttccgagcccgtctatgacaagaaatccacaaacacatcagagctgcggatttgccgaattaacaaggaaagcgggccgtgcaccggtggcgaggagctctacttgctctgcgacaaggtgcagaaagaggacatatcagtggtgttcagcagggcctcctgggaaggtcgggctgacttctcccaggccgacgtgcaccgccagattgccattgtgttcaagacgccgccctacgaggacctggagattgtcgagcccgtgacagtcaacgtcttcctgcagcggctcaccgatggggtctgcagcgagccattgcctttcacgtacctgcctcgcgaccatgacagctacggcgtggacaagaagcggaaacgggggatgcccgacgtccttggggagctgaacagctctgacccccatggcatcgagagcaaacggcggaagaaaaagccggccatcctggaccacttcctgcccaaccacggctcaggcccgttcctcccgccgtcagccctgctgccagaccctgacttcttctctggcaccgtgtccctgcccggcctggagccccctggcgggcctgacctcctggacgatggctttgcctacgaccctacggcccccacactcttcaccatgctggacctgctgcccccggcaccgccacacgctagcgctgttgtgtgcagcggaggtgccggggccgtggttggggagacccccggccctgaaccactgacactggactcgtaccaggccccgggccccggggatggaggcaccgccagccttgtgggcagcaacatgttccccaatcattaccgcgaggcggcctttgggggcggcctcctatccccggggcctgaagccacgtagccccgcgatgccagaggaggggcactgggtggggagggaggtggaggagccgtgcaatcccaaccaggatgtctagcacccccatccccttggcccttcctcatgcttctgaagtggacatattcagccttggcgagaagctccgttgcacgggtttccccttgagcccattttacagatgaggaaactgagtccggagaggaaaagggacatggctcccgtgcactagcttgttacagctgcctctgtccccacatgtgggggcaccttctccagtaggattcggaaaagattgtacatatgggaggagggggcagattcctggccctccctccccagacttgaaggtggggggtaggttggttgttc

SEQ ID NO: 34315 - DNA, 2270 bp, Homo sapiens
  source 1..2270: mol_type = unassigned DNA
cgcgccccgcgcagccccgggcgccgcgcgtcctgcccggcctgcggccccagcccttgcgccgctcgtccgacccgcgatcgtccaccagaccgtgcctcccggccgcccggccggcccgcgtgcatgcttcggtctgggccagcctctgggccgtccgtccccactggccgggccatgccgagtcgccgcgtcgccagaccgccggctgcgccggagctgggggccttagggtcccccgacctctcctcactctcgctcgccgtttccaggagcacagatgaattggagatcatcgacgagtacatcaaggagaacggcttcggcctggacgggggacagccgggcccgggcgaggggctgccacgcctggtgtctcgcggggctgcgtccctgagcacggtcaccctgggccctgtggcgcccccagccacgccgccgccttggggctgccccctgggccgactagtgtccccagcgccgggcccgggcccgcagccgcacctggtcatcacggagcagcccaagcagcgcggcatgcgcttccgctacgagtgcgagggccgctcggccggcagcatccttggggagagcagcaccgaggccagcaagacgctgcccgccatcgagctccgggattgtggagggctgcgggaggtggaggtgactgcctgcctggtgtggaaggactggcctcaccgagtccacccccacagcctcgtggggaaagactgcaccgacggcatctgcagggtgcggctccggcctcacgtcagcccccggcacagttttaacaacctgggcatccagtgtgtgaggaagaaggagattgaggctgccattgagcggaagattcaactgggcattgacccctacaacgctgggtccctgaagaaccatcaggaagtagacatgaatgtggtgaggatctgcttccaggcctcatatcgggaccagcagggacagatgcgccggatggatcctgtgctttccgagcccgtctatgacaagaaatccacaaacacatcagagctgcggatttgccgaattaacaaggaaagcgggccgtgcaccggtggcgaggagctctacttgctctgcgacaaggtgcagaaagaggacatatcagtggtgttcagcagggcctcctgggaaggtcgggctgacttctcccaggccgacgtgcaccgccagattgccattgtgttcaagacgccgccctacgaggacctggagattgtcgagcccgtgacagtcaacgtcttcctgcagcggctcaccgatggggtctgcagcgagccattgcctttcacgtacctgcctcgcgaccatgacagctacggcgtggacaagaagcggaaacgggggatgcccgacgtccttggggagctgaacagctctgacccccatggcatcgagagcaaacggcggaagaaaaagccggccatcctggaccacttcctgcccaaccacggctcaggcccgttcctcccgccgtcagccctgctgccagaccctgacttcttctctggcaccgtgtccctgcccggcctggagccccctggcgggcctgacctcctggacgatggctttgcctacgaccctacggcccccacactcttcaccatgctggacctgctgcccccggcaccgccacacgctagcgctgttgtgtgcagcggaggtgccggggccgtggttggggagacccccggccctgaaccactgacactggactcgtaccaggccccgggccccggggatggaggcaccgccagccttgtgggcagcaacatgttccccaatcattaccgcgaggcggcctttgggggcggcctcctatccccggggcctgaagccacgtagccccgcgatgccagaggaggggcactgggtggggagggaggtggaggagccgtgcaatcccaaccaggatgtctagcacccccatccccttggcccttcctcatgcttctgaagtggacatattcagccttggcgagaagctccgttgcacgggtttccccttgagcccattttacagatgaggaaactgagtccggagaggaaaagggacatggctcccgtgcactagcttgttacagctgcctctgtccccacatgtgggggcaccttctccagtaggattcggaaaagattgtacatatgggaggagggggcagattcctggccctccctccccagacttgaaggtggggggtaggttggttgttcagagtcttcccaataaagatgagtttttgagcctc

SEQ ID NO: 34316 - DNA, 5613 bp, Homo sapiens
  source 1..5613: mol_type = unassigned DNA
cggggcggcggcgggggccgggggggcccgggcgcgcgggagcgggagcggccgggggagccggagcgcaccatggaggcggcggcaggcggccgcggctgtttccagccgcacccggggctgcagaagacgctggagcagttccacctgagctccatgagctcgctgggcggcccggccgctttctcggcgcgctgggcgcaggaggcctacaagaaggagagcgccaaggaggcgggcgcggccgcggtgccggcgccggtgcccgcagccaccgagccgccgcccgtgctgcacctgcccgccatccagccgccgccgcccgtgctgcccgggcccttcttcatgccgtccgaccgctccaccgagcgctgcgagaccgtactggaaggcgagaccatctcgtgcttcgtggtgggaggcgagaagcgcctgtgtctgccgcagattctcaactcggtgctgcgcgacttctcgctgcagcagatcaacgcggtgtgcgacgagctccacatctactgctcgcgctgcacggccgaccagctggagatcctcaaagtcatgggcatcctgcccttctcggcgccctcgtgcgggctcatcaccaagacggacgccgagcgcctgtgcaacgcgctgctctacggcggcgcctacccgccgccctgcaagaaggagctggccgccagcctggcgctgggcctggagctcagcgagcgcagcgtccgcgtgtaccacgagtgcttcggcaagtgtaaggggctgctggtgcccgagctctacagcagcccgagcgccgcctgcatccagtgcctggactgccgcctcatgtacccgccgcacaagttcgtggtgcactcgcacaaggccctggagaaccggacctgccactggggcttcgactcggccaactggcgggcctacatcctgctgagccaggattacacgggcaaggaggagcaggcgcgcctcggccgctgcctggacgacgtgaaggagaaattcgactatggcaacaagtacaagcggcgggtgccccgggtctcctctgagcctccggcctccataagacccaaaacagatgacacctcttcccagtcccccgcgccttccgaaaaggacaagccgtccagctggctgcggaccttggccggctcttccaataagagcctgggctgtgttcaccctcgccagcgcctctctgctttccgaccctggtcccccgcagtgtcagcgagtgagaaagagctctccccacacctcccggccctcatccgagacagcttctactcctacaagagctttgagacagccgtggcgcccaacgtggccctcgcaccgccggcccagcagaaggttgtgagcagccctccgtgtgccgccgccgtctcccgggcccccgagcctctcgccacttgcacccagcctcggaagcggaagctgactgtggacaccccaggagccccagagacgctggcgcccgtggctgccccagaggaggacaaggactcggaggcggaggtggaagttgaaagcagggaggaattcacctcctccttgtcctcgctctcttccccgtcctttacctcatccagctccgccaaggacctgggctccccgggtgcgcgtgccctgccctcggccgtccctgatgctgcggcccctgccgacgcccccagtgggctggaggcggagctggagcacctgcggcaggcactggagggcggcctggacaccaaggaagccaaagagaagttcctgcatgaggtggtcaagatgcgcgtgaagcaggaggagaagctcagcgcagccctgcaggccaagcgcagcctccaccaggagctggagttcctacgcgtggccaagaaggagaagctgcgggaggccacggaggccaagcgtaacctgcggaaggagatcgagcgtctccgcgccgagaacgagaagaagatgaaagaggccaacgagtcacggctgcgcctgaagcgggagctggagcaggcgcggcaggcccgggtgtgcgacaagggctgcgaggcgggccgcctgcgcgccaagtactcggcccagatcgaagacctgcaggtgaagctgcagcacgcggaggcggaccgggagcagctgcgggccgacctgctgcgggagcgcgaggcccgggagcacctggagaaggtggtgaaggagctgcaggaacagctgtggccgcgggcccgccccgaggctgcgggcagcgagggcgctgcggagctggagccgtagattccgtgcctgccgccgcagcgccgccgacaacgcgggtgcaggggggcgcggctgggcggtgcagctccgcccggctccgcccctgcagcccacacagcacaacgtcttaccgtgcctattaccaagcgagtgtttgtaaccatgtagttttggaacccactgcaaaattttctactggccaagttcaagtgagtaagccgcgtcccccaactacagctggagacggggccagctcggcggcctgctggtcctctgcttgctggaacattctaacatttacacttttgttataagctatttaaaaccagtaaggagacttgaaattcagaaaatcaacacatttttaaatgactaacttctaaaagccccaacacatgacgccatctgaagacccgcaacggagtgggggtggcggccgccccaccctccccacccggggaagccatcacagctcatctgcccgcggctgcgtgaggacagcaggggtttttcttcagagtctattttttcagcgacaaggacccaggtcttcctgctgctgccagggagagcagggacagtgccgcgtgcgagatgagctcgaacactgcccgccttactgccgcctaccccgcccgccacgccgccgtcgatgccagcgctgtccccacgggtaccaggaagtgcagagccgcacaggagctgccccggagctgaggggacggtcttcggctcctctgcaccccgtgattctgcccacgctcctccaccacgaggcactgacctgcgtcgggtggtgaccgtggctggcggtcacgccctcagcccctccgggcacacgtgccgcctgaccgggcgacccttttcagttcggcaaacgtcgctcccttcattttgggactgaggctgcagcattggaacaaaagagcattatttcaatttttctttctttttttttgttcgttcatttaaacgtatatttagaactgcactttgtccacaaccttcccttctctttctattccccagtgaactgaggtttttaccgatttatagagcagtcaaatccgaagtgctcgagtgcttagaaaccccctctggtgcttggttgaacaagggaatcacaagaaaacgaaaatgcaaaaactgaacttcgggggtcgttctgtgccttccagcatcttgtacagcaaatcctgactcgtgtctttttacccccaagatatctgtcttcagtagcgactgaatctgccactctcagaataagttccttgcatttattccaaataatctcgtttactctcacctgtttatgcaaattgtataaggtttcttatgcccaagcttgaaaaatgatttcccagtagacaagaggcggctacctatcctacagttacggtatttatttacataagaagatcttacaggagttctttgcttgaatccgttctaacacccgcggcagctgcacgcgctcacagaaggtggaggttacttgcccaggtacagacgacctcggggcagtgacgagcaaagaccagagactgctgagccctcgcatctgggtggcggaattgcctgcggggttttgcccttggtttactgaggggggtcttggttgctgctgaagccccccaccccttctaaagtgcaatgcaaaagggacatcatgtatatgcagcgtttgtttggaattttctttgcttttgttttctttgcggttgttctgtgtgcatggattccacacctctgccgtaggtagatccgtcagcgggcattattaccgtgtcttgtaaagggtcggttttgttatgcaacatgcagaatgctgtttttagccttgttttaccagagttgttttttttttcagttatttcttcaagggaaactaaatgatttagttggagcaaagctttaagtgtgttggcgtgcttctgtgtggctgtcctgtgtcgccaggtcgaagatcacagtgaggtagaggccctgccccatccccagggccgccaggcttgctccgtttgctttgagtttttagaccccagagggagatgagcttttccaagctgtgtctgggccagagcctctccttgcccttgctccatcccgacggtcaccgttgggtccacgcctccaccgccccatcttgccccaaacggaaagcgctgtatctgcagtggcagcccttccccacttcggctctgggagggtccagccagtgtcacctgggcccaccctttcctgcagctgccaggcccgtgcggtcagtgggacccggacgtgggcaggcgagctcgggaccctcccaggcagttcccacagctcttgcctcggctcaccagggtcacttccactgtcaggggcctgagggggcagctgtggctgcagggctgctctggactgaggggtcccaggccccgaggggtgcacgcctggctccccttggcacaggtgcgagtccgtttcttttcagcagaagggggaagaggtgtccgctgtgtgggctgctgactcctctgtgtgtgaggcccttcatctaagtgattgtgtattcagtttaattctcattatatttctatactgaaagaagatttttaacgaagggaaaaacaacagcaataacattcatatctctggagcagctaactcatacacgtaatgtctgcttttcgtacagaactagccaatgtaaaaacagttcacctgtaaatactttttcctttttcaccgttgtattatacatgtatatgctgggtcctttttcagaaactcttttcttacctgagagttgtcttgttttctgggctgtttttaactgaggaaaaaaaaaatgctttcctgccggggggcaggggagacggagaaacccatgtgcgtttcccatgtgaccccctcctccctgtgggtctgagccccggccccccccacctcctcctccctgtgggtccgaaccccggcccccccaccccctcctccctgtgggtccgaaccccggcccccccaccccctcctccctgtgggtccgatccccggccccccccaccccctcctccctgtgggtccgaaccccggccccccccccaccccctcctccctgtgggtccgaaccccggcccccccacccctccctcagcccaccagggtccagggagatgttcgttctcgctttaagtcaggagtcacaaatgacttttttttttcaattaaggaaaaagctccatctctacctttaacatcacccagacccccgcccctgcccgtgccccacgctgctgctaacgacagtatgatgcttactctgctactcggaaactatttttatgtaattaatgtatgctttcttgtttataaatgcctgatttaaaaagaaaa

SEQ ID NO: 34317 - DNA, 4685 bp, Homo sapiens
  source 1..4685: mol_type = unassigned DNA
ggaggaggtggagagtgaggccgaggcgtggggagcccgggaactccctcctcctgaagtaacgcgtcccgggccggctctgccgtcgttgctgccgccgggcgccccgggacgaggaggtggaggagggagagggcccgcgggcctcgcctccgccctccgccacctcgagctgcggtagcagcgactcatgagagcgcggccggaggacagatttgataatgggctgcattaaaagtaaagaaaacaaaagtccagccattaaatacagacctgaaaatactccagagcctgtcagtacaagtgtgagccattatggagcagaacccactacagtgtcaccatgtccgtcatcttcagcaaagggaacagcagttaatttcagcagtctttccatgacaccatttggaggatcctcaggggtaacgccttttggaggtgcatcttcctcattttcagtggtgccaagttcatatcctgctggtttaacaggtggtgttactatatttgtggccttatatgattatgaagctagaactacagaagacctttcatttaagaagggtgaaagatttcaaataattaacaatacggaaggagattggtgggaagcaagatcaatcgctacaggaaagaatggttatatcccgagcaattatgtagcgcctgcagattccattcaggcagaagaatggtattttggcaaaatggggagaaaagatgctgaaagattacttttgaatcctggaaatcaacgaggtattttcttagtaagagagagtgaaacaactaaaggtgcttattccctttctattcgtgattgggatgagataaggggtgacaatgtgaaacactacaaaattaggaaacttgacaatggtggatactatatcacaaccagagcacaatttgatactctgcagaaattggtgaaacactacacagaacatgctgatggtttatgccacaagttgacaactgtgtgtccaactgtgaaacctcagactcaaggtctagcaaaagatgcttgggaaatccctcgagaatctttgcgactagaggttaaactaggacaaggatgtttcggcgaagtgtggatgggaacatggaatggaaccacgaaagtagcaatcaaaacactaaaaccaggtacaatgatgccagaagctttccttcaagaagctcagataatgaaaaaattaagacatgataaacttgttccactatatgctgttgtttctgaagaaccaatttacattgtcactgaatttatgtcaaaaggaagcttattagatttccttaaggaaggagatggaaagtatttgaagcttccacagctggttgatatggctgctcagattgctgatggtatggcatatattgaaagaatgaactatattcaccgagatcttcgggctgctaatattcttgtaggagaaaatcttgtgtgcaaaatagcagactttggtttagcaaggttaattgaagacaatgaatacacagcaagacaaggtgcaaaatttccaatcaaatggacagctcctgaagctgcactgtatggtcggtttacaataaagtctgatgtctggtcatttggaattctgcaaacagaactagtaacaaagggccgagtgccatatccaggtatggtgaaccgtgaagtattagaacaagtggagcgaggatacaggatgccgtgccctcagggctgtccagaatccctccatgaattgatgaatctgtgttggaagaaggaccctgatgaaagaccaacatttgaatatattcagtccttcttggaagactacttcactgctacagagccacagtaccagccaggagaaaatttataattcaagtagcctattttatatgcacaaatctgccaaaatataaagaacttgtgtagattttctacaggaatcaaaagaagaaaatcttctttactctgcatgtttttaatggtaaactggaatcccagatatggttgcacaaaaccacttttttttccccaagtattaaactctaatgtaccaatgatgaatttatcagcgtatttcagggtccaaacaaaatagagctaagatactgatgacagtgtgggtgacagcatggtaatgaaggacagtgaggctcctgcttatttataaatcatttcctttctttttttccccaaagtcagaattgctcaaagaaaattatttattgttacagataaaacttgagagataaaaagctataccataataaaatctaaaattaaggaatatcatgggaccaaataattccattccagttttttaaagtttcttgcatttattattctcaaaagttttttctaagttaaacagtcagtatgcaatcttaatatatgctttcttttgcatggacatgggccaggtttttcaaaaggaatataaacaggatctcaaacttgattaaatgttagaccacagaagtggaatttgaaagtataatgcagtacattaatattcatgttcatggaactgaaagaataagaactttttcacttcagtccttttctgaagagtttgacttagaataatgaaggtaactagaaagtgagttaatcttgtatgaggttgcattgattttttaaggcaatatataattgaaactactgtccaatcaaaggggaaatgttttgatctttagatagcatgcaaagtaagacccagcattttaaaagccctttttaaaaactagacttcgtactgtgagtattgcttatatgtccttatggggatgggtgccacaaatagaaaatatgaccagatcagggacttgaatgcacttttgctcatggtgaatatagatgaacagagaggaaaatgtatttaaaagaaatacgagaaaagaaagtgaaagttttacaagttagagggatggaaggtaatgtttaatgttgatgtcatggagtgacagaatggctttgctggcactcagagctcctcacttagctatattctgagactttgaagagttataaagtataactataaaactaatttttcttacacactaaatgggtatttgttcaaaataatgaagttatggcttcacattcattgcagtgggatatggtttttatgtaaaacatttttagaactccagttttcaaatcatgtttgaatctacattcacttttttttgttttcttttttgagacggagtctcgctctgtcgcccaggctggagtgcagtggcgcgatctcggctcactgcaagctctgcctcccaggttcacaccattctcctgcctcagcctcccgagtagctgggactacaggtgcccaccaccacgcctggctagttttttgtatttttagtagagacgcagtttcaccgtgttagccaggatagtctcgatctcctgaccttgtgatctgcccgcctcggcctcccaaagtgctgggattacaggcgtgagccaccgcgcccagcctacattcacttctaaagtctatgtaatggtggtcattttttcccttttagaatacattaaatggttgatttggggaggaaaacttattctgaatattaacggtggtgaaaaggggacagtttttaccctaaagtgcaaaagtgaaacatacaaaataagactaatttttaagagtaactcagtaatttcaaaatacagatttgaatagcagcattagtggtttgagtgtctagcaaaggaaaaattgatgaataaaatgaaggtctggtgtatatgttttaaaatactctcatatagtcacactttaaattaagccttatattaggcccctctattttcaggatataattcttaactatcattatttacctgattttaatcatcagattcgaaattctgtgccatggcatatatgttcaaattcaaaccatttttaaaatgtgaagatggacttcatgcaagttggcagtggttctggtactaaaaattgtggttgttttttctgtttacgtaacctgcttagtattgacactctctaccaagagggtcttcctaagaagagtgctgtcattatttcctcttatcaacaacttgtgacatgagattttttaagggctttatgtgaactatgatattgtaatttttctaagcatattcaaaagggtgacaaaattacgtttatgtactaaatctaatcaggaaagtaaggcaggaaaagttgatggtattcattaggttttaactgaatggagcagttccttatataataacaattgtatagtagggataaaacactaacttaatgtgtattcattttaaattgttctgtatttttaaattgccaagaaaaacaactttgtaaatttggagatattttccaacagcttttcgtcttcagtgtcttaatgtggaagttaacccttaccaaaaaaggaagttggcaaaaacagccttctagcacacttttttaaatgaataatggtagcctaaacttaatatttttataaagtattgtaatattgttttgtggataattgaaataaaaagttctcattgaatgcacctattaatcgttttagttgctattcatattctcattcgttttttaaaaactgatatattctgaatttattcttccattgagaaaaaaatgttcagttacttgtaactactgagcagaatttaatcaatcctttattaaattcagaacattattgaa

SEQ ID NO: 34318 - DNA, 4767 bp, Homo sapiens
  source 1..4767: mol_type = unassigned DNA
ggaggaggtggagagtgaggccgaggcgtggggagcccgggaactccctcctcctgaagtaacgcgtcccgggccggctctgccgtcgttgctgccgccgggcgccccgggacgaggaggtggaggagggagagggcccgcgggcctcgcctccgccctccgccacctcgagctgcggtagcagcgactcatgagagcgcggccggaggacaggctgtggaagagagccaccattatcaaaatgatcacagttgcaaacattcgtgcttcaaataccagccactatgttagatttgataatgggctgcattaaaagtaaagaaaacaaaagtccagccattaaatacagacctgaaaatactccagagcctgtcagtacaagtgtgagccattatggagcagaacccactacagtgtcaccatgtccgtcatcttcagcaaagggaacagcagttaatttcagcagtctttccatgacaccatttggaggatcctcaggggtaacgccttttggaggtgcatcttcctcattttcagtggtgccaagttcatatcctgctggtttaacaggtggtgttactatatttgtggccttatatgattatgaagctagaactacagaagacctttcatttaagaagggtgaaagatttcaaataattaacaatacggaaggagattggtgggaagcaagatcaatcgctacaggaaagaatggttatatcccgagcaattatgtagcgcctgcagattccattcaggcagaagaatggtattttggcaaaatggggagaaaagatgctgaaagattacttttgaatcctggaaatcaacgaggtattttcttagtaagagagagtgaaacaactaaaggtgcttattccctttctattcgtgattgggatgagataaggggtgacaatgtgaaacactacaaaattaggaaacttgacaatggtggatactatatcacaaccagagcacaatttgatactctgcagaaattggtgaaacactacacagaacatgctgatggtttatgccacaagttgacaactgtgtgtccaactgtgaaacctcagactcaaggtctagcaaaagatgcttgggaaatccctcgagaatctttgcgactagaggttaaactaggacaaggatgtttcggcgaagtgtggatgggaacatggaatggaaccacgaaagtagcaatcaaaacactaaaaccaggtacaatgatgccagaagctttccttcaagaagctcagataatgaaaaaattaagacatgataaacttgttccactatatgctgttgtttctgaagaaccaatttacattgtcactgaatttatgtcaaaaggaagcttattagatttccttaaggaaggagatggaaagtatttgaagcttccacagctggttgatatggctgctcagattgctgatggtatggcatatattgaaagaatgaactatattcaccgagatcttcgggctgctaatattcttgtaggagaaaatcttgtgtgcaaaatagcagactttggtttagcaaggttaattgaagacaatgaatacacagcaagacaaggtgcaaaatttccaatcaaatggacagctcctgaagctgcactgtatggtcggtttacaataaagtctgatgtctggtcatttggaattctgcaaacagaactagtaacaaagggccgagtgccatatccaggtatggtgaaccgtgaagtattagaacaagtggagcgaggatacaggatgccgtgccctcagggctgtccagaatccctccatgaattgatgaatctgtgttggaagaaggaccctgatgaaagaccaacatttgaatatattcagtccttcttggaagactacttcactgctacagagccacagtaccagccaggagaaaatttataattcaagtagcctattttatatgcacaaatctgccaaaatataaagaacttgtgtagattttctacaggaatcaaaagaagaaaatcttctttactctgcatgtttttaatggtaaactggaatcccagatatggttgcacaaaaccacttttttttccccaagtattaaactctaatgtaccaatgatgaatttatcagcgtatttcagggtccaaacaaaatagagctaagatactgatgacagtgtgggtgacagcatggtaatgaaggacagtgaggctcctgcttatttataaatcatttcctttctttttttccccaaagtcagaattgctcaaagaaaattatttattgttacagataaaacttgagagataaaaagctataccataataaaatctaaaattaaggaatatcatgggaccaaataattccattccagttttttaaagtttcttgcatttattattctcaaaagttttttctaagttaaacagtcagtatgcaatcttaatatatgctttcttttgcatggacatgggccaggtttttcaaaaggaatataaacaggatctcaaacttgattaaatgttagaccacagaagtggaatttgaaagtataatgcagtacattaatattcatgttcatggaactgaaagaataagaactttttcacttcagtccttttctgaagagtttgacttagaataatgaaggtaactagaaagtgagttaatcttgtatgaggttgcattgattttttaaggcaatatataattgaaactactgtccaatcaaaggggaaatgttttgatctttagatagcatgcaaagtaagacccagcattttaaaagccctttttaaaaactagacttcgtactgtgagtattgcttatatgtccttatggggatgggtgccacaaatagaaaatatgaccagatcagggacttgaatgcacttttgctcatggtgaatatagatgaacagagaggaaaatgtatttaaaagaaatacgagaaaagaaagtgaaagttttacaagttagagggatggaaggtaatgtttaatgttgatgtcatggagtgacagaatggctttgctggcactcagagctcctcacttagctatattctgagactttgaagagttataaagtataactataaaactaatttttcttacacactaaatgggtatttgttcaaaataatgaagttatggcttcacattcattgcagtgggatatggtttttatgtaaaacatttttagaactccagttttcaaatcatgtttgaatctacattcacttttttttgttttcttttttgagacggagtctcgctctgtcgcccaggctggagtgcagtggcgcgatctcggctcactgcaagctctgcctcccaggttcacaccattctcctgcctcagcctcccgagtagctgggactacaggtgcccaccaccacgcctggctagttttttgtatttttagtagagacgcagtttcaccgtgttagccaggatagtctcgatctcctgaccttgtgatctgcccgcctcggcctcccaaagtgctgggattacaggcgtgagccaccgcgcccagcctacattcacttctaaagtctatgtaatggtggtcattttttcccttttagaatacattaaatggttgatttggggaggaaaacttattctgaatattaacggtggtgaaaaggggacagtttttaccctaaagtgcaaaagtgaaacatacaaaataagactaatttttaagagtaactcagtaatttcaaaatacagatttgaatagcagcattagtggtttgagtgtctagcaaaggaaaaattgatgaataaaatgaaggtctggtgtatatgttttaaaatactctcatatagtcacactttaaattaagccttatattaggcccctctattttcaggatataattcttaactatcattatttacctgattttaatcatcagattcgaaattctgtgccatggcatatatgttcaaattcaaaccatttttaaaatgtgaagatggacttcatgcaagttggcagtggttctggtactaaaaattgtggttgttttttctgtttacgtaacctgcttagtattgacactctctaccaagagggtcttcctaagaagagtgctgtcattatttcctcttatcaacaacttgtgacatgagattttttaagggctttatgtgaactatgatattgtaatttttctaagcatattcaaaagggtgacaaaattacgtttatgtactaaatctaatcaggaaagtaaggcaggaaaagttgatggtattcattaggttttaactgaatggagcagttccttatataataacaattgtatagtagggataaaacactaacttaatgtgtattcattttaaattgttctgtatttttaaattgccaagaaaaacaactttgtaaatttggagatattttccaacagcttttcgtcttcagtgtcttaatgtggaagttaacccttaccaaaaaaggaagttggcaaaaacagccttctagcacacttttttaaatgaataatggtagcctaaacttaatatttttataaagtattgtaatattgttttgtggataattgaaataaaaagttctcattgaatgcacctattaatcgttttagttgctattcatattctcattcgttttttaaaaactgatatattctgaatttattcttccattgagaaaaaaatgttcagttacttgtaactactgagcagaatttaatcaatcctttattaaattcagaacattattgaactca

SEQ ID NO: 34319 - DNA, 4639 bp, Homo sapiens
  source 1..4639: mol_type = unassigned DNA
ggtcgggagaagtgacacggaccggtcgcctatcctgaccacagcaaagcggcccggagcccgcggaggggacctgacgggggcgtaggcgccggaaggctgggggccccggagccgggccggcgtggcccgagttccggtgagcggacggcggcgcgcgcagatttgataatgggctgcattaaaagtaaagaaaacaaaagtccagccattaaatacagacctgaaaatactccagagcctgtcagtacaagtgtgagccattatggagcagaacccactacagtgtcaccatgtccgtcatcttcagcaaagggaacagcagttaatttcagcagtctttccatgacaccatttggaggatcctcaggggtaacgccttttggaggtgcatcttcctcattttcagtggtgccaagttcatatcctgctggtttaacaggtggtgttactatatttgtggccttatatgattatgaagctagaactacagaagacctttcatttaagaagggtgaaagatttcaaataattaacaatacggaaggagattggtgggaagcaagatcaatcgctacaggaaagaatggttatatcccgagcaattatgtagcgcctgcagattccattcaggcagaagaatggtattttggcaaaatggggagaaaagatgctgaaagattacttttgaatcctggaaatcaacgaggtattttcttagtaagagagagtgaaacaactaaaggtgcttattccctttctattcgtgattgggatgagataaggggtgacaatgtgaaacactacaaaattaggaaacttgacaatggtggatactatatcacaaccagagcacaatttgatactctgcagaaattggtgaaacactacacagaacatgctgatggtttatgccacaagttgacaactgtgtgtccaactgtgaaacctcagactcaaggtctagcaaaagatgcttgggaaatccctcgagaatctttgcgactagaggttaaactaggacaaggatgtttcggcgaagtgtggatgggaacatggaatggaaccacgaaagtagcaatcaaaacactaaaaccaggtacaatgatgccagaagctttccttcaagaagctcagataatgaaaaaattaagacatgataaacttgttccactatatgctgttgtttctgaagaaccaatttacattgtcactgaatttatgtcaaaaggaagcttattagatttccttaaggaaggagatggaaagtatttgaagcttccacagctggttgatatggctgctcagattgctgatggtatggcatatattgaaagaatgaactatattcaccgagatcttcgggctgctaatattcttgtaggagaaaatcttgtgtgcaaaatagcagactttggtttagcaaggttaattgaagacaatgaatacacagcaagacaaggtgcaaaatttccaatcaaatggacagctcctgaagctgcactgtatggtcggtttacaataaagtctgatgtctggtcatttggaattctgcaaacagaactagtaacaaagggccgagtgccatatccaggtatggtgaaccgtgaagtattagaacaagtggagcgaggatacaggatgccgtgccctcagggctgtccagaatccctccatgaattgatgaatctgtgttggaagaaggaccctgatgaaagaccaacatttgaatatattcagtccttcttggaagactacttcactgctacagagccacagtaccagccaggagaaaatttataattcaagtagcctattttatatgcacaaatctgccaaaatataaagaacttgtgtagattttctacaggaatcaaaagaagaaaatcttctttactctgcatgtttttaatggtaaactggaatcccagatatggttgcacaaaaccacttttttttccccaagtattaaactctaatgtaccaatgatgaatttatcagcgtatttcagggtccaaacaaaatagagctaagatactgatgacagtgtgggtgacagcatggtaatgaaggacagtgaggctcctgcttatttataaatcatttcctttctttttttccccaaagtcagaattgctcaaagaaaattatttattgttacagataaaacttgagagataaaaagctataccataataaaatctaaaattaaggaatatcatgggaccaaataattccattccagttttttaaagtttcttgcatttattattctcaaaagttttttctaagttaaacagtcagtatgcaatcttaatatatgctttcttttgcatggacatgggccaggtttttcaaaaggaatataaacaggatctcaaacttgattaaatgttagaccacagaagtggaatttgaaagtataatgcagtacattaatattcatgttcatggaactgaaagaataagaactttttcacttcagtccttttctgaagagtttgacttagaataatgaaggtaactagaaagtgagttaatcttgtatgaggttgcattgattttttaaggcaatatataattgaaactactgtccaatcaaaggggaaatgttttgatctttagatagcatgcaaagtaagacccagcattttaaaagccctttttaaaaactagacttcgtactgtgagtattgcttatatgtccttatggggatgggtgccacaaatagaaaatatgaccagatcagggacttgaatgcacttttgctcatggtgaatatagatgaacagagaggaaaatgtatttaaaagaaatacgagaaaagaaagtgaaagttttacaagttagagggatggaaggtaatgtttaatgttgatgtcatggagtgacagaatggctttgctggcactcagagctcctcacttagctatattctgagactttgaagagttataaagtataactataaaactaatttttcttacacactaaatgggtatttgttcaaaataatgaagttatggcttcacattcattgcagtgggatatggtttttatgtaaaacatttttagaactccagttttcaaatcatgtttgaatctacattcacttttttttgttttcttttttgagacggagtctcgctctgtcgcccaggctggagtgcagtggcgcgatctcggctcactgcaagctctgcctcccaggttcacaccattctcctgcctcagcctcccgagtagctgggactacaggtgcccaccaccacgcctggctagttttttgtatttttagtagagacgcagtttcaccgtgttagccaggatagtctcgatctcctgaccttgtgatctgcccgcctcggcctcccaaagtgctgggattacaggcgtgagccaccgcgcccagcctacattcacttctaaagtctatgtaatggtggtcattttttcccttttagaatacattaaatggttgatttggggaggaaaacttattctgaatattaacggtggtgaaaaggggacagtttttaccctaaagtgcaaaagtgaaacatacaaaataagactaatttttaagagtaactcagtaatttcaaaatacagatttgaatagcagcattagtggtttgagtgtctagcaaaggaaaaattgatgaataaaatgaaggtctggtgtatatgttttaaaatactctcatatagtcacactttaaattaagccttatattaggcccctctattttcaggatataattcttaactatcattatttacctgattttaatcatcagattcgaaattctgtgccatggcatatatgttcaaattcaaaccatttttaaaatgtgaagatggacttcatgcaagttggcagtggttctggtactaaaaattgtggttgttttttctgtttacgtaacctgcttagtattgacactctctaccaagagggtcttcctaagaagagtgctgtcattatttcctcttatcaacaacttgtgacatgagattttttaagggctttatgtgaactatgatattgtaatttttctaagcatattcaaaagggtgacaaaattacgtttatgtactaaatctaatcaggaaagtaaggcaggaaaagttgatggtattcattaggttttaactgaatggagcagttccttatataataacaattgtatagtagggataaaacactaacttaatgtgtattcattttaaattgttctgtatttttaaattgccaagaaaaacaactttgtaaatttggagatattttccaacagcttttcgtcttcagtgtcttaatgtggaagttaacccttaccaaaaaaggaagttggcaaaaacagccttctagcacacttttttaaatgaataatggtagcctaaacttaatatttttataaagtattgtaatattgttttgtggataattgaaataaaaagttctcattgaatgcacctattaatcgttttagttgctattcatattctcattcgttttttaaaaactgatatattctgaatttattcttccattgagaaaaaaatgttcagttacttgtaactactgagcagaatttaatcaatcctttattaaattcagaacattattgaactca

SEQ ID NO: 34320 - DNA, 2297 bp, Homo sapiens
  source 1..2297: mol_type = unassigned DNA
tcggccgagcccagagacagccagttcctctcccgccgcgccgggccgcgctgccgctcgctccccggccgtggcgcctccgggccagacgcgctgcagcctccagcccgcggcaagcggggcggccgcgccacccccggccccgcgccagcagcccctcgccgcgcgtccagcgttcccggccagcagcctccccatacgcaggtcctgctgggccgccccgtcgcgccccccactctgaactcaagtcaccgtggagctccgccgccccgaaactttcaccgcgagcgggaaatatgggatgtataaaatcaaaagggaaagacagcttgagtgacgatggagtagatttgaagactcaaccagtacgtaatactgaaagaactatttatgtgagagatccaacgtccaataaacagcaaaggccagttccagaatctcagcttttacctggacagaggtttcaaactaaagatccagaggaacaaggagacattgtggtagccttgtacccctatgatggcatccacccggacgacttgtctttcaagaaaggagagaagatgaaagtcctggaggagcatggagaatggtggaaagcaaagtcccttttaacaaaaaaagaaggcttcatccccagcaactatgtggccaaactcaacaccttagaaacagaagagtggtttttcaaggatataaccaggaaggacgcagaaaggcagcttttggcaccaggaaatagcgctggagctttccttattagagaaagtgaaacattaaaaggaagcttctctctgtctgtcagagactttgaccctgtgcatggtgatgttattaagcactacaaaattagaagtctggataatgggggctattacatctctccacgaatcacttttccctgtatcagcgacatgattaaacattaccaaaagcaggcagatggcttgtgcagaagattggagaaggcttgtattagtcccaagccacagaagccatgggataaagatgcctgggagatcccccgggagtccatcaagttggtgaaaaggcttggcgctgggcagtttggggaagtctggatgggttactataacaacagtaccaaggtggctgtgaaaaccctgaagccaggaactatgtctgtgcaagccttcctggaagaagccaacctcatgaagaccctgcagcatgacaagctcgtgaggctctacgctgtggtcaccagggaggagcccatttacatcatcaccgagtacatggccaagggcagtttgctggatttcctgaagagcgatgaaggtggcaaagtgctgcttccaaagctcattgacttttctgctcagattgcagagggaatggcatacatcgagcggaagaactacattcaccgggacctgcgagcagctaatgttctggtctccgagtcactcatgtgcaaaattgcagattttggccttgctagagtaattgaagataatgagtacacagcaagggaaggtgctaagttccctattaagtggacggctccagaagcaatcaactttggatgtttcactattaagtctgatgtgtggtcctttggaatcctcctatacgaaattgtcacctatgggaaaattccctacccagggagaactaatgccgacgtgatgaccgccctgtcccagggctacaggatgccccgtgtggagaactgcccagatgagctctatgacattatgaaaatgtgctggaaagaaaaggcagaagagagaccaacgtttgactacttacagagcgtcctggatgatttctacacagccacggaagggcaataccagcagcagccttagagcacagggagacccgtccatttggcaggggtggctgcctcatttagagaggaaaagtaaccatcactggttgcacttatgatttcatgtgcggggatcatctgccgtgcctggatcctgaaatagaggctaaattactcaggaagaacaccctctaaatgggaaagtattctgtactcttagatggattctccactcagttgcaacttggacttgtcctcagcagctggtaatcttgctctgcttgacaacatctgagtgcagccgtttgagaagaaaacatctattctctccaaaaatgcacccaactagctctatgtttacaaatggacataggactcaaagtttcagagaccattgcaatgaatccccaataattgcagaactaaactcatttataaagctaaaataaccggatatatacatagcatgacatttctttgtgctttggcttacttgttt

SEQ ID NO: 34321 - DNA, 550 bp, Homo sapiens
  source 1..550: mol_type = unassigned DNA
ggcagtgcttcagaattacacatcacatggggagcagcatgctcccactgtgccccagaagagtttcccggacagtgtccagagaatctgttcggaaatatgggatgtataaaatcaaaagggaaagacagcttgagtgacgatggagtagatttgaagactcaaccagtacgtaatactgaaagaactatttatgtgagagatccaacgtccaataaacagcaaaggccagttccagaatctcagcttttacctggacagaggtttcaaactaaagatccagaggaacaaggagacattgtggtagccttgtacccctatgatggcatccacccggacgacttgtctttcaagaaaggagagaagatgaaagtcctggaggagcatggagaatggtggaaagcaaagtcccttttaacaaaaaaagaaggcttcatccccagcaactatgtggccaaactcaacaccttagaaacagaagagtggtttttcaaggatataaccaggaaggacgcagaaaggcagcttttggcaccaggaaatagcgctg

SEQ ID NO: 34322 - DNA, 3020 bp, Homo sapiens
  source 1..3020: mol_type = unassigned DNA
agttcctctcccgccgcgccgggccgcgctgccgctcgctccccggccgtggcgcctccgggccagacgcgctgcagcctccagcccgcggcaagcggggcggccgcgccacccccggccccgcgccagcagcccctcgccgcgcgtccagcgttcccggccagcagcctccccatacgcaggtcctgctgggccgccccgtcgcgccccccactctgaactcaagtcaccgtggagctccgccgccccgaaactttcaccgcgagcgggaaatatgggatgtataaaatcaaaagggaaagacagcttgagtgacgatggagtagatttgaagactcaaccagttccagaatctcagcttttacctggacagaggtttcaaactaaagatccagaggaacaaggagacattgtggtagccttgtacccctatgatggcatccacccggacgacttgtctttcaagaaaggagagaagatgaaagtcctggaggagcatggagaatggtggaaagcaaagtcccttttaacaaaaaaagaaggcttcatccccagcaactatgtggccaaactcaacaccttagaaacagaagagtggtttttcaaggatataaccaggaaggacgcagaaaggcagcttttggcaccaggaaatagcgctggagctttccttattagagaaagtgaaacattaaaaggaagcttctctctgtctgtcagagactttgaccctgtgcatggtgatgttattaagcactacaaaattagaagtctggataatgggggctattacatctctccacgaatcacttttccctgtatcagcgacatgattaaacattaccaaaagcaggcagatggcttgtgcagaagattggagaaggcttgtattagtcccaagccacagaagccatgggataaagatgcctgggagatcccccgggagtccatcaagttggtgaaaaggcttggcgctgggcagtttggggaagtctggatgggttactataacaacagtaccaaggtggctgtgaaaaccctgaagccaggaactatgtctgtgcaagccttcctggaagaagccaacctcatgaagaccctgcagcatgacaagctcgtgaggctctacgctgtggtcaccagggaggagcccatttacatcatcaccgagtacatggccaagggcagtttgctggatttcctgaagagcgatgaaggtggcaaagtgctgcttccaaagctcattgacttttctgctcagattgcagagggaatggcatacatcgagcggaagaactacattcaccgggacctgcgagcagctaatgttctggtctccgagtcactcatgtgcaaaattgcagattttggccttgctagagtaattgaagataatgagtacacagcaagggaaggtgctaagttccctattaagtggacggctccagaagcaatcaactttggatgtttcactattaagtctgatgtgtggtcctttggaatcctcctatacgaaattgtcacctatgggaaaattccctacccagggagaactaatgccgacgtgatgaccgccctgtcccagggctacaggatgccccgtgtggagaactgcccagatgagctctatgacattatgaaaatgtgctggaaagaaaaggcagaagagagaccaacgtttgactacttacagagcgtcctggatgatttctacacagccacggaagggcaataccagcagcagccttagagcacagggagacccgtccatttggcaggggtggctgcctcatttagagaggaaaagtaaccatcactggttgcacttatgatttcatgtgcggggatcatctgccgtgcctggatcctgaaatagaggctaaattactcaggaagaacaccctctaaatgggaaagtattctgtactcttagatggattctccactcagttgcaacttggacttgtcctcagcagctggtaatcttgctctgcttgacaacatctgagtgcagccgtttgagaagaaaacatctattctctccaaaaatgcacccaactagctctatgtttacaaatggacataggactcaaagtttcagagaccattgcaatgaatccccaataattgcagaactaaactcatttataaagctaaaataaccggatatatacatagcatgacatttctttgtgctttggcttacttgtttaaaaaaaaaaaaaaactaatccaacctgttagattttgcaggtgaagtcagcagcttaaaaatgtctttcccagatttcaatgatttttttccccctacctcccaaaatctgagactgttaaaacatttttcttctatgaacactgctcagacctgctagacatgccataggagtggcgtgcacatctctctctcttccagcaggaggagcccgtgagcacgcacagctgccctgtctgctcacccgaaggcaccgggctcacctggacctcccaggaaagggagaagagcctcagaaactgctctgtgtttagaaggaatatttttaagagtccagctttttcatttccacaatttcctatatccagatttgttttgacaatgtagtttggaagaactaagattctaatctctgaagaaccttatagggccttctaaaacataagagtttcctttgttgcttcaaatatttgaacattatgttaaagatcaagtattaattttagttgtactctagaaagctaaagtgccacattcggggctatttttatgattcagcaatcttttctaaattgtgtagcatgtgtatgagactatttatacccaaggatatgaaggaacataagtgactacaaggctctaataagccacggtggcaggaggttcaagcggttctgttcactaaatttttctcctgtaagctttgaatggaaacttctgtatcacatgatgtgtttcacttatgctgttgtgtatatacctaatatttctatttttgattttattttaatacacctcgtccaataac

SEQ ID NO: 34323 - DNA, 1534 bp, Homo sapiens
  source 1..1534: mol_type = unassigned DNA
gacaggccactcccggccacgtctccaagcaagccggtgccccctcctcctgctgccaccgcccactgagctgcctgggctgcagacgccctggttggagcgtctggggccagatgttatagggcaagctaaaaataaccgggcaggccagccaccatcgaggaaggggcatgtgctggacgcggacacatgatccgagggaccctgctgggtggaactaagaaagtccagcagactgtgcacgctcctgtccccactcacaggcccacgcagcgaggggggcccctcttctgtgtgcgtctggaaggtcgctgcccagggaggaaatgcctttaaccggcgtggggccgggcagctgcaggaggcagatcatccgggctctgtgcctcttgctacttctcctccacgccggctctgccaagaatatctggaaacgggcattgcctgcgaggctggccgagaaatcccgtgccgaggaggcgggcgcgcccggcggcccccggcagccccgagcagaccgctgcccgccgcctccgcggacgctgccccccggcgcctgccaggccgcgcgctgtcaggcggactccgagtgcccgcggcaccggcgctgctgctacaacggatgcgcctacgcctgcctagaagctgtgccgcccccgccagtcttagactggctggtgcagccgaaacctcgatggcttggtggcaatggctggctcctggatggccctgaggaggtgttacaagcagaggcgtgcagcaccacggaggatggggccgaacccctgctctgtccctcgggctatgagtgccacatcctgagcccaggtgacgtggccgaaggtatccccaaccgtgggcagtgcgtcaagcagcgccggcaagcagatgggcgaatcctacgacacaaactttacaaagaatatccagaaggtgactcaaagaatgtggcagaacctggaaggggacaacagaagcactttcagtaaagcaacggcaagcagctaggttgcaagaacattcctctactttctgctaagccttggaaacagttgggaaaagtagtttgaccctcacagttcacattcagctcagcagagcaagaccccagagatgcttagagacaggacacctggccatcaaacccagtttggcccagcctggttgggtgactttgtgggagccacttaacagctctgggtccctgttttaccatcctgggagcaaggccctgcagctccacgagacctttaccccgggaagaagccgccacccatgaaagcatttctgaagcccctttctaagacaaggctcagcatcttgatatttttgacagattcctcccaagtctggctctgggaggtatgtacccatctcaaatgttcccaagataaattcatccttcaggaaatggaaatgaacttgcttactaatgtgtgattcctagttgtagccaccggatgtgctgaggcctaaatgttagcaggtgggaggaggccacagaacaataaaaacaaccaaataagatgccgag

SEQ ID NO: 34324 - DNA, 775 bp, Homo sapiens
  source 1..775: mol_type = unassigned DNA
aagcacctgcctggcaacatggggtccagcagcttcttggtcctcatggtgtctctcgttcttgtgaccctggtggctgtggaaggagttaaagagggtatagagaaagcaggggtttgcccagctgacaacgtacgctgcttcaagtccgatcctccccagtgtcacacagaccaggactgtctgggggaaaggaagtgttgttacctgcactgtggcttcaagtgtgtgattcctgtgaaggaactggaagaaggaggaaacaaggatgaagatgtgtcaaggccataccctgagccaggatgggaggccaagtgtccaggctcctcctctaccaggtgtcctcagaaatgatgctgggtcctttctacctctgggggtcactctcacttggcacctgcccctgagggtcctgagacttggaatatggaagaagcaatacccaaccccaccaaagaaaacctgagcttgaagtccttttccccaaaaagagggaagagtcacaaaaagtccagaccccagggacggtactttccctctctacctggtgctcctccctaatgctcatgaatggacccctcatgaatgaaaccagtgcccttataagagaccccaaagagctgccttgcccttctgcaatgtgtgatcacagctagaaggcactgtcagagaagagaaactggtcctcaccagatgctgaatctgctggtgccttgatcttggacttcccagcctctagaactgtaagaaataaatatttgctgtttataatcca

SEQ ID NO: 34325 - DNA, 1034 bp, Homo sapiens
  source 1..1034: mol_type = unassigned DNA
ctgactaagtttctctggcttccctgaggctgcaggtgttaatctggggggccctgggccctgagccggcagcagaaatatgaggacccagagccttctcctcctgggggccctcctggctgtggggagtcagctgcctgctgtctttggcaggaagaagggagagaaatcggggggctgcccgccagatgatgggccctgcctcctatcggtgcctgaccagtgcgtggaagacagccagtgtcccttgaccaggaagtgctgctacagagcttgcttccgccagtgtgtccccagggtctctgtgaagctgggcagctgcccagaggaccaactgcgctgcctcagccccatgaaccacctgtgtcacaaggactcagactgctcgggcaaaaagcgatgctgccacagcgcctgcgggcgggattgccgggatcctgccagaggtacggctcctgggtgcccagggcaggctaattctgatttaggatctgtggctctgcacctaagctggggaccaacggaaagagttcacgatgggaggcctggggccctgcccgctggacagcactatctctaccagcggtggttccagccttctgataatcactggcctgctgacacttccctgcaacccatccacccctggtttctcctcctgggagtcaaagtccatagcctgagctcggaggaaggcctctgtatcaccccagtactctgcaccactgccatacgagcttcccacccttcctaacgctttcacaccaatccgtacatgctgcttcctccaccaaaaatgcccaattcaggcagaccctgacctctccctcaggcagcccaaccatccagaatgaatattcttgcagagttttccaaacatcagtcattcacctctttcatgattttcaccatacctacaaaatagcaccatgataggttgcacgctgcctgtaccaccatttacttaatgttttctttaaatggctcacttttgtatataaataaattcatttcaaaagaaaattgatatcact

SEQ ID NO: 34326 - DNA, 1018 bp, Homo sapiens
  source 1..1018: mol_type = unassigned DNA
ctttcctctcctgactaagtttctctggcttccctgaggctgcaggtgttaatctggggggccctgggccctgagccggcagcagaaatatgaggacccagagccttctcctcctgggggccctcctggctgtggggagtcagctgcctgctgtctttggcaggaagaagggagagaaatcggggggctgcccgccagatgatgggccctgcctcctatcggtgcctgaccagtgcgtggaagacagccagtgtcccttgaccaggaagtgctgctacagagcttgcttccgccagtgtgtccccagggtctctgtgaagctgggcagctgcccagaggaccaactgcgctgcctcagccccatgaaccacctgtgtcacaaggactcagactgctcgggcaaaaagcgatgctgccacagcgcctgcgggcgggattgccgggatcctgccagaggctaattctgatttaggatctgtggctctgcacctaagctggggaccaacggaaagagttcacgatgggaggcctggggccctgcccgctggacagcactatctctaccagcggtggttccagccttctgataatcactggcctgctgacacttccctgcaacccatccacccctggtttctcctcctgggagtcaaagtccatagcctgagctcggaggaaggcctctgtatcaccccagtactctgcaccactgccatacgagcttcccacccttcctaacgctttcacaccaatccgtacatgctgcttcctccaccaaaaatgcccaattcaggcagaccctgacctctccctcaggcagcccaaccatccagaatgaatattcttgcagagttttccaaacatcagtcattcacctctttcatgattttcaccatacctacaaaatagcaccatgataggttgcacgctgcctgtaccaccatttacttaatgttttctttaaatggctcacttttgtatataaataaattcatttcaaaagaaaattgatatcact

SEQ ID NO: 34327 - DNA, 2028 bp, Homo sapiens
  source 1..2028: mol_type = unassigned DNA
cctcctcccctctgccctgtgctgaccagggcctgggagcccccgcacggttcagacagaggggccaggctgaagctggagaggaaccagcgtcacacagacggcctctgagaacttggagaccccgttacccacccagcaggggtgtcaggacaagcatctgctgcaggcttcagcctcaggggcaaaagggagccccggggtcctggtgggggcaccgaccacaggcccggagggtggatgcctgcaggaagctgggctctgtggagcccgaggaggggctggtggccacaccccccggccccctggctcggcggccctcatgcccgccctacgtccactcctgccgctcctgctcctcctccggctgacctcgggggctggcttgctgccagggctggggagccacccgggcgtgtgccccaaccagctcagccccaacctgtgggtggacgcccagagcacctgtgagcgcgagtgtagcagggaccaggactgtgcggctgctgagaagtgctgcatcaacgtgtgtggactgcacagctgcgtggcagcacgcttccccggcagcccagctgcgccgacgacagcggcctcctgcgagggctttgtgtgcccacagcagggctcggactgcgacatctgggacgggcagcccgtgtgccgctgccgcgaccgctgtgagaaggagcccagcttcacctgcgcctcggacggcctcacctactacaaccgctgctatatggacgccgaggcctgcctgcggggcctgcacctccacatcgtgccctgcaagcacgtgctcagctggccgcccagcagcccggggccgccggagaccactgcccgccccacacctggggccgcgcccgtgcctcctgccctgtacagcagcccctccccacaggcggtgcaggttgggggtacggccagcctccactgcgacgtcagcggccgcccgccgcctgctgtgacctgggagaagcagagtcaccagcgagagaacctgatcatgcgccctgatcagatgtatggcaacgtggtggtcaccagcatcgggcagctggtgctctacaacgcgcggcccgaagacgccggcctgtacacctgcaccgcgcgcaacgctgctgggctgctgcgggctgacttcccactctctgtggtccagcgagagccggccagggacgcagcccccagcatcccagccccggccgagtgcctgccggatgtgcaggcctgcacgggccccacttccccacaccttgtcctctggcactacgacccgcagcggggcggctgcatgaccttcccggcccgtggctgtgatggggcggcccgcggctttgagacctacgaggcatgccagcaggcctgtgcccgcggccccggcgacgcctgcgtgctgcctgccgtgcagggcccctgccggggctgggagccgcgctgggcctacagcccgctgctgcagcagtgccatcccttcgtgtacggtggctgcgagggcaacggcaacaacttccacagccgcgagagctgcgaggatgcctgccccgtgccgcgcacaccgccctgccgcgcctgccgcctccggagcaagctggcgctgagcctgtgccgcagcgacttcgccatcgtggggcggctcacggaggtgctggaggagcccgaggccgccggcggcatcgcccgcgtggcgctcgaggacgtgctcaaggatgacaagatgggcctcaagttcttgggcaccaagtacctggaggtgacgctgagtggcatggactgggcctgcccctgccccaacatgacggcgggcgacgggccgctggtcatcatgggtgaggtgcgcgatggcgtggccgtgctggacgccggcagctacgtccgcgccgccagcgagaagcgcgtcaagaagatcttggagctgctggagaagcaggcctgcgagctgctcaaccgcttccaggactagcccccgcaggggcctgcgccaccccgtcctggtgaataaacgcactccctgtgcctcag

SEQ ID NO: 34328 - DNA, 3588 bp, Homo sapiens
  source 1..3588: mol_type = unassigned DNA
tggagccagctccccgcaaagcacatgccatttctggcccttgaaggggttaaaggcctcctggagtcaaaaacaagcaggtgtcccaccgtgccagatacgctgcctaaactgcttccagcttctttttttttttttccccccttctgcaataagtctgtgatcagccacgggacagaggcgccagcagcctgcctgtgacaggcatcaggttagctggctcccactcgggtggcgcgcccaggatataaatccgggcgcgggcccctgctgtggctcctctccctgcacactcaggagagggagcttccttctaaagacctttcttttatctgaagccgcacagcccggcaggctgtgctgacttggtggaggcagcagcggcagagcagcctgagcagcagcctgagcaggaaacctgctggggtggggagggcaggtgtctgcagcccctgagaagaaggccctggtgggccccagaccctggcatcgtttcaggggaggtctctagccgccccagcctgcaccatgtgggccccaaggtgtcgccggttctggtctcgctgggagcaggtggcagcgctgctgctgctgctgctactgctcggggtgcccccgcgaagcctggcgctgccgcccatccgctattcccacgccggcatctgccccaacgacatgaatcccaacctctgggtggacgcacagagcacctgcaggcgggagtgtgagacggaccaggagtgtgagacctatgagaagtgctgccccaacgtatgtgggaccaagagctgcgtggcggcccgctacatggacgtgaaagggaagaagggcccagtgggcatgcccaaggaggccacatgtgaccacttcatgtgtctgcagcagggctctgagtgtgacatctgggatggccagcccgtgtgtaagtgcaaagaccgctgtgagaaggagcccagctttacctgcgcctcggacggcctcacctactataaccgctgctacatggatgccgaggcctgctccaaaggcatcacactggccgttgtaacctgccgctatcacttcacctggcccaacaccagccccccaccacctgagaccaccatgcaccccaccacagcctccccagagacccctgagctggacatggcggcccctgcgctgctcaacaaccctgtgcaccagtcggtcaccatgggtgagacagtgagcttcctctgtgatgtggtgggccggccccggcctgagatcacctgggagaagcagttggaggatcgggagaatgtggtcatgcggcccaaccatgtgcgtggcaacgtggtggtcaccaacattgcccagctggtcatctataacgcccagctgcaggatgctgggatctacacctgcacggcccggaacgtggctggggtcctgagggctgatttcccgctgtcggtggtcaggggtcatcaggctgcagccacctcagagagcagccccaatggcacggctttcccggcggccgagtgcctgaagcccccagacagtgaggactgtggcgaagagcagacccgctggcacttcgatgcccaggccaacaactgcctgaccttcaccttcggccactgccaccgtaacctcaaccactttgagacctatgaggcctgcatgctggcctgcatgagcgggccgctggccgcgtgcagcctgcccgccctgcaggggccctgcaaagcctacgcgcctcgctgggcttacaacagccagacgggccagtgccagtcctttgtctatggtggctgcgagggcaatggcaacaactttgagagccgtgaggcctgtgaggagtcgtgccccttccccagggggaaccagcgctgtcgggcctgcaagcctcggcagaagctcgttaccagcttctgtcgcagcgactttgtcatcctgggccgagtctctgagctgaccgaggagcctgactcgggccgcgccctggtgactgtggatgaggtcctaaaggatgagaaaatgggcctcaagttcctgggccaggagccattggaggtcactctgcttcacgtggactgggcatgcccctgccccaacgtgaccgtgagcgagatgccgctcatcatcatgggggaggtggacggcggcatggccatgctgcgccccgatagctttgtgggcgcatcgagtgcccgccgggtcaggaagcttcgtgaggtcatgcacaagaagacctgtgacgtcctcaaggagtttcttggcttgcactgaagccccccacccctccctgccccctccctggccttcttccacctatccaccccaatgcctctcagcaaactgggcgaggtcagattagacaggcttgggacagcagggaaacatcaaccgacgtgtcacagaaaaagccacagaaggtctcagatcagcatctattctttgggttcaataaggggttcatatcttttttagctgagggggacaagaggagaagtcagtggacacatggaagttactcgtgaccaccagcttgctcagatattctcctcctcccctcactggccccacacccctggctctcccagtcaccctcccctagccagtctcccagcaagggtttaagagatggccgctgtgtgctggtcacaggaagtgttgaatggattggcttgcaaagggggtaggtggggagagataggagggcccagggactcatgggacacctttcccacagcctcctcgattgctgtgagcagaggccactcggagttaggggcatgggcaatagcaagctggcggcagagtccagcccagcatatgacttgccctgaatggaagctgctgaaacgggtgcctttgggtggtggtcggcttgcctctgaggccaccacggcaccagcagaatacgtatttcttctccttggctgcactggtttgtcgatctagttcagttcaactcagtggatgttctctgaatgcttactgggtgccaggaccacagagagatgttagtcactgcccagttcttagagccccaacacagataccctcatcccagggcccccagacacacccctccgctggactcacaactgtctggagtttctgtctgatggatggtgtgctttcatatgccactggcttccttggacatagatcagacaaaagccccgggatctgtttggtagcaggagaaatgaaggaagatgaaaaagcaggcagggaagggggtagtaaaggactgagagaggagggaggtggctggagaaggaaaaggaacattgctcgatgctcccatctggtggcggcctcaggaacccacgggaacctggaaggaggctctttgtgagacctgggcaaaggatggggcagctcgtcgatgatttttttgtgtttccaggcttcctgtgtgatcctggccctccggccgctagagagaggattgggaaaccccactgtcagctctgcatctgcccccactaccctcctctgccctattctgtccctgcccctccaagctgaagaaggtccttgtggggcgtcctcatttcttcctcaaatataaggaggaagataccaattaaaagctcatagtatcaa

SEQ ID NO: 34329 - DNA, 849 bp, Homo sapiens
  source 1..849: mol_type = unassigned DNA
atggacgtgaaagggaagaagggcccagtgggcatgcccaaggaggccacatgtgaccacttcatgtgtctgcagcagggctctgagtgtgacatctgggatggccagcccgtgtgtaagtgcaaagaccgctgtgagaaggagcccagctttacctgcgcccaggccaacaactgcctgaccttcaccttcggccactgccaccgtaacctcaaccactttgagacctatgaggcctgcatgctggcctgcatgagcgggccgctggccgcgtgcagcctgcccgccctgcaggggccctgcaaagcctacgcgcctcgctgggcttacaacagccagacgggccagtgccagtcctttgtctatggtggctgcgagggcaatggcaacaactttgagagccgtgaggcctgtgaggagtcgtgccccttccccagggggaaccagcgctgtcgggcctgcaagcctcggcagaagctcgttaccagcttctgtcgcagcgactttgtcatcctgggccgagtctctgagctgaccgaggagcctgactcgggccgcgccctggtgactgtggatgaggtcctaaaggatgagaaaatgggcctcaagttcctgggccaggagccattggaggtcactctgcttcacgtggactgggcatgcccctgccccaacgtgaccgtgagcgagatgccgctcatcatcatgggggaggtggacggcggcatggccatgctgcgccccgatagctttgtgggcgcatcgagtgcccgccgggtcaggaagcttcgtgaggtcatgcacaagaagacctgtgacgtcctcaaggagtttcttggcttgcactga

SEQ ID NO: 34330 - DNA, 4790 bp, Homo sapiens
  source 1..4790: mol_type = unassigned DNA
gcggccgcggcgcggcgggaccatggagctcagagcgcagccccggcgccggcggcgggaccgcggaccgttttagttttgattgctgttaactactactgataactgagccaaagtggtgatgctacttgaggggaatttctgcaacccatagtcaacgattacatgattgtgaaccatgcctttagtgaagaggaacattgagccccggcacttgtgccggggagctctgcctgaagggattaccagcgaacttgaatgtgtaaccaatagtactcttgccgctatcatacgccagctgagcagtctgagcaaacatgctgaagacatatttggtgagttgtttaatgaggctaacaacttctacatcagagcaaattctcttcaagacagaattgatcgccttgctgtcaaagtcacccagctggattcaacagtggaagaggtctcactacaggatatcaacatgaaaaaagctttcaaaagttccacagtccaagaccagcaagtggtttcaaagaacagcattcctaatcctgttgctgatatttacaaccagagtgataagccaccgcctctgaacatcctgacaccatacagagatgacaagaaggatgggctgaagttctatactgatccttcctatttctttgacctctggaaagaaaaaatgctacaggacacagaagacaaaaggaaagagaaaaggcgtcaaaaggagcaaaagcgtatagatggcaccacccgtgaggtgaaaaaggttagaaaagccagaaacaggcgccaggagtggaatatgatggcatatgacaaagagcttagacccgacaacaggttgtctcagagtgtgtaccatggagcgtcttccgagggatccctgtccccagatactaggtcacatgcatcggacgttacggattactcttacccggctactcccaaccattctctgcacccccagcctgtgaccccttcctatgcagctggtgacgtgccaccacacgggcctgcaagccaggctgcggagcatgagtaccggcccccatctgcctcggcgaggcacatggccctcaacagacctcagcagccgccccccccgcctccccctcaggccccagaggggtcccaggcctctgcaccgatggctccagcagactacgggatgctcccagcgcagataattgagtattacaacccatccggaccacctcctccgccacctcctcctgtgattccctcagcacaaactgccttcgtcagccctctccagatgcccatgcagcccccgttccctgcatcagccagctccacgcacgcagctcctcctcacccaccctccaccgggctcctggtcacagccccgccacccccgggcccaccacctcccccgccaggccctcctggtcccgggtcttctctttcgtcctccccaatgcatggccccccagtagctgaggcgaagcggcaagagcctgcacagccaccaatcagtgatgctcgaagcgacctcctcgctgctattcgaatgggaattcaactgaaaaaggtgcaggagcagcgggagcaggaggccaagcgggagccagtggggaatgacgtggccacgatcctgtcccggcgcattgccgtggagtacagcgactctgacgacgactcagagttcgacgagaacgactggtccgactgagcaaaggccggcggagaggccgcgtgtgggagcgtgttgaagattttaagtggtctctacacccaaatagtggtattctaatcccgtagcatagcaccttttgtataaacaatgtgatattgcttctgcacatccaaaaattctgggtcttttcagtatttactgtgtaatacttaagtgccactaaacatagcaaattgtgctgcacatgaggaaataggctgtcactatcacattgtcctgaaaacagcatctgctttcctcttggccatgagagtatttagtgcagtttgggtttactcttactgatcaatataactctgcagacttgctgtgtgtttgtgaagctgcctggtgttaggtctctgcaagactaatgactatgtcagagtgatgtcttccaaccagtaagtgatattgtttcaccgctttggtttttccttttgtttttttaaaggatgtgtttctgaataagttggttttagagggaaaggttcaacaaacagggagaatccagtgtttctgctttcagtttcttggcttggtagcctctgagtgaatctgatgctctgctgaataatttcattacctctgcacatgcctgtcaaatatgaaattggaagggcccttttcaggctgggttccctgtgggcatttgcttagtaaatgcctgttgatggtttttgcaagagaattcagcagctcaacagtaatgaaagtgaagaacagagtccattttccttcctggggccattggggatgacactcaagatacttgccagtctctccagtgtgggcaccagccggccagaacagatgcgagcagtccatgactctgggagctacaccgctgagctgggcagagctgcggcacagggcctgggctgcaaaggagccctgctcctttagtttcctgacacctgtgtcctgagtgagccgcaggagttcttagctcctcagcgagcaacagagagcactttagatggcacctttcaccacttggtcagaattttaaaagcttaggtttaggtgaaagtagatattgacagctattcacctttcacggtgctggggccagattagggatcactcccgtgaggagggccttcaccctgttctagaagcacatggttgtcctcctgttgttggcacattaaatgataaaaagcacctcatgagattcccttgatcagccctgcagctgtagtacagtgctgtgccctcacctccacccttcctgttgttcccacgtgggcaataccagggacccatggggaaactcaagaatgacagcttctatattttgtaattctggatgaaagataactgtgttgaacaaacaggtgctccaggctttgattatagatacgacttcaaaaatatgctaagacgcttgacttattaaggactttaacctactcaacagtatttcatatccattgtggttagttactcagttatgttgagaagaatctggagctaaaagcagagatgtttgaggtgacggtaggaatgtgagcaggatggtgatgggggtttttgttaaaatgcatctgagcaagtcagccagccccgaagtcccctcagtgtgtgtgtctcgagtggctacctgttgggcttgtgggcagtgattgtacagagcctgtccattgggtgcagtcatgtagatctgaagccctgaaaagcctcatgtctgcatcccctttccaaggctgcttccctggtgtgtctgttctctcctctgtcccaggtgctgggagcgtcctcttcagcgtcttttcctagagctggtcaccactaggctgtcactataaattccttgaatataagtaacagttattaatgaacttctaaatttctaatttctctctctctctcttttttttttttttgttgttgttaaaaagggcctactacattggcgctattcttaggacttctgcaacttttaaagtcttacttgtctttcttgttgcttttgtattaggagttccccgtgtgggtctagaactcccctttggtaatgcttctttgtttttttatggcccttctgttctcaggatggagagaacacagaagctactatccatgtcaggatttattctatttatatcttattacaataaaattagtggcactttattcataaatattcatgagcctgttaattgttagttgtcttcctgtagctgaatcaacaagttattttcaactcaattttatgacttgcgaaaaagcttttgccctgttgtgtaccataacatttaaaagaatggaaaatgactgaaatccaatttagattatttttagagtatttttccagcaaattcaatttattctgaaatttaaatccagatcttttctaatatggtattacaatgaaaagaataaagagaagatttgaattttcagtttcattttcaaaaactatttaccaaaacaaatggagaagaaacatccaaaagcacatttcatttctccaaactttgtgttttaaattatagttataaattgtaaggtaattttaaattgtccctcgtattatttctccacgtctgttttagtttaatgtctcctaagcttttctctcatagcgtagacctagggaagggatgggaagattgcccagtccccgatggctgcgcacacaggaggcggcggagcacaaggcaagtgagtttgcactgtcagccccagaccgtaagcttggctacactgatgtttttctttactaaggatactattcaaaaattaacattttcatctcagtaagtttttagaacatcaaaatgttttctgagctccaagtggctaggttgtaaaagttttataataatttgcaattaaaatacatgatacatattaatccattaaagactagtgggaatgtatcagccagagtagcaagtaatttttgttttataaatcatagtatctgtcatcttgcagtattaccaatgctgttgtaaattgaatttaaagtggtattaaaaaaaactgttaaacaatttttatctgtttgtatatcttactatagattatgtacaagtaacatctaaataaaattacacttttaaccctaagaggttttgcttattaataa

SEQ ID NO: 34331 - DNA, 4805 bp, Homo sapiens
  source 1..4805: mol_type = unassigned DNA
gtcgctcgcgccgctgcgtgcggtgtggtgcgaggcgggtgcgccgggcggccgcggcgcggcgggaccatggagctcagagcgcagccccggcgccggcggcgggaccgcggaccgttttagttttgattgctgttaactactactgataactgagccaaagtggtgatgctacttgaggggaatttctgcaacccatagtcaacgattacatgattgtgaaccatgcctttagtgaagaggaacattgagccccggcacttgtgccggggagctctgcctgaagggattaccagcgaacttgaatgtgtaaccaatagtactcttgccgctatcatacgccagctgagcagtctgagcaaacatgctgaagacatatttggtgagttgtttaatgaggctaacaacttctacatcagagcaaattctcttcaagacagaattgatcgccttgctgtcaaagtcacccagctggattcaacagtggaagaggtctcactacaggatatcaacatgaaaaaagctttcaaaagttccacagtccaagaccagcaagtggtttcaaagaacagcattcctaatcctgttgctgatatttacaaccagagtgataagccaccgcctctgaacatcctgacaccatacagagatgacaagaaggatgggctgaagttctatactgatccttcctatttctttgacctctggaaagaaaaaatgctacaggacacagaagacaaaaggaaagagaaaaggcgtcaaaagagagagaaacacaagctgaaccctaacagaaaccagcaagtaaatgtgagaaaagtcagaacaagaaaagaagagtgggagagaaggaaaatgggcattgagtttatgagtgacgcaaagaaactggagcaggcagggagcgccaaagaggacagagtgcccagcgggtcacatgcatcggacgttacggattactcttacccggctactcccaaccattctctgcacccccagcctgtgaccccttcctatgcagctggtgacgtgccaccacacgggcctgcaagccaggctgcggagcatgagtaccggcccccatctgcctcggcgaggcacatggccctcaacagacctcagcagccgccccccccgcctccccctcaggccccagaggggtcccaggcctctgcaccgatggctccagcagactacgggatgctcccagcgcagataattgagtattacaacccatccggaccacctcctccgccacctcctcctgtgattccctcagcacaaactgccttcgtcagccctctccagatgcccatgcagcccccgttccctgcatcagccagctccacgcacgcagctcctcctcacccaccctccaccgggctcctggtcacagccccgccacccccgggcccaccacctcccccgccaggccctcctggtcccgggtcttctctttcgtcctccccaatgcatggccccccagtagctgaggcgaagcggcaagagcctgcacagccaccaatcagtgatgctcgaagcgacctcctcgctgctattcgaatgggaattcaactgaaaaaggtgcaggagcagcgggagcaggaggccaagcgggagccagtggggaatgacgtggccacgatcctgtcccggcgcattgccgtggagtacagcgactctgacgacgactcagagttcgacgagaacgactggtccgactgagcaaaggccggcggagaggccgcgtgtgggagcgtgttgaagattttaagtggtctctacacccaaatagtggtattctaatcccgtagcatagcaccttttgtataaacaatgtgatattgcttctgcacatccaaaaattctgggtcttttcagtatttactgtgtaatacttaagtgccactaaacatagcaaattgtgctgcacatgaggaaataggctgtcactatcacattgtcctgaaaacagcatctgctttcctcttggccatgagagtatttagtgcagtttgggtttactcttactgatcaatataactctgcagacttgctgtgtgtttgtgaagctgcctggtgttaggtctctgcaagactaatgactatgtcagagtgatgtcttccaaccagtaagtgatattgtttcaccgctttggtttttccttttgtttttttaaaggatgtgtttctgaataagttggttttagagggaaaggttcaacaaacagggagaatccagtgtttctgctttcagtttcttggcttggtagcctctgagtgaatctgatgctctgctgaataatttcattacctctgcacatgcctgtcaaatatgaaattggaagggcccttttcaggctgggttccctgtgggcatttgcttagtaaatgcctgttgatggtttttgcaagagaattcagcagctcaacagtaatgaaagtgaagaacagagtccattttccttcctggggccattggggatgacactcaagatacttgccagtctctccagtgtgggcaccagccggccagaacagatgcgagcagtccatgactctgggagctacaccgctgagctgggcagagctgcggcacagggcctgggctgcaaaggagccctgctcctttagtttcctgacacctgtgtcctgagtgagccgcaggagttcttagctcctcagcgagcaacagagagcactttagatggcacctttcaccacttggtcagaattttaaaagcttaggtttaggtgaaagtagatattgacagctattcacctttcacggtgctggggccagattagggatcactcccgtgaggagggccttcaccctgttctagaagcacatggttgtcctcctgttgttggcacattaaatgataaaaagcacctcatgagattcccttgatcagccctgcagctgtagtacagtgctgtgccctcacctccacccttcctgttgttcccacgtgggcaataccagggacccatggggaaactcaagaatgacagcttctatattttgtaattctggatgaaagataactgtgttgaacaaacaggtgctccaggctttgattatagatacgacttcaaaaatatgctaagacgcttgacttattaaggactttaacctactcaacagtatttcatatccattgtggttagttactcagttatgttgagaagaatctggagctaaaagcagagatgtttgaggtgacggtaggaatgtgagcaggatggtgatgggggtttttgttaaaatgcatctgagcaagtcagccagccccgaagtcccctcagtgtgtgtgtctcgagtggctacctgttgggcttgtgggcagtgattgtacagagcctgtccattgggtgcagtcatgtagatctgaagccctgaaaagcctcatgtctgcatcccctttccaaggctgcttccctggtgtgtctgttctctcctctgtcccaggtgctgggagcgtcctcttcagcgtcttttcctagagctggtcaccactaggctgtcactataaattccttgaatataagtaacagttattaatgaacttctaaatttctaatttctctctctctctcttttttttttttttgttgttgttaaaaagggcctactacattggcgctattcttaggacttctgcaacttttaaagtcttacttgtctttcttgttgcttttgtattaggagttccccgtgtgggtctagaactcccctttggtaatgcttctttgtttttttatggcccttctgttctcaggatggagagaacacagaagctactatccatgtcaggatttattctatttatatcttattacaataaaattagtggcactttattcataaatattcatgagcctgttaattgttagttgtcttcctgtagctgaatcaacaagttattttcaactcaattttatgacttgcgaaaaagcttttgccctgttgtgtaccataacatttaaaagaatggaaaatgactgaaatccaatttagattatttttagagtatttttccagcaaattcaatttattctgaaatttaaatccagatcttttctaatatggtattacaatgaaaagaataaagagaagatttgaattttcagtttcattttcaaaaactatttaccaaaacaaatggagaagaaacatccaaaagcacatttcatttctccaaactttgtgttttaaattatagttataaattgtaaggtaattttaaattgtccctcgtattatttctccacgtctgttttagtttaatgtctcctaagcttttctctcatagcgtagacctagggaagggatgggaagattgcccagtccccgatggctgcgcacacaggaggcggcggagcacaaggcaagtgagtttgcactgtcagccccagaccgtaagcttggctacactgatgtttttctttactaaggatactattcaaaaattaacattttcatctcagtaagtttttagaacatcaaaatgttttctgagctccaagtggctaggttgtaaaagttttataataatttgcaattaaaatacatgatacatattaatccattaaagactagtgggaatgtatcagccagagtagcaagtaatttttgttttataaatcatagtatctgtcatcttgcagtattaccaatgctgttgtaaattgaatttaaagtggtattaaaaaaaactgttaaacaatttttatctgtttgtatatcttactatagattatgtacaagtaacatctaaataaaattacacttttaaccc

SEQ ID NO: 34332 - DNA, 2858 bp, Homo sapiens
  source 1..2858: mol_type = unassigned DNA
tatttcatctccccaacgcatttgtgacattcttaagggcgtgaaccatgtactcaatagggccctgatgatagaaaagaaaatcagcttggtccctgttctcaagttcatagtttagtgtgggagactaatacaataactcgccgattcaacagatatttttccaacgtccgtatgtattgggtggaaaaggtgaggcaagagttgtatttcccagactcctgaacaggttgcgagatgattgactcctgagggagaccttctcaccttttcattggttgtcgctggccctctcgtctatcacccaaccaaccccgaatgcctcttgtaagccccacctccggcagccagccaatcagaagtgccgggggccagggtgctgctggggcactgacgcggtttcgattctagcgaaaaatgatttggctcggactgtcccgtgacaggcggtgcgaggaggccaggcccgcgcccgccgagccctagggccgctgctgccgacagccatggaggacgagcagcctgacagcctggagggctgggtgccggtccgggagggcctcttcgccgagcccgagaggcaccggctgcgcttcctggtggcctggaacggcgcggagggcaagttcgctgtgacttgtcacgaccgtaccgcgcagcagcggcggctgcgcgagggggcccggttggggcccgagcccgagcccaagcctgaggccgccgtctccccgtccagctgggccggcctgctctcggccgcggggctccgcggcgcgcaccggcagttggcggcgctgtggccgcctctggagcgctgcttcccgcggctgccgccggagctggacgtgggcggcggcggggcctggggtctggggctcgggctgtgggcgctgctgtggccgacgcgcgcgggtcccggcgaggcggcgctgcaggagctgtgcgggcagctggaacgctatctgggcgcggcggccgacggctgcggcggcgccacagtgcgcgacgcactcttcccggctgagggcggcgcggccgactgcgaaagcccgcgcgagttccgggagcgggccttgcgcgcgcggtgggtcgaggcggacgcgcggctgcgccaggttattcaaggacacggaaaagccaacaccatggtagcattaatgaacgtttaccaagaggaagatgaagcataccaggaattggttaccgtggcaaccatgttcttccagtacttattgcagccatttagggctatgcgagaagttgcaactttatgtaagcttgatattttgaagtctttggatgaggatgacctaggtcctagaagggtagttgccctggagaaagaagctgaagaatggaccagacgggctgaagaagctgtcgtctctattcaggatatcacagtgaattattttaaggagacagtaaaagcattagcaggaatgcagaaagaaatggaacaggatgcgaagagatttggtcaggctgcctgggccacagcaattcccaggttggaaaaacttcagctaatgctagctcgagagactctgcaactcatgagagcgaaagagttgtgtttaaatcacaaaagagctgaaattcagggaaagatggaagatcttccagaacaagaaaaaaatacaaatgttgtagatgaattagaaatacaattttatgaaattcaattagaactatatgaagttaaatttgagatattaaaaaacgaagaaatactgcttactacacagttggactctcttaaaagacttataaaagaaaaacaagatgaagttgtctattacgatccatgtgaaaatccagaggaacttaaagtcattgactgtgtggtggggctgcaggatgataagaatttggaagtgaaagaactcagaaggcagtgccagcagctggagtctaaacggggcaggatctgtgccaaaagagcctctctccggagtagaaaggatcagtgcaaagaaaatcatcggttcagattgcaacaggctgaagaaagcataagatactctcgtcagcatcacagtattcagatgaaaagagacaagataaaagaagaggagcaaaagaaaaaagaatggatcaaccaagaacgtcaaaaaacactccaacgattgagatcatttaaagataaacgcctagctcaatctgtccgaaacacctctggctcagaacctgtggctccaaacctgccaagtgatctttcccagcagatgtgcttgccagcttcccacgcggtgtcagtaattcacccgtcctctaggaaaactagaggtgttcccctatcggaagctggtaatgtgaaaagccccaagtgtcaaaactgtcatggaaatatccctgtccaggtttttgttccagttggtgatcaaacacattccaaatccagtgaggaattgtcactgccaccacctcctcctcctccaccaccaccaccgccgccaccgccgcccccaccccctcctctccgtgctctgtcctcatcctctcaagctgcaactcatcagaacttaggcttccgggctccagtgaaagatgaccagccacgtcctctagtgtgcgaatcacctgctgagcgaccacgtgactccttggaaagtttttcatgtccaggatctatggatgaagtgttggcctccttaaggcatggcagagcgcaaggggtcaaactgaagaaagttcaccctgatcttggcccaaaccccagcagcaaaccaaccagcaacagacgcaccagtgaccttgagaggagcatcaaggctgcgctccagagaatcaagagggtgtctgctgactctgaggaggacagtgatgagcaggaccctggccagtgggatggttag

SEQ ID NO: 34333 - DNA, 3852 bp, Homo sapiens
  source 1..3852: mol_type = unassigned DNA
ctagcgaaaaatgatttggctcggactgtcccgtgacaggcggtgcgaggaggccaggcccgcgcccgccgagccctagggccgctgctgccgacagccatggaggacgagcagcctgacagcctggagggctgggtgccggtccgggagggcctcttcgccgagcccgagaggcaccggctgcgcttcctggtggcctggaacggcgcggagggcaagttcgctgtgacttgtcacgaccgtaccgcgcagcagcggcggctgcgcgagggggcccggttggggcccgagcccgagcccaagcctgaggccgccgtctccccgtccagctgggccggcctgctctcggccgcggggctccgcggcgcgcaccggcagttggcggcgctgtggccgcctctggagcgctgcttcccgcggctgccgccggagctggacgtgggcggcggcggggcctggggtctggggctcgggctgtgggcgctgctgtggccgacgcgcgcgggtcccggcgaggcggcgctgcaggagctgtgcgggcagctggaacgctatctgggcgcggcggccgacggctgcggcggcgccacagtgcgcgacgcactcttcccggctgagggcggcgcggccgactgcgaaagcccgcgcgagttccgggagcgggccttgcgcgcgcggtgggtcgaggcggacgcgcggctgcgccaggttattcaaggacacggaaaagccaacaccatggtagcattaatgaacgtttaccaagaggaagatgaagcataccaggaattggttaccgtggcaaccatgttcttccagtacttattgcagccatttagggctatgcgagaagttgcaactttatgtaagcttgatattttgaagtctttggatgaggatgacctaggtcctagaagggtagttgccctggagaaagaagctgaagaatggaccagacgggctgaagaagctgtcgtctctattcaggatatcacagtgaattattttaaggagacagtaaaagcattagcaggaatgcagaaagaaatggaacaggatgcgaagagatttggtcaggctgcctgggccacagcaattcccaggttggaaaaacttcagctaatgctagctcgagagactctgcaactcatgagagcgaaagagttgtgtttaaatcacaaaagagctgaaattcagggaaagatggaagatcttccagaacaagaaaaaaatacaaatgttgtagatgaattagaaatacaattttatgaaattcaattagaactatatgaagttaaatttgagatattaaaaaacgaagaaatactgcttactacacagttggactctcttaaaagacttataaaagaaaaacaagatgaagttgtctattacgatccatgtgaaaatccagaggaacttaaagtcattgactgtgtggtggggctgcaggatgataagaatttggaagtgaaagaactcagaaggcagtgccagcagctggagtctaaacggggcaggatctgtgccaaaagagcctctctccggagtagaaaggatcagtgcaaagaaaatcatcggttcagattgcaacaggctgaagaaagcataagatactctcgtcagcatcacagtattcagatgaaaagagacaagataaaagaagaggagcaaaagaaaaaagaatggatcaaccaagaacgtcaaaaaacactccaacgattgagatcatttaaagataaacgcctagctcaatctgtccgaaacacctctggctcagaacctgtggctccaaacctgccaagtgatctttcccagcagatgtgcttgccagcttcccacgcggtgtcagtaattcacccgtcctctaggaaaactagaggtgttcccctatcggaagctggtaatgtgaaaagccccaagtgtcaaaactgtcatggaaatatccctgtccaggtttttgttccagttggtgatcaaacacattccaaatccagtgaggaattgtcactgccaccacctcctcctcctccaccaccaccaccgccgccaccgccgcccccaccccctcctctccgtgctctgtcctcatcctctcaagctgcaactcatcagaacttaggcttccgggctccagtgaaagatgaccagccacgtcctctagtgtgcgaatcacctgctgagcgaccacgtgactccttggaaagtttttcatgtccaggatctatggatgaagtgttggcctccttaaggcatggcagagctcctctccggaaggtggaagtgccggcggtgcgccctccccacgcctcaatcaatgagcacattctggctgccataaggcaaggggtcaaactgaagaaagttcaccctgatcttggcccaaaccccagcagcaaaccaaccagcaacagacgcaccagtgaccttgagaggagcatcaaggctgcgctccagagaatcaagagggtgtctgctgactctgaggaggacagtgatgagcaggaccctggccagtgggatggttaggctcaagtttgacaaaggcacctgccacagtaggcttgaataaagtgggtgagtcttagacctatcgaaaagcatactaacagggtgctgatagatgggccacataacaccccggaagatcagcagggccttgtgtaggctgctgcagcattttttttttttttcttttttgagatggagtctcactctgtcgcccaggctggggtgcagtggcgccatctcggctcaccgcaagctccgcttcccaggctggggtgcagtggtgcgatcttggctcactgcaagctccgcctcctgggttcacgccattctcctgcctcagcctcccgagtagctgggactacaggcgccaccaccttgcccaactaattttttgtattttttagtagagacgaggtttcaccgtgttagccaggatggtctcgatcttctgacctcgtgatccgcctgcctcagactcccaaagtgctgggattacaggtgtgagccaccacgcccagccttttttttttctttcttttgagacagaatctctctgtcatccaggctagagtgcagtggcacgatcttggcttactgcaacctccacctcccaggttcaagcaattctctgtctcagcctcccgagtagctgggattacaggcatgcaccaccacgcctggctaatttttgtatatttaagtagagacaaggtttcgctatgttggccaggctggtcttgaactcctgacctcgtgatccacctgccttggccacccaaagtgttgggattataggcatgagccaccgtgcctggctgatgctggagcttttatgtgacatggtgactcttaaaactggggagggacgtagagatgagagtttcacacaccagcccataggtgggatgtcaagacccatcggaagtgtcgctggcctaagagaagagcacttatttctcaccatggctgatctagaattgttccctgattctgaaagaagtttacactacactggtaagcagtactattagactactgactgtggccttctgtgcatatggaataatgatttctcagatttgtaggcttgaatgtgaatgttattttatcagtaatcagaataaattgcttatattcaggagttattttaaatatttaaatgaaatttattttaggcaccaagcactacataaactcataataactatttgcaatgcattagcatcactcacggggtaatgaaaacataccttagctgctgtaaaagcaaagtcttccgtgtccgggtgggctgaaagtttttaataaaattttagctaaacatttgtttaagtgaatact

SEQ ID NO: 34334 - DNA, 4002 bp, Homo sapiens
  source 1..4002: mol_type = unassigned DNA
atgccagtgccaccgccacccccacctcctctgcctccacctcccccgcctctgggggctcctccccctcccccaccatcagcacccccggtaagcacagacacctccagcttgcgaagggcagatccgaaaggccggagtgcgctgttggctgatatccagcaaggaactcgcctgcgcaaagtcacgcagatcaacgaccgcagtgccccgcagatcgagagttctaaaggaaccaacaaagaaggaggaggttctgcaaacacacgaggcgcgagcacacctcccaccctgggagatctgtttgctggtggctttcctgtattgcgaccagcaggccagcgggatgtagcaggtggcaagacagggcagggccctggctcccgcgcgccctctcccaggcttcccaacaaaaccatcagcggcccgcttatcccgcctgcctctcccaggctaggcaatacctccgaggcgcatggcgctgccaggacagccccgcctcgccccaacgtgcctgccccgccccctcccaccccaccccctccgcctccacccttacccccgccccttccctcttcctcccccatcaaaactccgcttgtgtccccacccggcccactgaccaaagggaacctcccggtggttgcaccccccgtcccctgtgcgccaccacctccacctccgccacctcccccaacgccacccccgctgcccccggcctcggttcttagtgacaaggcagtgaagcctcagctggctcccttgcacctcccgcccatcccgcccccgctccctctgctcccaccttgtgggtatccggggctcaaagcggagcccgccagccctgcgcaagatgcgcaggagcctcccgccccgccgcccccgctccccccttatgcttcttgctccccgagggcttctttgcccgcgccccctttgccaggagttaatagcagcagtgaaactccacccccgctaccccctaaatcccccagcttccaggccccaccgcagaaggccggtgcgcaggccttgcccgccccgcctgcccctccgggctcccagccgttcctgcagaagaagaggcatggccgaccaggggccggtgggggaaagctaaatccacctccagcaccccctgcgagatcacctaccacagagctttcaagcaagagccagcaggccacagcctggaccccgacgcagcagcctggaggtcaactgcgaaatggaagcctgcacatcattgatgacttcgagtctaaattcacgttccattctgtggaagactttccccctccggatgaatataaaccatgccagaagatttaccccagcaagatccccagaagccgtacacctggtccctggctccaagcggaagcagtcgggcagagctctgatgacatcaaaggcagaaattctcagttatctctaaagactcttcggtgagaagacagatgaagcgaaggtcctggggttccaggttgcagaacaacatgtcagaccccacccaccccatgctcaagctgtaattcagttggcatacaggcttggaattgagaatttatttattgtaaatatgtgatttgcacgggctttaaagcagtattttaattgacttttatttcggtaatattttttaaaacacccctcatttttccattttttgcattgcatcttggcatttgtcagcacagatagagccctgtccctccacctagtgcccactccatgactgtgaatctgcttgcaggctggcccttcctagattctgaaccgtttgtagagagtccttagtttgcaggtagccccaaagttataaatatccacaacggcttcttattggcataatttcatattctcatcacactaactgcaaaatcaaaccaaataatgccttatcaatgatgcagctcagaggaagtagcgtgtcccccacacccagacagtgccgcgcagcctccagggaacgaggtgccatgtctcgcttccattttgcagtacagggaatttttttttttttttttttttttttttttgctgcctaatgtaatacatcacaaagtaaaggcaagagtgggcttggccctccgatgccaaccacagggccccttttgtaactgaataatcctccaagtagccagtgctcctactgtttacagtgtccctcgtgcccaagtctctgtcactttcatcctgttccctccaagttcccagtcccatcccagtagccagctttatgagattttggtatttcttccctacagattaaaaacatacacaactcatcattatgctaaactaccagttgtatctcagaggtctccccttctgcccttgcttcgagtgtggacttccatggaaaatatgacatgaaaaagtgtagaacgaaacatcgtgtgaaatacctgccacaaatacctagtgcctcactgcccccatcttaggatccttggagccacccgtcaggcaaaacctagctcccttctgagctaaaggagaaccttgcctgacaactccacattcattcccttgtggtgggcacctgtctgtggggagatgtgtgcaagctcagccactctgaatatggaaaaggtcaggccgggctggtcctgctcttcactccctcttcttgatcctgtagggagtggaaatgtgtttttgcttgctgcctgacccctgatgttccccatctttggtcggggaagactgtgacagaggaaggagaaaaaatagaaggaaacagactgatccctgggctgtgctcaaaatagctgccctttaaaggaaatcaggcagggaggggagggaaaccagcgaaaaagaaatttgctttgcaacaacccacgcacacattcacccctgaagtatatcatgaacagaccaagccatccagaaaggcagccggtcaggagggtgtgggcaaacatgactgcatctgcctcactgttgtctggagtaacgactcaggtggtgtcctgcagcagtgctgtgctttctcattccagatggaagcaagtgagccagggtcaaattcccttctccaggggaatgaatcaagcccaaactgtaacagctaaataagtagaagtttttgcaggtcatcagctctgggcataactaatttgttttattggttctggaagatttccaaaaagccagaatttattattataacagtgtccactccactgccctcacagttgtgtaaaataattatagaagttttaatgatcctgattaagaagaccctagacaaaggcaattccaccttcagagtagactgcctgccctaatgaggtgtttagacattcgtgtctcctatggctgggatggaaattaaaataacactatttaaggacagagcgggccaggagcagtggctcatgcaggtaatcccagcatgggaggctgaggtgggtggattacttgaggttaggagttcaagaccagcctggccaacatggtgaaaccctgtctactcaaatacaaaaaattagccaggcatggtggctcacacctgtaatcccagcaacttgggaggttcaggcacaagaattgcttgaaccctggaggtggaggttgcagtgagctgagatggcaccactgcactctagcctgggcaacagagcgagaccctaactcaaaaaaaaaaaaggacagaggggaggaaggagcagaaaccaaaaatggcaattagggagaaatctcaggaatgtggcatcccatctccccttgagacctatcactgaattcacaacccttcgagctcatgctggtgcactgagtcccttgggcgctgtaaaggtttaaccccttgactgtaaactcagacttagagacatctgagtcacacagtccccgccattgtcacatattctcactgacactgcagtctgtgactcctccaatgtttcacgtgtattttatatttattgatgtctccttccgcagattcatttctttgtacttaataaactttagtaagtggaaatgctt

SEQ ID NO: 34335 - DNA, 3241 bp, Homo sapiens
  source 1..3241: mol_type = unassigned DNA
atgccagtgccaccgccacccccacctcctctgcctccacctcccccgcctctgggggctcctccccctcccccaccatcagcacccccggtaagcacagacacctccagcttgcgaagggcagatccgaaaggccggagtgcgctgttggctgatatccagcaaggaactcgcctgcgcaaagtcacgcagatcaacgaccgcagtgccccgcagatcgagagttctaaaggaaccaacaaagaaggaggaggttctgcaaacacacgaggcgcgagcacacctcccaccctgggagatctgtttgctggtggctttcctgtattgcgaccagcaggccagcgggatgtagcaggtggcaagacagggcagggccctggctcccgcgcgccctctcccaggcttcccaacaaaaccatcagcggcccgcttatcccgcctgcctctcccaggctaggcaatacctccgaggcgcatggcgctgccaggacagccccgcctcgccccaacgtgcctgccccgccccctcccaccccaccccctccgcctccacccttacccccgccccttccctcttcctcccccatcaaaactccgcttgtgtccccacccggcccactgaccaaagggaacctcccggtggttgcaccccccgtcccctgtgcgccaccacctccacctccgccacctcccccaacgccacccccgctgcccccggcctcggttcttagtgacaaggcagtgaagcctcagctggctcccttgcacctcccgcccatcccgcccccgctccctctgctcccaccttgtgggtatccggggctcaaagcggagcccgccagccctgcgcaagatgcgcaggagcctcccgccccgccgcccccgctccccccttatgcttcttgctccccgagggcttctttgcccgcgccccctttgccaggagttaatagcagcagtgaaactccacccccgctaccccctaaatcccccagcttccaggccccaccgcagaaggccggtgcgcaggccttgcccgccccgcctgcccctccgggctcccagccgttcctgcagaagaagaggcatggccgaccaggggccggtgggggaaagctaaatccacctccagcaccccctgcgagatcacctaccacagagctttcaagcaagagccagcaggccacagcctggaccccgacgcagcagcctggaggtcaactgcgaaatggaagcctgcacatcattgatgacttcgagtctaaattcacgttccattctgtggaagactttccccctccggatgaatataaaccatgccagaagatttaccccagcaagatccccagaagccgtacacctggtccctggctccaagcggaagcagtcgggcagagctctgatgacatcaaaggcagaaattctcaggtaacacaagcctcatgtctctgaatgtaaaaccaggaattctcctcaggaggcacagaaatggtaagggtatgctttctcctaaacagctttatatttttcctcacactccttttcctcagggaaagccatttggtggaccttttttcaagccagaatgaaacactcaccatttcaaaatctgaagtgtgacaaaagggggcttccctggaatcaccactacatatagaagcaagtttagcaactctgacattctgcaacaatcatgccaatcacttcccattcttccttggttatgatggcctgtgagaaaaactgaataacatgtataaaacataattcagtattctctctcatctgtagaatacatggtttcttttagcacacttggagtttttttttcccccaccaatgttataattgattttggccaaatttagtcacaattcaagtactagtacccacaagaaatgaacagaactagaaggcaagccagacagctgcttttgtgataagacagtccttgaagaaacacctttaatctcacccagggcatcttgaaccgaattatttcctaacctggacacatttccctgcacatgacagggtctcatctttaaaagccctttgtttctttgaaaacatgtattcagtcgaacaataatctccccatttctgaatactatgtgacagactacagagtcacttgcagttaaaccaggcaattctgcaactgtgtggaacatcaaggaaagtgacctgagaaggaagaggctaggttcctggaagctaggatgagttcctcagaggaaaaagtacatcctctagcagataagtatcccccttttctaaccacagctgatgcaagaattgcagtaacgattcttagacgatcacaggttcaaaactgtgtgtatgattgtagttaaggaagaagtatatatacacaggaaaaaagacaggaagaatatacacaatattgttaacaggtagagagaattctgagaagatggcagaggagaaagcaccaggaatctgtggacaacaattgcattggcagaatctgtctgatgtaatttgtctcatgtattttggaactctgggattcattaaaggcttgaaacttccatgggaaagcttggacagtaaattgtgctcttagtacaatagtaactactcatcctccaccccccaccccatggcaggcaactgggcacgtgttcctggagcagcttgcatacagcttgcaggagccaaggtgggcacaaaaaaaaaaccctgtcctccagatactggggaatctgttctctgattggttattgctgcttctgatcacagaggtacaaataaagagatgggcagccattgttgcacctcctcttattgttgtaaatccctttccctctggctgaagtggcctcctggggatttcaagggctggtggccattttgttcctcctgtccttgctctttttttttccccatttgggagccaaacattaaagatgaacattcaaaggctactacatatatgatgaaaattagaaagtgaccacatatgcccagggaaaggcacaggctcagaaaagaccaagaagaccttaagattacacctcagactgattcttagcacagagacagcctacaacaatcaaaaaaataaaatgaacaaaaacaataagaaaaaccagcaaaccctgggggacagagagaattgatatctagagttaccacattattagattaaaatgtagagttttcaacaacaacaaaaatcacatcatacaaagaaacaggagagtatggcccattc

SEQ ID NO: 34336 - DNA, 3491 bp, Homo sapiens
  source 1..3491: mol_type = unassigned DNA
cccgcctccgcgtcccggcagcaccagagccggtggccggggagcgagccgggcgcaccgagcgcagctcggcggtagcggcgccgcttggagcacgggcgctgcgggacggagcccggagccggaggcggcggcggcggagacgtcggccggagctcgagtccagtccagcccccggctccgccacctgcagagcagaagccactctcttgggaccattcataagcaggagacatcaacaccgtgacacatgccagtgccaccgccacccccacctcctctgcctccacctcccccgcctctgggggctcctccccctcccccaccatcagcacccccggtaagcacagacacctccagcttgcgaagggcagatccgaaaggccggagtgcgctgttggctgatatccagcaaggaactcgcctgcgcaaagtcacgcagatcaacgaccgcagtgccccgcagatcgagagttctaaaggaaccaacaaagaaggaggaggttctgcaaacacacgaggcgcgagcacacctcccaccctgggagatctgtttgctggtggctttcctgtattgcgaccagcaggccagcgggatgtagcaggtggcaagacagggcagggccctggctcccgcgcgccctctcccaggcttcccaacaaaaccatcagcggcccgcttatcccgcctgcctctcccaggctaggcaatacctccgaggcgcatggcgctgccaggacagccccgcctcgccccaacgtgcctgccccgccccctcccaccccaccccctccgcctccacccttacccccgccccttccctcttcctcccccatcaaaactccgcttgtgtccccacccggcccactgaccaaagggaacctcccggtggttgcaccccccgtcccctgtgcgccaccacctccacctccgccacctcccccaacgccacccccgctgcccccggcctcggttcttagtgacaaggcagtgaagcctcagctggctcccttgcacctcccgcccatcccgcccccgctccctctgctcccaccttgtgggtatccggggctcaaagcggagcccgccagccctgcgcaagatgcgcaggagcctcccgccccgccgcccccgctccccccttatgcttcttgctccccgagggcttctttgcccgcgccccctttgccaggagttaatagcagcagtgaaactccacccccgctaccccctaaatcccccagcttccaggccccaccgcagaaggccggtgcgcaggccttgcccgccccgcctgcccctccgggctcccagccgttcctgcagaagaagaggcatggccgaccaggggccggtgggggaaagctaaatccacctccagcaccccctgcgagatcacctaccacagagctttcaagcaagagccagcaggccacagcctggaccccgacgcagcagcctggaggtcaactgcgaaatggaagcctgcacatcattgatgacttcgagtctaaattcacgttccattctgtggaagactttccccctccggatgaatataaaccatgccagaagatttaccccagcaagatccccagaagccgtacacctggtccctggctccaagcggaagcagtcgggcagagctctgatgacatcaaaggcagaaattctcaggtaacacaagcctcatgtctctgaatgtaaaaccaggaattctcctcaggaggcacagaaatggtaagggtatgctttctcctaaacagctttatatttttcctcacactccttttcctcagggaaagccatttggtggaccttttttcaagccagaatgaaacactcaccatttcaaaatctgaagtgtgacaaaagggggcttccctggaatcaccactacatatagaagcaagtttagcaactctgacattctgcaacaatcatgccaatcacttcccattcttccttggttatgatggcctgtgagaaaaactgaataacatgtataaaacataattcagtattctctctcatctgtagaatacatggtttcttttagcacacttggagtttttttttcccccaccaatgttataattgattttggccaaatttagtcacaattcaagtactagtacccacaagaaatgaacagaactagaaggcaagccagacagctgcttttgtgataagacagtccttgaagaaacacctttaatctcacccagggcatcttgaaccgaattatttcctaacctggacacatttccctgcacatgacagggtctcatctttaaaagccctttgtttctttgaaaacatgtattcagtcgaacaataatctccccatttctgaatactatgtgacagactacagagtcacttgcagttaaaccaggcaattctgcaactgtgtggaacatcaaggaaagtgacctgagaaggaagaggctaggttcctggaagctaggatgagttcctcagaggaaaaagtacatcctctagcagataagtatcccccttttctaaccacagctgatgcaagaattgcagtaacgattcttagacgatcacaggttcaaaactgtgtgtatgattgtagttaaggaagaagtatatatacacaggaaaaaagacaggaagaatatacacaatattgttaacaggtagagagaattctgagaagatggcagaggagaaagcaccaggaatctgtggacaacaattgcattggcagaatctgtctgatgtaatttgtctcatgtattttggaactctgggattcattaaaggcttgaaacttccatgggaaagcttggacagtaaattgtgctcttagtacaatagtaactactcatcctccaccccccaccccatggcaggcaactgggcacgtgttcctggagcagcttgcatacagcttgcaggagccaaggtgggcacaaaaaaaaaaccctgtcctccagatactggggaatctgttctctgattggttattgctgcttctgatcacagaggtacaaataaagagatgggcagccattgttgcacctcctcttattgttgtaaatccctttccctctggctgaagtggcctcctggggatttcaagggctggtggccattttgttcctcctgtccttgctctttttttttccccatttgggagccaaacattaaagatgaacattcaaaggctactacatatatgatgaaaattagaaagtgaccacatatgcccagggaaaggcacaggctcagaaaagaccaagaagaccttaagattacacctcagactgattcttagcacagagacagcctacaacaatcaaaaaaataaaatgaacaaaaacaataagaaaaaccagcaaaccctgggggacagagagaattgatatctagagttaccacattattagattaaaatgtagagttttcaacaacaacaaaaatcacatcatacaaagaaacaggagagtatggcccattc

SEQ ID NO: 34337 - DNA, 2255 bp, Homo sapiens
  source 1..2255: mol_type = unassigned DNA
atctacggggcggcaggaggcccgaagcaagatggcggtgaatcagagccacaccgagaaccgccgcggagccctcatccctaacggtgaaagtctcttgaagcggtctccgaatgtggagctctccttcccacagcgatcagaaggctcaaatgtctttagtggtagaaagacaggaacattgtttctcacttcataccgggtgattttcataacttcatgctccatcagtgatcccatgttgtcttttatgatgccatttgatctgatgacgaacctcactgttgaacaaccagtatttgctgcaaacttcattaagggaactattcaggcagctccatatggtggctgggaaggacaagctacttttaaattagtcttcagaaatggagatgccattgaatttgcccagttgatggtgaaagctgcctctgctgctgcccgaggatttccacttagaaccttaaatgactggttcagctctatgggaatttatgtaattactggggaagggaatatgtgcactccacagatgccttgttcagttattgtctatggagccccacctgcaggatatggagccccacctcccggatacggagccccacctgcaggatatggagcccaacccgtaggaaatgaaggcccgcctgtgggatacagagcctcacctgtgcgatatggagccccacctcttggatacggagccccacctgcaggatatggagccccacctctaggatatggagccccacctcttggatatggaaccccacctctcggatatggagccccacctctcggatatggagccccacctgcaggaaatgaaggcccgcctgcgggatacagagcctcacctgctggatcaggagccaggcctcaggaatctacagcagcccaggctcctgaaaacgaggcttctcttccctctgcctcctcttctcaggtccattcttaaccttctaagatgtaaaccttgaagactcaccaagcaaagaggtaccctaaaattgaagtcaggataaggaggacgactcaggtatgtgatcacaggcttctcgcaggtagttgttccaccctttggaagggcaatcttatgggggaaggtgaaactttacttctgtgcctagattttagaagcagaatcaactcttaaatagctggctaaaggaagaataccattgtggggctaattccccagtaatttggttgacattgggttgcatttttaaacataactttttccacactcgcattcaaggttcctgtcttcccatcctcattcaagaaacatttattatgctccgtttgctaggcactaagatgcgtgctaaaaacgtcatgttgaacacttagttgtttgagaaagctaaattttcaatagtaagagtgttataaattacggtggatccacaaaatggagtattatacacctgttgaaaactatgtctagaggtagagaaagccttctttgaggagaccaaaaccaacaaataaaagcatgataaattgactatatcaaaatttaaaacttctctatgacagaagttaaaagataggcaacagaataggaaaaagtgattttcaacatatatattaatttatagtcagaatacgtgaataactacaaatcaattctccccaaaatgacagaaatatgaattgccgaataaccaaggcaatagcatggccagaaaacgtttgaaaagatgttcagcttgactagtgttagggaaatgcaacctgagatgagaaaacatttttatctccaaagatttacaaatattaaaactcttgatatggcactttcacattttaaaatatgcctgcgagaaaacttgcatgtgtgcacaaagatgcatgtgggaagatttcattatattcattgtttctaacagcacaaaattagaaataacctatatgtccattaataggaaatatatgaataggctatggtatgcccatactacgtatgcagaaatttctaagacttgttgataaggagaaaagcaagttgtagggagcatatactatagtgattttcagcctcatcagactgaatgccccattttataacaaatatttatattttataacaaacgtttatatttgtatatttataacaaatattttgtaatgtctccttcacttcaatgaagtttgtagataattgcatatgattccacaccatttcaaccaaaattaataggccataaatgtgatagaggaaataaaaggagtttgtagtaaaa

SEQ ID NO: 34338 - DNA, 3403 bp, Homo sapiens
  source 1..3403: mol_type = unassigned DNA
ataatctccgccctccccttcagaaccgcgccccacagctcggcgcaggtcccgcccctttccatctacggggcggcaggaggcccgaagcaagatggcggtgaatcagagccacaccgagaaccgccgcggagccctcatccctaacggtgaaagtctcttgaagcggtctccgaatgtggagctctccttcccacagcgatcagaaggctcaaatgtctttagtggtagaaagacaggaacattgtttctcacttcataccgggtgattttcataacttcatgctccatcagtgatcccatgttgtcttttatgatgccatttgatctgatgacgaacctcactgttgaacaaccagtatttgctgcaaacttcattaagggaactattcaggcagctccatatggtggctgggaaggacaagctacttttaaattagtcttcagaaatggagatgccattgaatttgcccagttgatggtgaaagctgcctctgctgctgcccgaggatttccacttagaaccttaaatgactggttcagctctatgggaatttatgtaattactggggaagggaatatgtgcactccacagatgccttgttcagttattgtctatggagccccacctgcaggatatggagccccacctcccggatacggagccccacctgcaggatatggagcccaacccgtaggaaatgaaggcccgcctgtgggatacagagcctcacctgtgcgatatggagccccacctcttggatacggagccccacctgcaggatatggagccccacctctaggatatggagccccacctcttggatatggaaccccacctctcggatatggagccccacctctcggatatggagccccacctgcaggaaatgaaggcccgcctgcgggatacagagcctcacctgctggatcaggagccaggcctcaggaatctacagcagcccaggctcctgaaaacgaggcttctcttccctctgcctcctcttctcaggtccattcttaaccttctaagatgtaaaccttgaagactcaccaagcaaagaggtaccctaaaattgaagtcaggataaggaggacgactcagcttagagtcattgattgatctgcattgtgaaaattaggaaaccagatgctcccatgttctcaaggacagcctttcttaaggaagtcagtacgtgggcaacagtgatgagaggaagagaggagagactcaaccaactagagcagggataaggtttcccttgttcagcttttcagtgtctgctggaatgtgatggtaagttgagaacagggtgaatgggtgaggccttttttatatcagaaagttttccgagtaactgatctctggcaaatatttggggattagaattctaaaagaatacaaactagacttctcttctgctcttcatgttagttatacttgtaccaggtagatttgaggtggggtccagttacctgaaaagcgtagcaggttcgagtttcttaaaggtggaattccaccatgttctcctgtgcaaagggtacctgtttacctggtccaccaaactgccccagtacaaccaaaggctgtgactgtgtaaggatagaaccaagtggagccacagtttggacccacgtggtgctgcgtggcacacctactgttagttagctcccactgtctggtacagttgtttcccccaaaggctcagtccaatttgttctataagaagagctttgtgtcctgtatattcaaaggaccctggtttttgctttgctgaggacaaatccagtcagaattcagctgagccttctgcatgctgagagcactcatgtgctgagttcctcagctcctcactgacgttttgagtactttctttctgactcactcactgtgctggtggattccgctcttcctgtctcttccccagctgcaatacagaaactatactctgttgtctactctttcatttcctattagaaatataaagggatagaaataagaagaccttttagtcctggactatctggtattggcccctaaaatgagcctccaaatactccttttcatgggtaagtggatgctccccagcctgctggagcagaaccttcctggctcagctaccctgagatatcaggacaaaaacatatagttggtgtgattttcctctttttgtttttttttttttcaagatagaatctggctctgtcccccaggctggagtgcagtggcgcgatctcggctcactgcaacctttgccccacaggtttaagcgattctcctgcttcagcctcctgaatagcttggatgacaggtgcctgccaccatgctcggctaatttttgtgtttttagtggagacagggtttcaccatgttggccaggctggtttcgaactcctgacctcaagtgatccacccgcctcggcctcccaaagtgctgggattacaggcatcggcctgtgcctggccgatttttcaatccatagattaatatgttcaagaaatattgcatgtctttgttttctgtaaatttatttctgttaccaagatccccaccaccatctgctttgttggtgggcttctcacaaatcctaagattatgcaaaggtatccagattttatttggcaccaagatgctgagaagtttcttctggtcatcagactgcttctgaaacagccactatccagtcctggcagtcccgtcaagtctaaaagcttgttgccttgggaccccagaatcttaggtagggcttagaaccagggtgtcagagatccaactctgtgtaccatattgctccttagaactggggagtaggaccccaaaggcctccttatccttgagagtctgacaattccttaaacttccagattctgccctctcagctgtgctgttggtctgcatcacctctatctcttaagcatctatcctaatccaaatctcaggatttgggtttacccaaaaggtaatagaaagcctttgccttcatgttgacttggctttccttgcctagcacttggttgcttgcttgaaaatcatgtatgtatatatataaaatgtagaagcccaattcaaattaataatgtaaaaatttattctgttacacagattacctcattgtcaggtaggaagtgaaacgtatgatattcttcctggcctttgccttgagagtcttctggagcctgaagagggtggggcagacaaccatggactgctagagaataaactttctttgaagcttcctaaatggattagaaagaaggggttctgtcaaagggaaagggtctatacagatgtgaccagcagtttgattagtttagatgtatgatttagtagccaatataagaaacttgtaatttttagtaattagaatttattataaataataaaacagggtattaattatt

SEQ ID NO: 34339 - DNA, 1417 bp, Homo sapiens
  source 1..1417: mol_type = unassigned DNA
ggtcccgcccctttccatctacggggcggcaggaggcccgaagcaagatggcggtgaatcagagccacaccgagaaccgccgcggagccctcatccctaacggtgaaagtctcttgaagcggtctccgaatgtggagctctccttcccacagcgatcagaaggctcaaatgtctttagtggtagaaagacaggaacattgtttctcacttcataccgggtgattttcataacttcatgctccatcagtgatcccatgttgtcttttatgatgccatttgatctgatgacgaacctcactgttgaacaaccagtatttgctgcaaacttcattaagggaactattcaggcagctccatatggtggctgggaaggacaagctacttttaaattagtcttcagaaatggagatgccattgaatttgcccagttgatggtgaaagctgcctctgctgctgcccgaggatttccacttagaaccttaaatgactggttcagctctatgggaatttatgtaattactggggaagggaatatgtgcactccacagatgccttgttcagttattgtctatggagccccacctgcaggatatggagccccacctcccggatacggagccccacctgcaggatatggagcccaacccgtaggaaatgaaggcccgcctgtgggatacagagcctcacctgtgcgatatggagccccacctcttggatacggagccccacctgcaggatatggagccccacctctaggatatggagccccacctcttggatatggaaccccacctctcggatatggagccccacctctcggatatggagccccacctgcaggaaatgaaggcccgcctgcgggatacagagcctcacctgctggatcaggagccaggcctcaggaatctacagcagcccaggctcctgaaaacgaggcttctcttccctctgcctcctcttctcaggtccattcttaaccttctaagatgtaaaccttgaagactcaccaagcaaagaggtaccctaaaattgaagtcaggataaggaggacgactcagcttagagtcattgattgatctgcattgtgaaaattaggaaaccagatgctcccatgttctcaaggacagcctttcttaaggaagtcagtacgtgggcaacagtgatgagaggaagagaggagagactcaaccaactagagcagggataaggtttcccttgttcagcttttcagtgtctgctggaatgtgatgatactctagctcacacatcagaagagcatgtgcaggaagagagatgaaataatggtacacgttgatggttactggagctggatgctgggtacatggaggttcactctaccattttatttttgtatttgaaagttttcatgataaaaagtttttaaaaagagaaaggg

SEQ ID NO: 34340 - DNA, 1001 bp, Homo sapiens
  source 1..1001: mol_type = unassigned DNA
atgccatttgatctgatgacgaacctcactgttgaacaaccagtatttgctgcaaacttcattaagggaactattcaggcagctccatatggtggctgggaaggacaagctacttttaaattagtcttcagaaatggagatgccattgaatttgcccagttgatggtgaaagctgcctctgctgctgcccgaggatttccacttagaaccttaaatgactggttcagctctatgggaatttatgtaattactggggaagggaatatgtgcactccacagatgccttgttcagttattgtctatggagccccacctgcaggatatggagccccacctcccggatacggagccccacctgcaggatatggagcccaacccgtaggaaatgaaggcccgcctgtgggatacagagcctcacctgtgcgatatggagccccacctcttggatacggagccccacctgcaggatatggagccccacctctaggatatggagccccacctcttggatatggaaccccacctctcggatatggagccccacctctcggatatggagccccacctgcaggaaatgaaggcccgcctgcgggatacagagcctcacctgctggatcaggagccaggcctcaggaatctacagcagcccaggctcctgaaaacgaggcttctcttccctctgcctcctcttctcaggtccattcttaaccttctaagatgtaaaccttgaagactcaccaagcaaagaggtaccctaaaattgaagtcaggataaggaggacgactcagcttagagtcattgattgatctgcattgtgaaaattaggaaaccagatgctcccatgttctcaaggacagcctttcttaaggaagtcagtacgtgggcaacagtgatgagaggaagagaggagagactcaaccaactagagcagggataaggtttcccttgttcagcttttcagtgtctgctggaatgtgatgattacctcattgtcaggtag

SEQ ID NO: 34341 - DNA, 2722 bp, Homo sapiens
  source 1..2722: mol_type = unassigned DNA
ccgcagccgccgagccgagcgcttgactatatatggtcaaagctgggggcgagccgcgcgcgggaccgcgcttccgggttcggggcgtccgcaaccacagcgcgcagggcaggcgcgagctggcctctgagccccggcctcggaccgcccactccactcccggcacgcccggtgccgccttccggctccagtccccgggctcggcctcggcgaggtgtaattcgcagcgcgggccggccccggaggctctcggcgagcgcggcgcggtaacaagtgggcgaggatgccgtacgagatcaagaaggtgttcgccagcctcccgcaggtggagaggggcgtctccaagatcatcggcggcgaccctaagggcaacaattttctgtacaccaatggaaagtgcgtcatcctaaggaacatcgacgaccacagccgctttgtcaactgtgtgcgattctctcctgatgggaacagatttgccacagccagtgctgacggccagatatacatctatgacgggaagactggggagaaggtgtgcgcgctgggcggaagcaaggcccacgacggtgggatttacgcaattagttggagtcccgacagcacccatttgctttctgcttctggggacaaaacttccaagatttgggacgtcagcgtgaactccgtggtcagcacatttcccatgggctccacggttctggaccagcagctgggctgcctatggcagaaggaccacctgctcagtgtctccctgtccgggtacatcaactatctggacagaaacaaccccagcaagcccctgcacgtcatcaagggtcacagtaaatcgatccagtgtctgacggtgcataaaaacggcggcaagtcctacatttactctgggagccacgacggacacattaattactgggattcagagacgggggagaacgactccttcgctgggaaaggccacacgaaccaggtgtccaggatgaccgtggatgagtcggggcagctcatcagctgcagcatggacgacaccgtgcggtacaccagcctcatgctgcgggactacagcggacaaggagttgtgaaactggacgttcagccaaagtgcgtagccgtcggccccgggggatacgccgtggtcgtgtgcattggacagattgtcctgctgaaggatcagaggaagtgcttcagcatcgacaaccccggctacgagcccgaagttgtggcagtgcaccccggcggggacacggtggcaattgggggtgtggacggcaacgtccgcctgtattccatcctgggcaccacgctgaaggatgagggcaagctcctagaggccaagggccccgtgaccgacgtggcctactcccacgacggcgccttcctcgcggtgtgcgacgccagcaaggtggtcacagtgttcagcgttgctgacggctactcggagaacaatgttttttatggacaccatgcaaaaatcgtctgcctggcctggtccccagacaatgaacactttgcctccggtggcatggacatgatggtgtatgtttggaccctgagtgacccggaaaccagagtcaagatccaagatgcacaccggctgcaccatgtcagcagcctggcctggctggacgagcacacgctggtcacgacctcccatgatgcctctgtcaaggagtggacaatcacctactgaggagccccacccccgcctctggatggaccgaatcagggactagagtttaactgcagcggaacatgtcatttctctatttctgtgacgcgcccccatgcccccaccccaccacaagaggcaggagggcccagtcatgaccctcgtctctgcagggtgtctgtacacgttcttctgaaagctttagacagtaacagtttgcacatgaaaaataaagcgagcacctaaacaatgtgtggagcataactaaaacccacagcccaaccaaaccttgagaatgcgaaacattccagaggcagtagcctccaaagcacacagagcccctggccccgccgcggctctcactatctgtcaggggaggttgtacaggtgaatgagccggggggctcatgttcctgcctgcagaacatttctgtactagtgagaagagggaatatgcattgcagttcagcaaagccggaattctgtgttgaacagatgtctgtctccctagtgtgtgactcacaccttgtggctgccttcagagcgccacctccagatcagatggggacacacaacccctggatatgtttcattgtcagattttgtgcttgattttaagaatggaattgtgggtatctttcctttttttttaatgtatcttaactgttgcctgtcagtgtttacaaactagtgcgttgacggcaccgtgtccaagtttttagaacccttgttagccagaccgaggtgtcctggtcaccgtttcaccatcatgctttgatgttcccctgtctttccctcttctgctctcaagagcaaaggttaatttaaggacaaagatgaagtcactgtaaactaatctgtcattgtttttaccttccttttctttttcagtgcagaaattaaaagtaagtataaagcaccgtgattgggagtgtttttgcgtgtgtcggaatcactggtaaatgttggctgagaacaatccctccccttgcacttgtgaaaacactttgagcgctttaagagattagcctgagaaataattaaatatcttttctcttc

SEQ ID NO: 34342 - DNA, 3142 bp, Homo sapiens
  source 1..3142: mol_type = unassigned DNA
ccgcagccgccgagccgagcgcttgactatatatggtcaaagctgggggcgagccgcgcgcgggaccgcgcttccgggttcggggcgtccgcaaccacagcgcgcagggcaggcgcgagctggcctctgagccccggcctcggaccgcccactccactcccggcacgcccggtgccgccttccggctccagtccccgggctcggcctcggcgaggtgtaattcgcagcgcgggccggccccggaggctctcggcgagcgcggcgcggtaacaagtgggcgaggatgccgtacgagatcaagaaggtgttcgccagcctcccgcaggtggagaggggcgtctccaagatcatcggcggcgaccctaagggcaacaattttctgtacaccaatggaaagtgcgtcatcctaaggaacatcgacaacccagcccttgctgacatctacacagagcacgcccatcaggtggtggtggccaagtatgcgcccagcggattctacattgcctccggagatgtgtctgggaagctgaggatctgggataccacgcagaaggagcacctgttgaagtatgagtaccagcctttcgctgggaagatcaaagacattgcttggactgaagacagtaagaggatcgccgtggtcggggaaggaagggagaagtttggagcagtcttcctctgggatagtggctcttctgtgggcgagattacaggacacaacaaagtcatcaacagcgtggacatcaagcagagccggccataccggctggccacgggaagcgatgataactgcgcggcattctttgagggacccccattcaagttcaagttcacaattggcgaccacagccgctttgtcaactgtgtgcgattctctcctgatgggaacagatttgccacagccagtgctgacggccagatatacatctatgacgggaagactggggagaaggtgtgcgcgctgggcggaagcaaggcccacgacggtgggatttacgcaattagttggagtcccgacagcacccatttgctttctgcttctggggacaaaacttccaagatttgggacgtcagcgtgaactccgtggtcagcacatttcccatgggctccacggttctggaccagcagctgggctgcctatggcagaaggaccacctgctcagtgtctccctgtccgggtacatcaactatctggacagaaacaaccccagcaagcccctgcacgtcatcaagggtcacagtaaatcgatccagtgtctgacggtgcataaaaacggcggcaagtcctacatttactctgggagccacgacggacacattaattactgggattcagagacgggggagaacgactccttcgctgggaaaggccacacgaaccaggtgtccaggatgaccgtggatgagtcggggcagctcatcagctgcagcatggacgacaccgtgcggtacaccagcctcatgctgcgggactacagcggacaaggagttgtgaaactggacgttcagccaaagtgcgtagccgtcggccccgggggatacgccgtggtcgtgtgcattggacagattgtcctgctgaaggatcagaggaagtgcttcagcatcgacaaccccggctacgagcccgaagttgtggcagtgcaccccggcggggacacggtggcaattgggggtgtggacggcaacgtccgcctgtattccatcctgggcaccacgctgaaggatgagggcaagctcctagaggccaagggccccgtgaccgacgtggcctactcccacgacggcgccttcctcgcggtgtgcgacgccagcaaggtggtcacagtgttcagcgttgctgacggctactcggagaacaatgttttttatggacaccatgcaaaaatcgtctgcctggcctggtccccagacaatgaacactttgcctccggtggcatggacatgatggtgtatgtttggaccctgagtgacccggaaaccagagtcaagatccaagatgcacaccggctgcaccatgtcagcagcctggcctggctggacgagcacacgctggtcacgacctcccatgatgcctctgtcaaggagtggacaatcacctactgaggagccccacccccgcctctggatggaccgaatcagggactagagtttaactgcagcggaacatgtcatttctctatttctgtgacgcgcccccatgcccccaccccaccacaagaggcaggagggcccagtcatgaccctcgtctctgcagggtgtctgtacacgttcttctgaaagctttagacagtaacagtttgcacatgaaaaataaagcgagcacctaaacaatgtgtggagcataactaaaacccacagcccaaccaaaccttgagaatgcgaaacattccagaggcagtagcctccaaagcacacagagcccctggccccgccgcggctctcactatctgtcaggggaggttgtacaggtgaatgagccggggggctcatgttcctgcctgcagaacatttctgtactagtgagaagagggaatatgcattgcagttcagcaaagccggaattctgtgttgaacagatgtctgtctccctagtgtgtgactcacaccttgtggctgccttcagagcgccacctccagatcagatggggacacacaacccctggatatgtttcattgtcagattttgtgcttgattttaagaatggaattgtgggtatctttcctttttttttaatgtatcttaactgttgcctgtcagtgtttacaaactagtgcgttgacggcaccgtgtccaagtttttagaacccttgttagccagaccgaggtgtcctggtcaccgtttcaccatcatgctttgatgttcccctgtctttccctcttctgctctcaagagcaaaggttaatttaaggacaaagatgaagtcactgtaaactaatctgtcattgtttttaccttccttttctttttcagtgcagaaattaaaagtaagtataaagcaccgtgattgggagtgtttttgcgtgtgtcggaatcactggtaaatgttggctgagaacaatccctccccttgcacttgtgaaaacactttgagcgctttaagagattagcctgagaaataattaaatatcttttctcttc

SEQ ID NO: 34343 - DNA, 1411 bp, Homo sapiens
  source 1..1411: mol_type = unassigned DNA
gtgtgctggagacaggccagctggggcctgcagcgctctgtcgctctgtgatgttgacatgggtgtggtacttaattatgacctcagtgcttcaagcctcggtttcctcggtggaccacagccgctttgtcaactgtgtgcgattctctcctgatgggaacagatttgccacagccagtgctgacggccagatatacatctatgacgggaagactggggagaaggtgtgcgcgctgggcggaagcaaggcccacgacggtgggatttacgcaattagttggagtcccgacagcacccatttgctttctgcttctggggacaaaacttccaagatttgggacgtcagcgtgaactccgtggtcagcacatttcccatgggctccacggttctggaccagcagctgggctgcctatggcagaaggaccacctgctcagtgtctccctgtccgggtacatcaactatctggacagaaacaaccccagcaagcccctgcacgtcatcaagggtcacagtaaatcgatccagtgtctgacggtgcataaaaacggcggcaagtcctacatttactctgggagccacgacggacacattaattactgggattcagagacgggggagaacgactccttcgctgggaaaggccacacgaaccaggtgtccaggatgaccgtggatgagtcggggcagctcatcagctgcagcatggacgacaccgtgcggtacaccagcctcatgctgcgggactacagcggacaaggagttgtgaaactggacgttcagccaaagtgcgtagccgtcggccccgggggatacgccgtggtcgtgtgcattggacagattgtcctgctgaaggatcagaggaagtgcttcagcatcgacaaccccggctacgagcccgaagttgtggcagtgcaccccggcggggacacggtggcaattgggggtgtggacggcaacgtccgcctgtattccatcctgggcaccacgctgaaggatgagggcaagctcctagaggccaagggccccgtgaccgacgtggcctactcccacgacggcgccttcctcgcggtgtgcgacgccagcaaggtggtcacagtgttcagcgttgctgacggctactcggagaacaatgttttttatggacaccatgcaaaaatcgtctgcctggcctggtccccagacaatgaacactttgcctccggtggcatggacatgatggtgtatgtttggaccctgagtgacccggaaaccagagtcaagatccaagatgcacaccggctgcaccatgtcagcagcctggcctggctggacgagcacacgctggtcacgacctcccatgatgcctctgtcaaggagtggacaatcacctactgaggagccccacccccgcctctggatggaccgaatca

SEQ ID NO: 34344 - DNA, 2411 bp, Homo sapiens
  source 1..2411: mol_type = unassigned DNA
ccggccgagaccgagaaggtgttcgccagcctcccgcaggtggagaggggcgtctccaagatcatcggcggcgaccctaagggcaacaattttctgtacaccaatggaaagtgcgtcatcctaaggaacatcgacgaccacagccgctttgtcaactgtgtgcgattctctcctgatgggaacagatttgccacagccagtgctgacggccagtgtctgcctgctcccgtgactgctcagagccgcaggctgcctaatgctagtcctgacatgcagaacttagacatcgccctccccacatctgcagactcgtcgtcagagcccaagccacagtccatggagaaactgcctccgtggtcagcacatttcccatgggctccacggttctggaccagcagctgggctgcctatggcagaaggaccacctgctcagtgtctccctgtccgggtacatcaactatctggacagaaacaaccccagcaagcccctgcacgtcatcaagggtcacagtaaatcgatccagtgtctgacggtgcataaaaacggcggcaagtcctacatttactctgggagccacgacggacacattaattactgggattcagagacgggggagaacgactccttcgctgggaaaggccacacgaaccaggtgtccaggatgaccgtggatgagtcggggcagctcatcagctgcagcatggacgacaccgtgcggtacaccagcctcatgctgcgggactacagcggacaaggagttgtgaaactggacgttcagccaaagtgcgtagccgtcggccccgggggatacgccgtggtcgtgtgcattggacagattgtcctgctgaaggatcagaggaagtgcttcagcatcgacaaccccggctacgagcccgaagttgtggcagtgcaccccggcggggacacggtggcaattgggggtgtggacggcaacgtccgcctgtattccatcctgggcaccacgctgaaggatgagggcaagctcctagaggccaagggccccgtgaccgacgtggcctactcccacgacggcgccttcctcgcggtgtgcgacgccagcaaggtggtcacagtgttcagcgttgctgacggctactcggagaacaatgttttttatggacaccatgcaaaaatcgtctgcctggcctggtccccagacaatgaacactttgcctccggtggcatggacatgatggtgtatgtttggaccctgagtgacccggaaaccagagtcaagatccaagatgcacaccggctgcaccatgtcagcagcctggcctggctggacgagcacacgctggtcacgacctcccatgatgcctctgtcaaggagtggacaatcacctactgaggagccccacccccgcctctggatggaccgaatcagggactagagtttaactgcagcggaacatgtcatttctctatttctgtgacgcgcccccatgcccccaccccaccacaagaggcaggagggcccagtcatgaccctcgtctctgcagggtgtctgtacacgttcttctgaaagctttagacagtaacagtttgcacatgaaaaataaagcgagcacctaaacaatgtgtggagcataactaaaacccacagcccaaccaaaccttgagaatgcgaaacattccagaggcagtagcctccaaagcacacagagcccctggccccgccgcggctctcactatctgtcaggggaggttgtacaggtgaatgagccggggggctcatgttcctgcctgcagaacatttctgtactagtgagaagagggaatatgcattgcagttcagcaaagccggaattctgtgttgaacagatgtctgtctccctagtgtgtgactcacaccttgtggctgccttcagagcgccacctccagatcagatggggacacacaacccctggatatgtttcattgtcagattttgtgcttgattttaagaatggaattgtgggtatctttcctttttttttaatgtatcttaactgttgcctgtcagtgtttacaaactagtgcgttgacggcaccgtgtccaagtttttagaacccttgttagccagaccgaggtgtcctggtcaccgtttcaccatcatgctttgatgttcccctgtctttccctcttctgctctcaagagcaaaggttaatttaaggacaaagatgaagtcactgtaaactaatctgtcattgtttttaccttccttttctttttcagtgcagaaattaaaagtaagtataaagcaccgtgattgggagtgtttttgcgtgtgtcggaatcactggtaaatgttggctgagaacaatccctccccttgcacttgtgaaaacactttgagcgctttaagagattagcctgagaaataattaaatatcttttctcttc

SEQ ID NO: 34345 - DNA, 3054 bp, Homo sapiens
  source 1..3054: mol_type = unassigned DNA
cgcaaccacagcgcgcagggcaggcgcgagctggcctctgagccccggcctcggaccgcccactccactcccggcacgcccggtgccgccttccggctccagtccccgggctcggcctcggcgaggtgtaattcgcagcgcgggccggccccggaggctctcggcgagcgcggcgcggtaacaagtgggcgaggatgccgtacgagatcaagaaggtgttcgccagcctcccgcaggtggagaggggcgtctccaagatcatcggcggcgaccctaagggcaacaattttctgtacaccaatggaaagtgcgtcatcctaaggaacatcgacaacccagcccttgctgacatctacacagagcacgcccatcaggtggtggtggccaagtatgcgcccagcggattctacattgcctccggagatgtgtctgggaagctgaggatctgggataccacgcagaaggagcacctgttgaagtatgagtaccagcctttcgctgggaagatcaaagacattgcttggactgaagacagtaagaggatcgccgtggtcggggaaggaagggagaagtttggagcagtcttcctctgggatagtggctcttctgtgggcgagattacaggacacaacaaagtcatcaacagcgtggacatcaagcagagccggccataccggctggccacgggaagcgatgataactgcgcggcattctttgagggacccccattcaagttcaagttcacaattggcgaccacagccgctttgtcaactgtgtgcgattctctcctgatgggaacagatttgccacagccagtgctgacggccagatatacatctatgacgggaagactggggagaaggtgtgcgcgctgggcggaagcaaggcccacgacggtgggatttacgcaattagttggagtcccgacagcacccatttgctttctgcttctggggacaaaacttccaagatttgggacgtcagcgtgaactccgtggtcagcacatttcccatgggctccacggttctggaccagcagctgggctgcctatggcagaaggaccacctgctcagtgtctccctgtccgggtacatcaactatctggacagaaacaaccccagcaagcccctgcacgtcatcaagggtcacagtaaatcgatccagtgtctgacggtgcataaaaacggcggcaagtcctacatttactctgggagccacgacggacacattaattactgggattcagagacgggggagaacgactccttcgctgggaaaggccacacgaaccaggtgtccaggatgaccgtggatgagtcggggcagctcatcagctgcagcatggacgacaccgtgcggtacaccagcctcatgctgcgggactacagcggacaaggagttgtgaaactggacgttcagccaaagtgcgtagccgtcggccccgggggatacgccgtggtcgtgtgcattggacagattgtcctgctgaaggatcagaggaagtgcttcagcatcgacaaccccggctacgagcccgaagttgtggcagtgcaccccggcggggacacggtggcaattgggggtgtggacggcaacgtccgcctgtattccatcctgggcaccacgctgaaggatgagggcaagctcctagaggccaagggccccgtgaccgacgtggcctactcccacgacggcgccttcctcgcggtgtgcgacgccagcaaggtggtcacagtgttcagcgttgctgacggctactcggagaacaatgttttttatggacaccatgcaaaaatcgtctgcctggcctggtccccagacaatgaacactttgcctccggtggcatggacatgatggtgtatgtttggaccctgagtgacccggaaaccagagtcaagatccaagatgcacaccggctgcaccatgtcagcagcctggcctggctggacgagcacacgctggtcacgacctcccatgatgcctctgtcaaggagtggacaatcacctactgaggagccccacccccgcctctggatggaccgaatcagggactagagtttaactgcagcggaacatgtcatttctctatttctgtgacgcgcccccatgcccccaccccaccacaagaggcaggagggcccagtcatgaccctcgtctctgcagggtgtctgtacacgttcttctgaaagctttagacagtaacagtttgcacatgaaaaataaagcgagcacctaaacaatgtgtggagcataactaaaacccacagcccaaccaaaccttgagaatgcgaaacattccagaggcagtagcctccaaagcacacagagcccctggccccgccgcggctctcactatctgtcaggggaggttgtacaggtgaatgagccggggggctcatgttcctgcctgcagaacatttctgtactagtgagaagagggaatatgcattgcagttcagcaaagccggaattctgtgttgaacagatgtctgtctccctagtgtgtgactcacaccttgtggctgccttcagagcgccacctccagatcagatggggacacacaacccctggatatgtttcattgtcagattttgtgcttgattttaagaatggaattgtgggtatctttcctttttttttaatgtatcttaactgttgcctgtcagtgtttacaaactagtgcgttgacggcaccgtgtccaagtttttagaacccttgttagccagaccgaggtgtcctggtcaccgtttcaccatcatgctttgatgttcccctgtctttccctcttctgctctcaagagcaaaggttaatttaaggacaaagatgaagtcactgtaaactaatctgtcattgtttttaccttccttttctttttcagtgcagaaattaaaagtaagtataaagcaccgtgattgggagtgtttttgcgtgtgtcggaatcactggtaaatgttggctgagaacaatccctccccttgcacttgtgaaaacactttgagcgctttaagagattagcctgagaaataattaaatatcttttctcttca

SEQ ID NO: 34346 - DNA, 1691 bp, Homo sapiens
  source 1..1691: mol_type = unassigned DNA
cgcagcgcgggccggccccggaggctctcggcgagcgcggcgcggtaacaagtgggcgaggatgccgtacgagatcaagaaggtgttcgccagcctcccgcaggtggagaggggcgtctccaagatcatcggcggcgaccctaagggcaacaattttctgtacaccaatggaaagtgcgtcatcctaaggaacatcgacgaccacagccgctttgtcaactgtgtgcgattctctcctgatgggaacagatttgccacagccagtgctgacggccagatatacatctatgacgggaagactggggagaaggtgtgcgcgctgggcggaagcaaggcccacgacggtgggatttacgcaattagttggagtcccgacagcacccatttgctttctgcttctggggacaaaacttccaagatttgggacgtcagcgtgaactccgtggtcagcacatttcccatgggctccacggttctggaccagcagctgggctgcctatggcagaaggaccacctgctcagtgtctccctgtccgggtacatcaactatctggacagaaacaaccccagcaagcccctgcacgtcatcaagggtcacagtaaatcgatccagtgtctgacggtgcataaaaacggcggcaagtcctacatttactctgggagccacgacggacacattaattactgggattcagagacgggggagaacgactccttcgctgggaaaggccacacgaaccaggtgtccaggatgaccgtggatgagtcggggcagctcatcagctgcagcatggacgacaccgtgcggtacaccagcctcatgctgcgggactacagcggacaaggagttgtgaaactggacgttcagccaaagtgcgtagccgtcggccccgggggatacgccgtggtcgtgtgcattggacagattgtcctgctgaaggatcagaggaagtgcttcagcatcgacaaccccggctacgagcccgaagttgtggcagtgcaccccggcggggacacggtggcaattgggggtgtggacggcaacgtccgcctgtattccatcctgggcaccacgctgaaggatgagggcaagctcctagaggccaagggccccgtgaccgacgtggcctactcccacgacggcgccttcctcgcggtgtgcgacgccagcaaggtggtcacagtgttcagcgttgctgacggctactcggagaacaatgttttttatggacaccatgcaaaaatcgtctgcctggcctggtccccagacaatgaacactttgcctccggtggcatggacatgatggtgtatgtttggaccctgagtgacccggaaaccagagtcaagatccaagatgcacaccggctgcaccatgtcagcagcctggcctggctggacgagcacacgctggtcacgacctcccatgatgcctctgtcaaggagtggacaatcacctactgaggagccccacccccgcctctggatggaccgaatcagggactagagtttaactgcagcggaacatgtcatttctctatttctgtgacgcgcccccatgcccccaccccaccacaagaggcaggagggcccagtcatgaccctcgtctctgcagggtgtctgtacacgttcttctgaaagctttagacagtaacagtttgcacatgaaaaataaagcgagcacctaaacaa

SEQ ID NO: 34347 - DNA, 4724 bp, Homo sapiens
  source 1..4724: mol_type = unassigned DNA
cgcctaagcggcggaactctggagagtgcggaacctaggatcctaggaaactgaaggcaacggaacctgggggcgatggaatccgggagcggtggaacccggagcctgtagaacttgaatctagaggaacctgacagcggcgccgagggggccacccggactctgtttggaacggaagcacagtgtccgccgcttcctggttgcgggtcagcgcccaggtcctgggctggccgccgggatgttgccctacacagtgaacttcaaggtgtcggcgcgcaccctcacgggggccctcaacgcccacaacaaggcggcggtggactggggctggcaaggtttaattgcttatggatgtcattcacttgtggtagtgattgattccattactgcccaaactcttcaagttttagaaaagcataaagctgatgttgtaaaggttaaatgggccagggaaaactatcaccataacattggctcaccatattgcttacggttagcttctgctgatgtcaatgggaagatcatcgtctgggatgtagcagcaggagtagctcagtgtgagatccaagagcatgccaagcctatccaggatgttcagtggttgtggaatcaagatgcttcccgcgatttactgcttgctatccacccgccaaattacattgtgctctggaatgccgacactggcaccaaactatggaagaagagctatgcagataacattctttctttttcttttgacccttttgatccctcacatttaactttgcttaccagcgagggtattgttttcatctcagacttctccccatccaagcctccctcaggccctgggaaaaaagtttacatatccagcccacactctagcccagctcataacaagctggccacagccacaggtgccaagaaagctctaaataaagtaaaaattttaatcactcaagagaaacctagtgctgaattcataactctcaatgattgccttcagttggcatacctgccttcaaaaaggaatcacatgttgttgctctatcctcgagagattttaatccttgaccttgaggtgaatcagacggtgggtgtgattgcaatagaacgcacaggagttccatttttacaggtaataccctgctttcagcgtgatggtttattttgtctacatgaaaatggttgtataactttacgtgttcgaagatcttataataacatttttaccacttcaaatgaggaaccagatccagatccagttcaggagcttacctatgatttacgaagccagtgtgatgcaatcagggtgacaaaaaccgtccgtcccttcagtatggtgtgctgtcctgtcaatgagaatgcagccgccctcgtagtgagtgatggcagggtcatgatatgggaactcaagtctgcagtttgtaatcgaaattcacggaacagtagttctggtgtgtcacctttatattcaccagtgtctttctgtggaattcctgtaggagtgctacagaataaactcccagacctttccttagataacatgattgggcaaagtgcaattgctggggaagaacatcccagaggttcaattctgcgggaagtgcacctcaagttcctgctgacgggactgctttcaggactgcccgcaccacagtttgctattcgtatgtgtccaccgttgaccacaaaaaacatcaagatgtatcagccactgctggctgttggtacaagtaatggttctgtcctggtgtaccatctcaccagtggtctgctacacaaagagttaagcatccactcatgtgaagtcaagggtattgaatggacaagtttgactagttttctttcttttgctacctcaacaccaaacaatatgggattagtgagaaatgaacttcaactggttgatcttccaacaggtaggagcattgcttttcgtggtgaaagaggcaatgatgaatctgccatcgaaatgattaaagtatctcatttgaagcagtatttggcagtcgtattcagagataaacccctggagctatgggatgttaggacttgtacccttcttagagagatgtccaaaaacttccctacaataactgctttggagtggtcaccatctcacaacttgaagagcctgagaaagaagcaacttgcaactcgagaggccatggcccgccagaccgtagtctcagacacagagctgagtattgttgaatcatctgtgatcagcttgctgcaggaggcagaaagtaaatctgaacttagtcagaacatctctgcccgggaacattttgtatttaccgatattgatggccaagtgtatcatctcactgttgaaggaaactcagtaaaagacagtgctcggattccaccagatggaagtatgggtagtattacctgcatcgcttggaaaggtgatacattagtgcttggagatatggatggaaatttaaatttctgggacttgaaaggcagagtatccagaggaatacccacacaccgaagttgggtgaggaagattcgttttgctcctggtaaaggaaatcaaaaattaatagcaatgtacaatgatggagctgaagtgtgggatactaaagaggttcagatggtgagcagtttaagaagtggcagaaatgtgacctttcgtatattggatgtggactggtgtacgtcagataaagtgatcttggcctcagatgatgggtgcatcagagtcctagagatgtctatgaagtctgcgtgctttagaatggatgaacaagagttaaccgagcctgtgtggtgcccctatctccttgttccaagggcctctcttgccttgaaagccttcttattacaccagccttggaatggacagtattctttggacatttctcatgttgactatccagaaaatgaagaaataaagaatctcctccaagaacagttgaattcattgtctaatgacataaagaaactgttgcttgatccagaattcactctcttgcagaggtgcctgcttgtttcaaggctctatggtgatgaatcggagctgcacttctggactgtcgctgcccactacctgcacagcttatcccaggaaaagtcagccagcacaacagctcctaaagaagctgctcctcgagacaaactgagcaacccactggatatatgctatgacgtgctctgtgaaaatgcctactttcagaaatttcagctagaaagggttaatctgcaggaagtgaaacggtcaacttatgatcatacaaggaaatgtacagaccagctactgctcttgggtcaaacagacagagctgtgcagttgctgttggaaacaagtgcagataaccagcattattactgtgattcactgaaagcctgtttagtcactactgtcacctcgtcaggcccctctcagagcaccattaagttggtggcaacgaatatgattgccaatggcaaattggcagagggcgttcagttgctctgcctgatagataaggctgcagacgcctgccgctacctgcagacatacggcgagtggaatcgggctgcatggctggcaaaagtccgtttgaatcctgaggagtgtgccgatgttttaaggcggtgggttgaccacctttgttctccacaagtcaatcagaaatcaaaggctctcctggttctcctctctctgggctgcttttttagcgtggcagagacgcttcacagcatgagatactttgatagagcagccttatttgtggaagcttgcctcaagtatggagcatttgaagtcactgaggacacagagaaactcatcactgctatatatgcagattatgcccggagtttgaagaacctcggttttaagcagggagcagttctctttgcttcaaaagccggagcagctggcaaagacttattgaatgagcttgagtcccccaaggaagaacccattgaagagtgacagcttaataaatgccagggaatctgacctggaaggcagatgggagggggctggtctggctgtggccaccgtcacagtccaggatgaagaggagtacagggtcctgtgagctgtttgaccactgttctaagactatgtgtgcccaaaagcacataagcatctatgttgagagtaagtttgtatcctgcgttggtctcagaaagaacgtgaatgcttaagattttgaaagtacataatattttatactttgggagagagctttaagagtccctggaaatactttttaatttttttaacttaaaattcaagagactgaatcacttttctcattgattaaatgtaaagattattgagaaacctatagtaaatgaaatttgtgagatgttttctcaaatatatgctgtgcctgtacttatatacagtctttcaagagagatacaaacaaggcagaaacatttaaactagtattaaaggtagtttaccaaagcattttttgttttcttaccttgaaaacacagaaccgttaattccttggtttaagcagttgctaagttttgtaattttaggctcagaggaccataggaggttttaagatttatgtttagtccgataggtgaggtctttgatattttgaattttaactccttttatgatacatcacagtaacctcatttttgaagtctttctttgtactttaatgttctctctgttctaatagttgaagtatgagatgtaactattataaactgttgctgaaaacataaatgtctgtaacttacaaacatgataaataaattaaaaattccatcca

SEQ ID NO: 34348 - DNA, 2124 bp, Homo sapiens
  source 1..2124: mol_type = unassigned DNA
ctttctgatagcaggcagccatcttgcctggagcctgagaaagggaggagagacagaaggaaccggcgacagtggtctcagggccgctccggggggcctcaagaaccggaggcagccccggaggtggtccccgatcccgggctatgctcttggatctgagaagggaaggcggagggcggcggggacaagatgggtggagaatgtcaagcaaggaatgctaggcgggggaggggcgttgctatggcgactggggaggggcggtgtctgttctgaatcgctgtgtgtcacccgggcgctgcccaggaagggcagggctggggtgatgaccatggtaacacccgggggggagttcgtgacatctccggcgcggagggactcgatgtctatggcaatggtcgcctggtggaagggacggaactagatcccttcgctcgggacgctcacattccaggcccttgtcctgcaggctgccgcgggcggacacgccagaggaggaggccggggaatggccgcggtgtggcagcaagtcttagcagtggacgcgaggtacaacgcgtaccgcacaccaacgtttccacagtttcggacgcagtatatccgccggcgcagccagctgctgcgggagaatgccaaggctgggcaccccccagcgctgcgtcggcagtacctgaggcttcgggggcagctgctgggccagcgctacgggcccctctccgagccaggcagtgctcgtgcctatagcaacagcatcgtccgcagtagccgcactactcttgaccgcatggaggactttgaggatgatcctcgggccctgggggcccgtgggcaccgtcgttctgtcagcagaggctcctaccagctgcaggcgcagatgaaccgtgccgtctatgaggacaggccccctggcagcgtggtgcccacgtcagcagcagaggcaagtcgggccatggccggggacacgtcactgagcgagaactatgcctttgcgggcatgtatcatgtttttgaccagcacgtggatgaggcagtcccaagggtgcgcttcgccaatgatgaccgacaccgcctggcctgctgctcactcgacggcagcatctccctgtgccagctggtgcctgccccacccacagtgcttcgcgtgctacggggccacacccgtggtgtctccgacttcgcctggtccctctccaatgacatcctcgtgtccacctcactggatgccaccatgcgcatctgggcctctgaggatggtcgctgcatccgagagatccctgaccccgatagcgctgaactgctctgctgcaccttccagcctgtcaacaacaacctcactgtggtggggaacgccaagcacaacgtgcatgtcatgaacatctccacaggcaagaaagtgaaggggggctccagcaagctgacaggccgtgtccttgctctgtcctttgatgcccctggccggctgctctgggcgggtgatgaccatggcagtgtcttctctttcctctttgatatggccacagggaagctgaccaaagccaagcgtttggtggtgcatgaggggagccctgtgaccagcatctcagcccggtcctgggtcagccgcgaggcccgggatccctcactgctcatcaatgcttgcctcaacaagttgctgctctacagggtggtagacaacgaggggaccctgcagctgaagagaagcttccccatcgagcagagctcacatcctgtgcgcagcatcttctgtcccctcatgtccttccgccagggggcctgcgtggtgacgggcagtgaggacatgtgcgtgcacttctttgatgtggagcgggcggccaaggctgctgtcaacaagctgcagggccacagtgcacctgtgcttgatgtcagcttcaactgcgacgagagcctactggcctccagtgacgccagcggcatggtcatcgtctggaggcgggagcagaagtagggtcctgtcggccctgctgctgtcctccatcccacccctcttactccagcctcgtgttgtaaataaagtttcggtggtcatgctgagggccggctcccagctctgccggggacggacagggcagagggcagcgggcagctccaggaacacggtggaacggg

SEQ ID NO: 34349 - DNA, 1791 bp, Homo sapiens
  source 1..1791: mol_type = unassigned DNA
tgggctcggcagttctttctgatagcaggcagccatcttgcctggagcctgagaaagggaggagagacagaaggaaccggcgacagtggtctcagggccgctccggggggcctcaagaaccggaggcagccccggaggctgccgcgggcggacacgccagaggaggaggccggggaatggccgcggtgtggcagcaagtcttagcagtggacgcgaggtacaacgcgtaccgcacaccaacgtttccacagtttcggacgcagtatatccgccggcgcagccagctgctgcgggagaatgccaaggctgggcaccccccagcgctgcgtcggcagtacctgaggcttcgggggcagctgctgggccagcgctacgggcccctctccgagccaggcagtgctcgtgcctatagcaacagcatcgtccgcagtagccgcactactcttgaccgcatggaggactttgaggatgatcctcgggccctgggggcccgtgggcaccgtcgttctgtcagcagaggctcctaccagctgcaggcgcagatgaaccgtgccgtctatgaggacaggccccctggcagcgtggtgcccacgtcagcagcagaggcaagtcgggccatggccggggacacgtcactgagcgagaactatgcctttgcgggcatgtatcatgtttttgaccagcacgtggatgaggcagtcccaagggtgcgcttcgccaatgatgaccgacaccgcctggcctgctgctcactcgacggcagcatctccctgtgccagctggtgcctgccccacccacagtgcttcgcgtgctacggggccacacccgtggtgtctccgacttcgcctggtccctctccaatgacatcctcgtgtccacctcactggatgccaccatgcgcatctgggcctctgaggatggtcgctgcatccgagagatccctgaccccgatagcgctgaactgctctgctgcaccttccagcctgtcaacaacaacctcactgtggtggggaacgccaagcacaacgtgcatgtcatgaacatctccacaggcaagaaagtgaaggggggctccagcaagctgacaggccgtgtccttgctctgtcctttgatgcccctggccggctgctctgggcgggtgatgaccatggcagtgtcttctctttcctctttgatatggccacagggaagctgaccaaagccaagcgtttggtggtgcatgaggggagccctgtgaccagcatctcagcccggtcctgggtcagccgcgaggcccgggatccctcactgctcatcaatgcttgcctcaacaagttgctgctctacagggtggtagacaacgaggggaccctgcagctgaagagaagcttccccatcgagcagagctcacatcctgtgcgcagcatcttctgtcccctcatgtccttccgccagggggcctgcgtggtgacgggcagtgaggacatgtgcgtgcacttctttgatgtggagcgggcggccaaggctgctgtcaacaagctgcagggccacagtgcacctgtgcttgatgtcagcttcaactgcgacgagagcctactggcctccagtgacgccagcggcatggtcatcgtctggaggcgggagcagaagtagggtcctgtcggccctgctgctgtcctccatcccacccctcttactccagcctcgtgttgtaaataaagtttcggtggtcatgctgagggccggctcccagctctgccggggacggacagggcagagggcagcgggcagctccaggaacacggtggaa

SEQ ID NO: 34350 - DNA, 2150 bp, Homo sapiens
  source 1..2150: mol_type = unassigned DNA
atggaagcagtagtgttaccttggcagatatttggagtacgggagttgcctgtggaaagaggtgtcaccatgaaaggtcccaggctcttcagagcacctggacatgtgcccactggtctcaaatgccatcctgaccaggagcatatgatttatcctcttggttgcacagtcctcattcaggcaataaatactaaagagcagaacttcctacagggtcatggcaacaacgtctcctgcttggccatctccaggtctggagagtacatcgcctccggacaagtcacattcatggggttcaaggcagacatcattttgtgggattataagaacagagagctgcttgctcggctgtcccttcacaaaggcaaaattgaagctctggccttttctccaaatgatttgtacttggtatcactaggaggcccagatgacggaagtgtggtggtgtggagcatagccaagagagatgccatctgtggcagccctgcagccggcctcaatgttggcaatgccaccaatgtgatcttctccaggtgccgggatgagatgtttatgactgctggaaatgggacaattcgagtatgggaattggatcttccaaatagaaaaatctggccaactgagtgccaaacaggacagttgaaaagaatagtcatgagtattggagtggatgatgatgatagctttttctaccttggcaccacgactggagatattctaaaaatgaaccccaggactaaactgctgacagatgttgggcctgcgaaggacaaattcagtttgggagtgtcagctatcaggtgcctgaagatggggggtttgttggtgggctctggagccggactgctggtcttctgtaaaagccctggctacaaacccatcaagaagattcagttacaaggcggcatcacttctatcacacttcgaggagaaggacaccagtttctcgtaggaacagaagaatcgcacatttatcgtgtcagcttcacggatttcaaagagacgctcatagcgacttgtcactttgatgctgtcgaggatattgtctttccatttggcactgctgagctatttgcaacctgtgccaagaaggatatcagggtgtggcacacatcatccaacagggagctgctgcggatcaccgtgcccaacatgacctgccacggcatcgacttcatgagggacggcaaaagcatcatttcagcatggaacgacggtaaaatccgagccttcgccccagagacaggccgactgatgtatgtcattaacaatgctcacaggatcggcgtcaccgccatcgccaccaccagtgactgtaaaagggtcatcagtggcggtggggaaggggaggtgagggtatggcagataggctgtcagacccagaagctggaggaggccctgaaggaacacaagtcatcagtgtcctgcattagggtgaagaggaacaacgaggagtgtgtcaccgccagcaccgatgggacttgtatcatttgggaccttgtgcgtctcaggaggaatcagatgatactagccaacaccttattccagtgtgtgtgctatcaccctgaggagttccagatcatcaccagcggaacagacagaaagattgcttactgggaagtatttgatgggacagtaatcagagaattggaaggttccctgtctgggtcgataaatggcatggatatcacacaggaaggggtgcactttgtcacaggtggaaatgaccatctggtcaaagtttgggattataatgagggtgaagtgactcacgttggggtgggacacagtggcaacatcacacgcatccgcataagtccaggaaatcaatatattgttagtgtaagtgccgatggagccattttgcgatggaagtacccatatacctcctgaagctgatgagatgtctctgagccttggcgttgcacgcagtcctgttgaagactgagtttagataactccaacactagtcttcatttctcacagctctgtttttgttcttgagtcaatttttctctttttctttatagaatgcattttatattcttaaattgcatattaaaattgaagtatgttcaagaataatttgtgcagactctaattagaacttttaacattttgaataaattcttagttgttggttttctgtt

SEQ ID NO: 34351 - DNA, 2193 bp, Homo sapiens
  source 1..2193: mol_type = unassigned DNA
gttaccataacgaccagaagacgctgcagccactagggaggagagcaaagtaatcagaacctcccaaggatggataacaaaatttcgccggaggcccaagtggcggagctggaacttgacgccgtgatcggcttcaatggacatgtgcccactggtctcaaatgccatcctgaccaggagcatatgatttatcctcttggttgcacagtcctcattcaggcaataaatactaaagagcagaacttcctacagggtcatggcaacaacgtctcctgcttggccatctccaggtctggagagtacatcgcctccggacaagtcacattcatggggttcaaggcagacatcattttgtgggattataagaacagagagctgcttgctcggctgtcccttcacaaaggcaaaattgaagctctggccttttctccaaatgatttgtacttggtatcactaggaggcccagatgacggaagtgtggtggtgtggagcatagccaagagagatgccatctgtggcagccctgcagccggcctcaatgttggcaatgccaccaatgtgatcttctccaggtgccgggatgagatgtttatgactgctggaaatgggacaattcgagtatgggaattggatcttccaaatagaaaaatctggccaactgagtgccaaacaggacagttgaaaagaatagtcatgagtattggagtggatgatgatgatagctttttctaccttggcaccacgactggagatattctaaaaatgaaccccaggactaaactgctgacagatgttgggcctgcgaaggacaaattcagtttgggagtgtcagctatcaggtgcctgaagatggggggtttgttggtgggctctggagccggactgctggtcttctgtaaaagccctggctacaaacccatcaagaagattcagttacaaggcggcatcacttctatcacacttcgaggagaaggacaccagtttctcgtaggaacagaagaatcgcacatttatcgtgtcagcttcacggatttcaaagagacgctcatagcgacttgtcactttgatgctgtcgaggatattgtctttccatttggcactgctgagctatttgcaacctgtgccaagaaggatatcagggtgtggcacacatcatccaacagggagctgctgcggatcaccgtgcccaacatgacctgccacggcatcgacttcatgagggacggcaaaagcatcatttcagcatggaacgacggtaaaatccgagccttcgccccagagacaggccgactgatgtatgtcattaacaatgctcacaggatcggcgtcaccgccatcgccaccaccagtgactgtaaaagggtcatcagtggcggtggggaaggggaggtgagggtatggcagataggctgtcagacccagaagctggaggaggccctgaaggaacacaagtcatcagtgtcctgcattagggtgaagaggaacaacgaggagtgtgtcaccgccagcaccgatgggacttgtatcatttgggaccttgtgcgtctcaggaggaatcagatgatactagccaacaccttattccagtgtgtgtgctatcaccctgaggagttccagatcatcaccagcggaacagacagaaagattgcttactgggaagtatttgatgggacagtaatcagagaattggaaggttccctgtctgggtcgataaatggcatggatatcacacaggaaggggtgcactttgtcacaggtggaaatgaccatctggtcaaagtttgggattataatgagggtgaagtgactcacgttggggtgggacacagtggcaacatcacacgcatccgcataagtccaggaaatcaatatattgttagtgtaagtgccgatggagccattttgcgatggaagtacccatatacctcctgaagctgatgagatgtctctgagccttggcgttgcacgcagtcctgttgaagactgagtttagataactccaacactagtcttcatttctcacagctctgtttttgttcttgagtcaatttttctctttttctttatagaatgcattttatattcttaaattgcatattaaaattgaagtatgttcaagaataatttgtgcagactctaattagaacttttaacattttgaataaattcttagttgttggttttctgttataa

SEQ ID NO: 34352 - DNA, 1985 bp, Homo sapiens
  source 1..1985: mol_type = unassigned DNA
gttaccataacgaccagaagacgctgcagccactagggaggagagcaaagtaatcagaacctcccaaggatggataacaaaatttcgccggaggcccaagtggcggagctggaacttgacgccgtgatcggcttcaatgacatcattttgtgggattataagaacagagagctgcttgctcggctgtcccttcacaaaggcaaaattgaagctctggccttttctccaaatgatttgtacttggtatcactaggaggcccagatgacggaagtgtggtggtgtggagcatagccaagagagatgccatctgtggcagccctgcagccggcctcaatgttggcaatgccaccaatgtgatcttctccaggtgccgggatgagatgtttatgactgctggaaatgggacaattcgagtatgggaattggatcttccaaatagaaaaatctggccaactgagtgccaaacaggacagttgaaaagaatagtcatgagtattggagtggatgatgatgatagctttttctaccttggcaccacgactggagatattctaaaaatgaaccccaggactaaactgctgacagatgttgggcctgcgaaggacaaattcagtttgggagtgtcagctatcaggtgcctgaagatggggggtttgttggtgggctctggagccggactgctggtcttctgtaaaagccctggctacaaacccatcaagaagattcagttacaaggcggcatcacttctatcacacttcgaggagaaggacaccagtttctcgtaggaacagaagaatcgcacatttatcgtgtcagcttcacggatttcaaagagacgctcatagcgacttgtcactttgatgctgtcgaggatattgtctttccatttggcactgctgagctatttgcaacctgtgccaagaaggatatcagggtgtggcacacatcatccaacagggagctgctgcggatcaccgtgcccaacatgacctgccacggcatcgacttcatgagggacggcaaaagcatcatttcagcatggaacgacggtaaaatccgagccttcgccccagagacaggccgactgatgtatgtcattaacaatgctcacaggatcggcgtcaccgccatcgccaccaccagtgactgtaaaagggtcatcagtggcggtggggaaggggaggtgagggtatggcagataggctgtcagacccagaagctggaggaggccctgaaggaacacaagtcatcagtgtcctgcattagggtgaagaggaacaacgaggagtgtgtcaccgccagcaccgatgggacttgtatcatttgggaccttgtgcgtctcaggaggaatcagatgatactagccaacaccttattccagtgtgtgtgctatcaccctgaggagttccagatcatcaccagcggaacagacagaaagattgcttactgggaagtatttgatgggacagtaatcagagaattggaaggttccctgtctgggtcgataaatggcatggatatcacacaggaaggggtgcactttgtcacaggtggaaatgaccatctggtcaaagtttgggattataatgagggtgaagtgactcacgttggggtgggacacagtggcaacatcacacgcatccgcataagtccaggaaatcaatatattgttagtgtaagtgccgatggagccattttgcgatggaagtacccatatacctcctgaagctgatgagatgtctctgagccttggcgttgcacgcagtcctgttgaagactgagtttagataactccaacactagtcttcatttctcacagctctgtttttgttcttgagtcaatttttctctttttctttatagaatgcattttatattcttaaattgcatattaaaattgaagtatgttcaagaataatttgtgcagactctaattagaacttttaacattttgaataaattcttagttgttggttttctgtt

SEQ ID NO: 34353 - DNA, 4705 bp, Homo sapiens
  source 1..4705: mol_type = unassigned DNA
gcggggagggtccgcgcgttggtggtgctcgcctcgcagctgcgcccgccggcttcagcaccttccgctgtccgccgctgcagccgcctcctcctccaggtgctgactattctgatgccgagtttccaattgccttgattaaagtagaaacattctatggcttggatgacttacatttcaaattggtttgagcaagatgattggtatgaaggactacaaagagcaaacatgtcccaggtaaggcaagtgggattgctggctgctggatgtcagccatggaacaaggatgtatgtgctgccagtggagacaggtttgcatattgtgcgaccctggctatctatatttatcagttggatcaccgttataatgaattcaaacttcacgcaattatgtctgaacataaaaaaacaatcacagcaatttcttggtgtccacataatcctgatctgtttgcaagtggcagtactgataatttagtgatcatttggaatgttgcagaacaaaaagtcattgctaaactcgacagtacaaaagggatccctgcttctcttagttggtgctggaatgcagaggatgtggtggcatttgtttcccacagaggcccactgttcatttggaccatctcaggaccagatagtggagtgattgtacacaaagatgctcatagcttcttgtctgatatctgtatgttcagatggcatacacaccaaaaggggaaagttgtgtttggtcatattgatggaagtctatcaatttttcatccaggtaataaaaatcagaaacatgttttgagaccagaatctcttgaagggacagatgaagaggatccagttacggccttggaatgggacccactatctactgattatcttctagtggttaatttgcattatggaattcgcctggtagattctgaatcactttcttgcataacaacatttaatcttcccagtgcagcagcttctgtacagtgcttagcctgggttcccagtgctcctgggatgtttataactggagattctcaagtgggtgttttacgcatttggaatgtttcaagaacaacacctattgataatcttaaattaaagaaaacaggatttcactgcttacatgtacttaattctcctccaagaaaaaagttttcagtccaatctccaaccaaaaatcattatacatcctcaacaagcgaagcagttccacccccaactttaacacagaatcaagcattttctcttcctcctggtcatgcagtgtgttgtttcttggatggtggagttggactttatgatatgggagctaagaagtgggattttcttagagacttgggacatgtggaaactatctttgactgcaaattcaaacctgacgatcctaatcttttagcaacagcttcatttgatggcactataaaagtctgggatataaacacattaacagcagtgtacacatccccgggtaatgaaggtgttatttattccctttcttgggctccaggtggtttaaattgtattgctgggggaacttcccgaaatggtgcttttatttggaatgttcaaaagggcaaaattatacaacgatttaatgagcatggaacaaatggaatattctgcattgcctggagtcataaagattctaaaagaatagcaacctgcagcagtgatggtttctgtattattcgaacaattgatggtaaagtgctacacaaatataaacatccagctgcagtgtttggttgtgattggagccaaaacaataaagacatgatagccactggctgtgaagacacaaatgttcgtgtttattatgtagccaccagctcagatcaaccattgaaagtatttagtgggcatacagcaaaagtgtttcatgttaaatggtctcctctgagagagggaattctttgcagtggttctgatgatggtaccgttcgaatctgggattatactcaggatgcttgcatcaatattcttaatggacacactgcacctgtgagaggattaatgtggaatactgagattccatatctgctcatatctggcagctgggactatactataaaagtatgggacactcgagaaggaacttgtgtggatactgtgtatgatcacggtgcagatgtatatggtttaacctgccatcccagtcgccccttcactatggcctcttgctcccgtgactctacagtgagactctggtcattaacagccttagtcactcctgtacaaataaatattctggcagacagatcttgggaagaaattattgggaacactgattatgctatagaaccaggcactcctcctctactgtgtggtaaagtgtcaagagatattagacaggaaatagaaaaactaactgctaattctcaagtgaaaaaactaagatggttctcagaatgtttatctcctccaggtggcagtgacaatttatggaacttggttgctgtgataaaaggacaggatgatagcttacttcctcagaactactgcaaaggaataatgcacttgaaacatctgattaaatttagaacatctgaagctcaagaactaacaacagtcaagatgtctaaatttggtggtggtattggtgtacctgctaaagaggaaagactgaaggaagctgctgaaatccacttgagattaggacaaattcagagatactgtgaacttatggttgaacttggagagtgggacaaagccctgtcaattgcaccaggagtctctgtgaaatactggaagaagttaatgcagaggagagctgaccaattaatccaggaagataaggatgatgtcattccatactgcatagccattggtgatgtgaaaaagctagtccattttttcatgtcaagaggtcagcttaaagaagctctgcttgttgcacaggctgcttgtgaaggaaatatgcagcccttacatgtttccgtgcctaaaggagcttcatattctgatgatatctacaaggaagactttaatgaactcctgcacaaagtcagtaaagaactggcagaatggtattttcaagatggtcgagcagtactagccgcatgttgccatcttgccatagataatattgagcttgctatggcatacctgattcgcggaaatgaactggagttggcagtctgtgtgggcacagtactaggagagtctgcagcaccagcaacccactatgccttagaattactggcgagaaagtgcatgatgatttcagtatgctttccatgtgttggatacagtgtccccttttgttacgttaacaggaatttggcagctgatcttcttctgatgattcctgataatgaactacatttaataaaactctgtgctttctacccaggatgtactgaagagataaatgaccttcatgataagtgtaagctacccacagtggaagaatgtatgcagttagctgagacagcccgtgcagatgacaatatatttgaaactgtaaaatattacttgttaagtcaagaacctgaaaaagcccttcctattggtattagctttgttaaagaatacatcagtagctcagactggactttggataccatataccctgttcttgacctactgagctatattcgtactgaaaaattactcttgcatacgtgtactgaagctcgaaatgagttgctgatattatgtggttacattggtgcattactggctatcagaagacagtaccaaagcattgttccagcactttatgagtacacaagtcagctattaaaacgtcgggaggtgtcagtacctttaaaaattgaatatctttctgaggaattggatgcatggagagcttgcacacagtccaccaacagatcattagaagactctccgtatacacccccttctgattcacaaagaatgatttatgcaactttattaaagagactaaaagaagagtcactgaaaggaattattggaccagattatgtgactggatcaaatcttccaagtcattctgatattcacatttcttgtcttacgggattaaaaatccagggccctgtgtttttccttgaagacgggaaatctgctatctccttgaatgatgctttgatgtgggcaaaggtgaatccattctcacctttagggactggaatacgactcaatccattctgatagaagatttttgtccatgcttgatttttttttttaaagaaaaactttcatgggttagcattaccttaatctttgttgctcaagtgccagaggttgggagaaggattgcaggttgggagaggtgggaaatagcagtgaattttagtcattaacttcaaaatatatatatatatataatttaaaggaaaaataggtgcctcctttataaacagtaatagctacgtttgggaaggaggaaacatttaaattataaaggactgaataatctaaaaagcatataaaagtttcacacagcataaaagataccaaaatatcatatggttgaaatattgaaacatattaaattgtgcaacacctagaatagtgctagacatacagtaagtacttaatggatatttgaatgattgaatatcttgaaatgttgaaatgtaaggtgtgcacagtgatcttcaacttaacaaacacttacgttctcctttataaaatgcatagtaaaccactaacgttagctgttttaataaaagttttcagttataagtttagtaaatattaataaatggatacacattcaaaatacttt

SEQ ID NO: 34354 - DNA, 1764 bp, Homo sapiens
  source 1..1764: mol_type = unassigned DNA
gtgctcgcctcgcagctgcgcccgccggcttcagcaccttccgctgtccgccgctgcagccgcctcctcctccaggcaaacatgtcccaggtaaggcaagtgggattgctggctgctggatgtcagccatggaacaaggatgtatgtgctgccagtggagacaggtttgcatattgtgcgaccctggctatctatatttatcagttggatcaccgttataatgaattcaaacttcacgcaattatgtctgaacataaaaaaacaatcacagcaatttcttggtgtccacataatcctgatctgtttgcaagtggcagtactgataatttagtgatcatttggaatgttgcagaacaaaaagtcattgctaaactcgacagagcaagaccaccatctccaaaaattatatatataaaaataattaatattatagaagagaatatacacaactcagagatgcaatggataatataaaaagagtacctgagatgtatttttttaaactcttagagatatctgtaactcaaatttttcttaggtgaggaggattattaactggcacatatgtactaaaaacccctcacttaaaaatggcagtctcaatcctactgtcattctttttattttaaaataaataaataagcctatctttttgtgcttacatacttaaaaggatatcattaagtatataaacaatcattacttctgtatttttaatgaatgcaggaaaataatatttttatgtataaaagatgaagaaaaaattttgcaagtctttaagcacataaatacaacagaatagccacccaatttctgtctgaaatctaaattggatggatttgaccatcattctattatctttgatttctacaatgtctatatcttattacctataactattaatttttcatagaattataaatgtcatttgactatgtcaatctgtatatattgtaccttaatatgaaaaacaaattttttaattcataaaagtatttttattagatttcatatgcatgaaacccaagcaaattatatgaatttattttactatttgaaaatgttcatattaccaataatgtggacaaattactttgcaggtttaaatatgcctctgtaaaggaagagtctcattagacaatgatttttaaagcattggaaaaatattttgcctgtaaaagttagtaactaggtggttcacaaaattacaacatcaaaatagttacatcttgtgaaaatatatgatttttatgtcaatcaagacaaatgaaatatatatgtatgtgtatatatatacatgtatgtatgaaatatatatatgtgcgtgtgtgtgtgtatatatatatatatatatatatatttctatgaaattgtccagatgtgttcaggaacatgattgcattagagcaatgactgtattttgttgtccttataacatttatattatttcagttttaagtcaaaaggtattctgaatataataaaagcctcacaaattatttgtaaaatttagtagttcatatttagtatatcagtaatatagaagacatctttatagtcaactcttaattaatgcttattgtaccaaatctttgagatatttgtacataaatgaaatatgtactttcatgctaaaattatatatcatgactgtgctataatttggcatgtcattatctagatttatatgtatgtacgtatttcaggtccttgaaattttaataaatattacagttaaatcctgatatgacatagttaccggct

SEQ ID NO: 34355 - DNA, 7397 bp, Homo sapiens
  source 1..7397: mol_type = unassigned DNA
gcctctggggcagaccctggagatcgggctcgcggcgccttccatcgtggctccgcgctggggcttgcggagcacgcttcccgcccctcggagcccgcgggcccggccgccccgcccccgggcgccctgagcgagcaggcggggagggcggggagggtccgcgcgttggtggtgctcgcctcgcagctgcgcccgccggcttcagcaccttccgctgtccgccgctgcagccgcctcctcctccaggcaaacatgtcccaggtaaggcaagtgggattgctggctgctggatgtcagccatggaacaaggatgtatgtgctgccagtggagacaggtttgcatattgtgcgaccctggctatctatatttatcagttggatcaccgttataatgaattcaaacttcacgcaattatgtctgaacataaaaaaacaatcacagcaatttcttggtgtccacataatcctgatctgtttgcaagtggcagtactgataatttagtgatcatttggaatgttgcagaacaaaaagtcattgctaaactcgacagtacaaaagggatccctgcttctcttagttggtgctggaatgcagaggatgtggtggcatttgtttcccacagaggcccactgttcatttggaccatctcaggaccagatagtggagtgattgtacacaaagatgctcatagcttcttgtctgatatctgtatgttcagatggcatacacaccaaaaggggaaagttgtgtttggtcatattgatggaagtctatcaatttttcatccaggtaataaaaatcagaaacatgttttgagaccagaatctcttgaagggacagatgaagaggatccagttacggccttggaatgggacccactatctactgattatcttctagtggttaatttgcattatggaattcgcctggtagattctgaatcactttcttgcataacaacatttaatcttcccagtgcagcagcttctgtacagtgcttagcctgggttcccagtgctcctgggatgtttataactggagattctcaagtgggtgttttacgcatttggaatgtttcaagaacaacacctattgataatcttaaattaaagaaaacaggatttcactgcttacatgtacttaattctcctccaagaaaaaagttttcagtccaatctccaaccaaaaatcattatacatcctcaacaagcgaagcagttccacccccaactttaacacagaatcaagcattttctcttcctcctggtcatgcagtgtgttgtttcttggatggtggagttggactttatgatatgggagctaagaagtgggattttcttagagacttgggacatgtggaaactatctttgactgcaaattcaaacctgacgatcctaatcttttagcaacagcttcatttgatggcactataaaagtctgggatataaacacattaacagcagtgtacacatccccgggtaatgaaggtgttatttattccctttcttgggctccaggtggtttaaattgtattgctgggggaacttcccgaaatggtgcttttatttggaatgttcaaaagggcaaaattatacaacgatttaatgagcatggaacaaatggaatattctgcattgcctggagtcataaagattctaaaagaatagcaacctgcagcagtgatggtttctgtattattcgaacaattgatggtaaagtgctacacaaatataaacatccagctgcagtgtttggttgtgattggagccaaaacaataaagacatgatagccactggctgtgaagacacaaatgttcgtgtttattatgtagccaccagctcagatcaaccattgaaagtatttagtgggcatacagcaaaagtgtttcatgttaaatggtctcctctgagagagggaattctttgcagtggttctgatgatggtaccgttcgaatctgggattatactcaggatgcttgcatcaatattcttaatggacacactgcacctgtgagaggattaatgtggaatactgagattccatatctgctcatatctggcagctgggactatactataaaagtatgggacactcgagaaggaacttgtgtggatactgtgtatgatcacggtgcagatgtatatggtttaacctgccatcccagtcgccccttcactatggcctcttgctcccgtgactctacagtgagactctggtcattaacagccttagtcactcctgtacaaataaatattctggcagacagatcttgggaagaaattattgggaacactgattatgctatagaaccaggcactcctcctctactgtgtggtaaagtgtcaagagatattagacaggaaatagaaaaactaactgctaattctcaagtgaaaaaactaagatggttctcagaatgtttatctcctccaggtggcagtgacaatttatggaacttggttgctgtgataaaaggacaggatgatagcttacttcctcagaactactgcaaaggaataatgcacttgaaacatctgattaaatttagaacatctgaagctcaagaactaacaacagtcaagatgtctaaatttggtggtggtattggtgtacctgctaaagaggaaagactgaaggaagctgctgaaatccacttgagattaggacaaattcagagatactgtgaacttatggttgaacttggagagtgggacaaagccctgtcaattgcaccaggagtctctgtgaaatactggaagaagttaatgcagaggagagctgaccaattaatccaggaagataaggatgatgtcattccatactgcatagccattggtgatgtgaaaaagctagtccattttttcatgtcaagaggtcagcttaaagaagctctgcttgttgcacaggctgcttgtgaaggaaatatgcagcccttacatgtttccgtgcctaaaggagcttcatattctgatgatatctacaaggaagactttaatgaactcctgcacaaagtcagtaaagaactggcagaatggtattttcaagatggtcgagcagtactagccgcatgttgccatcttgccatagataatattgagcttgctatggcatacctgattcgcggaaatgaactggagttggcagtctgtgtgggcacagtactaggagagtctgcagcaccagcaacccactatgccttagaattactggcgagaaagtgcatgatgatttcagtatgctttccatgtgttggatacagtgtccccttttgttacgttaacaggaatttggcagctgatcttcttctgatgattcctgataatgaactacatttaataaaactctgtgctttctacccaggatgtactgaagagataaatgaccttcatgataagtgtaagctacccacagtggaagaatgtatgcagttagctgagacagcccgtgcagatgacaatatatttgaaactgtaaaatattacttgttaagtcaagaacctgaaaaagcccttcctattggtattagctttgttaaagaatacatcagtagctcagactggactttggataccatataccctgttcttgacctactgagctatattcgtactgaaaaattactcttgcatacgtgtactgaagctcgaaatgagttgctgatattatgtggttacattggtgcattactggctatcagaagacagtaccaaagcattgttccagcactttatgagtacacaagtcagctattaaaacgtcgggaggtgtcagtacctttaaaaattgaatatctttctgaggaattggatgcatggagagcttgcacacagtccaccaacagatcattagaagactctccgtatacacccccttctgattcacaaagaatgatttatgcaactttattaaagagactaaaagaagagtcactgaaaggaattattggaccagattatgtgactggatcaaatcttccaagtcattctgatattcacatttcttgtcttacgggattaaaaatccagggccctgtgtttttccttgaagacgggaaatctgctatctccttgaatgatgctttgatgtgggcaaaggtgaatccattctcacctttagggactggaatacgactcaatccattctgatagaagatttttgtccatgcttgatttttttttttaaagaaaaactttcatgggttagcattaccttaatctttgttgctcaagtgccagaggttgggagaaggattgcaggttgggagaggtgggaaatagcagtgaattttagtcattaacttcaaaatatatatatatatataatttaaaggaaaaataggtgcctcctttataaacagtaatagctacgtttgggaaggaggaaacatttaaattataaaggactgaataatctaaaaagcatataaaagtttcacacagcataaaagataccaaaatatcatatggttgaaatattgaaacatattaaattgtgcaacacctagaatagtgctagacatacagtaagtacttaatggatatttgaatgattgaatatcttgaaatgttgaaatgtaaggtgtgcacagtgatcttcaacttaacaaacacttacgttctcctttataaaatgcatagtaaaccactaacgttagctgttttaataaaagttttcagttataagtttagtaaatattaataaatggatacacattcaaaatacttttaaaaaaaagaaaatgttaccagtttttttatctgaagtttaactgtcccattgtaaaggtgtaagttatataggcttgaaaaaaattggcgggtaaaaatcacaaaatgcagtcgaatatatatatgaaaacttgcattaggtgataaagtgactattttaagagattcagcatgcatggatattagttttgattaatgtgtacaataatttacacagtatactctagtcaatttatgttaactttatttaaaacacaatttatttggccgggcacggtggctcacacctgtaatctcagcactttggcaggccaaggcaggtggatcacctgaggtcaggagttcatgaccagcctggccagcatggtaaaaccctgtctccactaaaaatacaaaaattagccaggcatggtggcgggcacctgtaatcccagttacttgggaagctgaggcaggagaatcccttgaacctgggaggcagaggttccagtgagccaagatcgcaccactgcactccagcctgggcaacaaagagcgaaactctgtctcaaaaaacaaaccaacaaaaaccacaattgatttgatgaaaattagttttaagtaaatgtttgtaaatagatattggttgaatttttggatatattatgttgatttaacttttaaaatgttgtttaaaagtgtgaagctatgaaaagcctgataatgtgactacagatatttcagttggactagaattctgactttgaaacttattaaattaatgcatactggaagtactttgatactcaagttgtttcacaagatttataatatagatggttttgtttgactaaagaataatctcatataactagaatacttgtggcttttattatctttaaacttgttgcatttaaaatatttttaaaaccttcttaacaaaacttcttaaaactggaaaaaatatatattatgtatctatgtatcatatttatcacatgaccacttttgattccttaaaaagacattacaggcttaaattccattttattaaaaaaaaaaaattgcctgtaatcccagcacttcaggaggccgagatgggcagatcttgaggtcggtagatggagaccatcctggccaacatggtgaaaccctgtctctactaaaaatacaaaaattagctgggtgtggtggtgtgtacctgtagtcccagctacccaggaagctaaggcaggagaatcgcttgaatccaggaggcggaggttgcagtgagctgagatcgcactactgcactccagcctgggcgacagagcaagaccaccatctccaaaaattatatatataaaaataattaatattatagaagagaatatacacaactcagagatgcaatggataatataaaaagagtacctgagatgtatttttttaaactcttagagatatctgtaactcaaatttttcttaggtgaggaggattattaactggcacatatgtactaaaaacccctcacttaaaaatggcagtctcaatcctactgtcattctttttattttaaaataaataaataagcctatctttttgtgcttacatacttaaaaggatatcattaagtatataaacaatcattacttctgtatttttaatgaatgcaggaaaataatatttttatgtataaaagatgaagaaaaaattttgcaagtctttaagcacataaatacaacagaatagccacccaatttctgtctgaaatctaaattggatggatttgaccatcattctattatctttgatttctacaatgtctatatcttattacctataactattaatttttcatagaattataaatgtcatttgactatgtcaatctgtatatattgtaccttaatatgaaaaacaaattttttaattcataaaagtatttttattagatttcatatgcatgaaacccaagcaaattatatgaatttattttactatttgaaaatgttcatattaccaataatgtggacaaattactttgcaggtttaaatatgcctctgtaaaggaagagtctcattagacaatgatttttaaagcattggaaaaatattttgcctgtaaaagttagtaactaggtggttcacaaaattacaacatcaaaatagttacatcttgtgaaaatatatgatttttatgtcaatcaagacaaatgaaatatatatgtatgtgtatatatatacatgtatgtatgaaatatatatatgtgcgtgtgtgtgtgtatatatatatatatatatatatatttctatgaaattgtccagatgtgttcaggaacatgattgcattagagcaatgactgtattttgttgtccttataacatttatattatttcagttttaagtcaaaaggtattctgaatataataaaagcctcacaaattatttgtaaaatttagtagttcatatttagtatatcagtaatatagaagacatctttatagtcaactcttaattaatgcttattgtaccaaatctttgagatatttgtacataaatgaaatatgtactttcatgctaaaattatatatcatgactgtgctataatttggcatgtcattatctagatttatatgtatgtacgtatttcaggtccttgaaattttaataaatattacagttaaatcctgatatgacatagtt

SEQ ID NO: 34356 - DNA, 4294 bp, Homo sapiens
  source 1..4294: mol_type = unassigned DNA
gcctctggggcagaccctggagatcgggctcgcggcgccttccatcgtggctccgcgctggggcttgcggagcacgcttcccgcccctcggagcccgcgggcccggccgccccgcccccgggcgccctgagcgagcaggcggggagggcggggagggtccgcgcgttggtggtgctcgcctcgcagctgcgcccgccggcttcagcaccttccgctgtccgccgctgcagccgcctcctcctccaggcaaacatgtcccaggtaaggcaagtgggattgctggctgctggatgtcagccatggaacaaggatgtatgtgctgccagtggagacaggtttgcatattgtgcgaccctggctatctatatttatcagttggatcaccgttataatgaattcaaacttcacgcaattatgtctgaacataaaaaaacaatcacagcaatttcttggtgtccacataatcctgatctgtttgcaagtggcagtactgataatttagtgatcatttggaatgttgcagaacaaaaagtcattgctaaactcgacagtacaaaagggatccctgcttctcttagttggtgctggaatgcagaggatgtggtggcatttgtttcccacagaggcccactgttcatttggaccatctcaggaccagatagtggagtgattgtacacaaagatgctcatagcttcttgtctgatatctgtatgttcagatggcatacacaccaaaaggggaaagttgtgtttggtcatattgatggaagtctatcaatttttcatccaggtaataaaaatcagaaacatgttttgagaccagaatctcttgaagggacagatgaagaggatccagttacggccttggaatgggacccactatctactgattatcttctagtggttaatttgcattatggaattcgcctggtagattctgaatcactttcttgcataacaacatttaatcttcccagtgcagcagcttctgtacagtgcttagcctgggttcccagtgctcctgggatgtttataactggagattctcaagtgggtgttttacgcatttggaatgtttcaagaacaacacctattgataatcttaaattaaagaaaacaggatttcactgcttacatgtacttaattctcctccaagaaaaaagttttcagtccaatctccaaccaaaaatcattatacatcctcaacaagcgaagcagttccacccccaactttaacacagaatcaagcattttctcttcctcctggtcatgcagtgtgttgtttcttggatggtggagttggactttatgatatgggagctaagaagtgggattttcttagagacttgggacatgtggaaactatctttgactgcaaattcaaacctgacgatcctaatcttttagcaacagcttcatttgatggcactataaaagtctgggatataaacacattaacagcagtgtacacatccccgggtaatgaaggtgttatttattccctttcttgggctccaggtggtttaaattgtattgctgggggaacttcccgaaatggtgcttttatttggaatgttcaaaagggcaaaattatacaacgatttaatgagcatggaacaaatggaatattctgcattgcctggagtcataaagattctaaaagaatagcaacctgcagcagtgatggtttctgtattattcgaacaattgatggtaaagtgctacacaaatataaacatccagctgcagtgtttggttgtgattggagccaaaacaataaagacatgatagccactggctgtgaagacacaaatgttcgtgtttattatgtagccaccagctcagatcaaccattgaaagtatttagtgggcatacagcaaaagtgtttcatgttaaatggtctcctctgagagagggaattctttgcagtggttctgatgatggtaccgttcgaatctgggattatactcaggatgcttgcatcaatattcttaatggacacactgcacctgtgagaggattaatgtggaatactgagattccatatctgctcatatctggcagctgggactatactataaaagtatgggacactcgagaaggaacttgtgtggatactgtgtatgatcacggtgcagatgtatatggtttaacctgccatcccagtcgccccttcactatggcctcttgctcccgtgactctacagtgagactctggtcattaacagccttagtcactcctgtacaaataaatattctggcagacagatcttgggaagaaattattgggaacactgattatgctatagaaccaggcactcctcctctactgtgtggtaaagtgtcaagagatattagacaggaaatagaaaaactaactgctaattctcaagtgaaaaaactaagatggttctcagaatgtttatctcctccaggtggcagtgacaatttatggaacttggttgctgtgataaaaggacaggatgatagcttacttcctcagaactactgcaaaggaataatgcacttgaaacatctgattaaatttagaacatctgaagctcaagaactaacaacagtcaagatgtctaaatttggtggtggtattggtgtacctgctaaagaggaaagactgaaggaagctgctgaaatccacttgagattaggacaaattcagagatactgtgaacttatggttgaacttggagagtgggacaaagccctgtcaattgcaccaggagtctctgtgaaatactggaagaagttaatgcagaggagagctgaccaattaatccaggaagataaggatgatgtcattccatactgcatagccattggtgatgtgaaaaagctagtccattttttcatgtcaagaggtcagcttaaagaagctctgcttgttgcacaggctgcttgtgaaggaaatatgcagcccttacatgtttccgtgcctaaaggagcttcatattctgatgatatctacaaggaagactttaatgaactcctgcacaaagtcagtaaagaactggcagaatggtattttcaagatggtcgagcagtactagccgcatgttgccatcttgccatagataatattgagcttgctatggcatacctgattcgcggaaatgaactggagttggcagtctgtgtgggcacagtactaggagagtctgcagcaccagcaacccactatgccttagaattactggcgagaaagtgcatgatgatttcagtatggaatttggcagctgatcttcttctgatgattcctgataatgaactacatttaataaaactctgtgctttctacccaggatgtactgaagagataaatgaccttcatgataagtgtaagctacccacagtggaagaatgtatgcagttagctgagacagcccgtgcagatgacaatatatttgaaactgtaaaatattacttgttaagtcaagaacctgaaaaagcccttcctattggtattagctttgttaaagaatacatcagtagctcagactggactttggataccatataccctgttcttgacctactgagctatattcgtactgaaaaattactcttgcatacgtgtactgaagctcgaaatgagttgctgatattatgtggttacattggtgcattactggctatcagaagacagtaccaaagcattgttccagcactttatgagtacacaagtcagctattaaaacgtcgggaggtgtcagtacctttaaaaattgaatatctttctgaggaattggatgcatggagagcttgcacacagtccaccaacagatcattagaagactctccgtatacacccccttctgattcacaaagaatgatttatgcaactttattaaagagactaaaagaagagtcactgaaaggaattattggaccagattatgtgactggatcaaatcttccaagtcattctgatattcacatttcttgtcttacgggattaaaaatccagggccctgtgtttttccttgaagacgggaaatctgctatctccttgaatgatgctttgatgtgggcaaaggtgaatccattctcacctttagggactggaatacgactcaatccattctgatagaagatttttgtccatgcttgatttttttttttaaagaaaaactttcatgggttagcattaccttaatctttgttgctcaagtgccagaggttgggagaaggattgcaggttgggagaggtgggaaatagcagtgaattttagtcattaacttcaaaatatatatatatatataatttaaaggaaaaa

SEQ ID NO: 34357 - DNA, 4249 bp, Homo sapiens
  source 1..4249: mol_type = unassigned DNA
atagttcgcgtagcggctcgagcgtggagatgaagcgtattttctcactgctagaaaagacttggcttggcgcaccaatacagtttgcctggcaaaaaacatcaggaaactaccttgcagtaacaggagctgattatattgtgaaaatctttgatcgccatggtcaaaaaagaagtgaaattaacttacctggtaactgtgttgccatggattgggataaagatggagatgtcctagcagtgattgctgagaaatctagctgcatttatctttgggatgccaacacaaataagaccagccagttagacaatggcatgaggaaaacatactaagagaatcacttgtggatgttggaatgcagaaaatctgcttgctttaggtggtgaagataaaatgattacagttagtaatcaggaaggtgacacgataagacagacacaagtgagatcagagcctagcaacatgcagtttttcttgatgaagatggatgaccgaacctctgctgctgaaagcatgataagtgtggtgcttggcaagaaaactttgttttttttaaatctgaatgaaccagataacccagctgatcttgaatttcagcaggactttggcaacattgtctgctataattggtatggtgatggccgcatcatgattggtttttcatgtggacattttgtggtcatttctactcatactggagagcttggtcaagagatatttcaggctcgtaaccataaagataatctaaccagcattgcagtatcacagactcttaacaaagttgctacatgtggagataactgcattaaaatccaagacttggttgacttaaaagacatgtatgttatactcaacctggatgaggaaaataaaggattgggtaccttgtcctggactgatgatggccagttgctagcactctctacccaaaggggctcacttcatgttttcctgaccaagcttcccatacttggggatgcctgcagcacaaggattgcctatctcacctccctccttgaagtcaccgtagccaaccctgttgaaggagagctaccaatcacagtttctgttgatgtggaacccaactttgtggcagtaggtctttatcatctggctgtaggaatgaataatcgagcttggttttatgtccttggagaaaatgctgtgaaaaaattgaaagatatggagtatctgggaacagtagccagtatttgccttcattctgactatgctgctgcactttttgaaggcaaagtccagttacatttgatagaaagcgaaatcttggatgctcaagaagaacgtgagactcggcttttcccagcagtggatgataagtgccgtatcttatgccatgccttaactagtgatttcctcatctatggtacagatactggtgtcgttcagtatttctacattgaagactggcaattcgttaatgattatcgacatcctgtcagtgtgaaaaagatttttcccgacccaaatgggaccagattagttttcattgatgaaaaaagtgatggatttgtttactgtccagtcaatgacgctacctatgagattccagatttttcaccaaccattaaaggtgttctttgggaaaactggccaatggataaaggtgtatttattgcttatgatgatgataaggtgtacacttatgtctttcacaaggacactatacaaggagccaaggttattttggctggtagcaccaaagttccttttgctcataaacctttgctgctatataatggagagctgacctgccaaacacagagtggaaaagtaaacaacatctaccttagcacccatggctttctcagcaacttaaaagatacggggcctgacgaactgagaccaatgctggcacagaatttaatgctaaagaggttttctgatgcttgggaaatgtgcaggattctgaatgatgaggctgcctggaatgagttggccagagcttgtctacatcacatggaagtggagtttgcaatccgtgtttatcggagaattggaaatgttggcatagtgatgtccttggaacaaataaagggaatagaggactacaatcttttggcaggacaccttgccatgtttaccaacgattataacctggctcaggacttgtaccttgcatccagctgtcctattgctgccctggagatgagaagggatttacagcattgggacagtgctctacaactggcaaagcatttggccccagaccagataccttttatatcaaaagaatatgctattcagcttgaattcgcgggtgattatgtaaatgctttggctcattatgagaaaggaataacaggtgataataaggaacatgatgaagcttgtctggctggagtggcccagatgtccataagaatgggagacatacgtcgaggggttaaccaagccctcaagcatcccagcagggtccttaaaagagactgtggagccatattggagaatatgaagcaattttcagaagcggcccaactgtatgaaaaaggtctctactacgataaagcagcatctgtttacatccgctctaagaattgggcaaaagttggtgatcttctgccccacgtttcttctcctaagatccatttgcagtatgccaaagccaaggaagcagatggaagatacaaagaagctgttgtagcttatgaaaatgcaaaacagtggcaaagtgtaatccgcatctatctggatcacctcaataatcctgaaaaagctgtcaatattgttagagagacccagtctctggatggagccaaaatggtagccaggttttttctacagcttggtgactatgggtctgccatccagtttcttgtcatgtccaaatgcaacaatgaagctttcacactggctcagcaacacaacaaaatggaaatctatgcagatattattggttctgaagacactactaatgaagactatcaaagcattgccttatactttgaaggagaaaagagatatcttcaggctggaaaattcttcttgctgtgtggccaatattcacgagcacttaaacacttcctgaaatgcccaagctcggaagataatgtggcaatagaaatggcaattgaaactgttggtcaggccaaagatgaactgctgaccaatcagctgatagaccatctcctgggggagaacgatggcatgcctaaggatgccaagtacctgttccgcttgtacatggctctgaagcaataccgagaagctgcccagactgccatcatcattgccagagaagagcagtctgcaggcaactaccggaatgcacacgatgttctcttcagtatgtatgcagaactgaaatcccagaagatcaaaattccctccgagatggccaccaacctcatgattctgcacagctatatactagtaaagattcatgttaaaaatggagatcacatgaaaggggctcgcatgctcattcgggtggccaacaacatcagcaaatttccatcacacattgtacccatcctgacgtcaactgtgattgagtgtcacagggcaggcctgaagaactctgctttcagcttcgcagctatgttgatgaggcctgaataccgcagcaaaatagatgccaaatacaaaaagaagatcgagggaatggtcaggagacccgatatatctgagatagaagaggccacgactccatgtccattctgcaaatttcttctcccagagtgtgaactcctctgtcctggatgtaaaaacagtatcccatattgcattgcaacaggtcgacacatgttgaaagatgactggacggtgtgtccacattgtgacttccctgctctatactcagaattgaagatcatgctaaacactgaaagcacatgtcctatgtgttcagaaagattaaacgctgctcagctgaaaaagatttcagactgtacccagtacctgcgaacggaggaggaactgtgattggcacgtgcagatacaatgctcctgagaagacagcattttccacaggaggctgtttcctcccctggtggatttaagagacggtcctttctggatacagagaaatgaaacaacggtgacctctccaggtcggcactttccacttctgtacggtggcaaaacgatgacatgtaaccttgctgtttattgtactttgtatattatttcctcttcaaagtctttcttacacactctatcctctgcactgttaatagtaacctatgacataattgtaaatattcagctttttgctaacttttgtattttg

SEQ ID NO: 34358 - DNA, 4520 bp, Homo sapiens
  source 1..4520: mol_type = unassigned DNA
ggcccggcccctcgaggcaccgcctttcaattagcactcgctgattggtcgctgctcgcgcggtctcctgggtgacgggaacgcggtagcctgcttggtggagaccgggtgcgcctgcgtacttcatagttcgcgtagcggctcgagcgtggagatgaagcgtattttctcactgctagaaaagacttggcttggcgcaccaatacagtttgcctggcaaaaaacatcaggaaactaccttgcagtaacaggagctgattatattgtgaaaatctttgatcgccatggtcaaaaaagaagtgaaattaacttacctggtaactgtgttgccatggattgggataaagatggagatgtcctagcagtgattgctgagaaatctagctgcatttatctttgggatgccaacacaaataagaccagccagttagacaatggcatgagggatcaaatgtctttccttctttggtcaaaagttggaagtttcctggctgttggaactgttaaaggaaatttgcttatttataatcatcagacatctcgaaagattcctgtccttggaaaacatactaagagaatcacttgtggatgttggaatgcagaaaatctgcttgctttaggtggtgaagataaaatgattacagttagtaatcaggaaggtgacacgataagacagacacaagtgagatcagagcctagcaacatgcagtttttcttgatgaagatggatgaccgaacctctgctgctgaaagcatgataagtgtggtgcttggcaagaaaactttgttttttttaaatctgaatgaaccagataacccagctgatcttgaatttcagcaggactttggcaacattgtctgctataattggtatggtgatggccgcatcatgattggtttttcatgtggacattttgtggtcatttctactcatactggagagcttggtcaagagatatttcaggctcgtaaccataaagataatctaaccagcattgcagtatcacagactcttaacaaagttgctacatgtggagataactgcattaaaatccaagacttggttgacttaaaagacatgtatgttatactcaacctggatgaggaaaataaaggattgggtaccttgtcctggactgatgatggccagttgctagcactctctacccaaaggggctcacttcatgttttcctgaccaagcttcccatacttggggatgcctgcagcacaaggattgcctatctcacctccctccttgaagtcaccgtagccaaccctgttgaaggagagctaccaatcacagtttctgttgatgtggaacccaactttgtggcagtaggtctttatcatctggctgtaggaatgaataatcgagcttggttttatgtccttggagaaaatgctgtgaaaaaattgaaagatatggagtatctgggaacagtagccagtatttgccttcattctgactatgctgctgcactttttgaaggcaaagtccagttacatttgatagaaagcgaaatcttggatgctcaagaagaacgtgagactcggcttttcccagcagtggatgataagtgccgtatcttatgccatgccttaactagtgatttcctcatctatggtacagatactggtgtcgttcagtatttctacattgaagactggcaattcgttaatgattatcgacatcctgtcagtgtgaaaaagatttttcccgacccaaatgggaccagattagttttcattgatgaaaaaagtgatggatttgtttactgtccagtcaatgacgctacctatgagattccagatttttcaccaaccattaaaggtgttctttgggaaaactggccaatggataaaggtgtatttattgcttatgatgatgataaggtgtacacttatgtctttcacaaggacactatacaaggagccaaggttattttggctggtagcaccaaagttccttttgctcataaacctttgctgctatataatggagagctgacctgccaaacacagagtggaaaagtaaacaacatctaccttagcacccatggctttctcagcaacttaaaagatacggggcctgacgaactgagaccaatgctggcacagaatttaatgctaaagaggttttctgatgcttgggaaatgtgcaggattctgaatgatgaggctgcctggaatgagttggccagagcttgtctacatcacatggaagtggagtttgcaatccgtgtttatcggagaattggaaatgttggcatagtgatgtccttggaacaaataaagggaatagaggactacaatcttttggcaggacaccttgccatgtttaccaacgattataacctggctcaggacttgtaccttgcatccagctgtcctattgctgccctggagatgagaagggatttacagcattgggacagtgctctacaactggcaaagcatttggccccagaccagataccttttatatcaaaagaatatgctattcagcttgaattcgcgggtgattatgtaaatgctttggctcattatgagaaaggaataacaggtgataataaggaacatgatgaagcttgtctggctggagtggcccagatgtccataagaatgggagacatacgtcgaggggttaaccaagccctcaagcatcccagcagggtccttaaaagagactgtggagccatattggagaatatgaagcaattttcagaagcggcccaactgtatgaaaaaggtctctactacgataaagcagcatctgtttacatccgctctaagaattgggcaaaagttggtgatcttctgccccacgtttcttctcctaagatccatttgcagtatgccaaagccaaggaagcagatggaagatacaaagaagctgttgtagcttatgaaaatgcaaaacagtggcaaagtgtaatccgcatctatctggatcacctcaataatcctgaaaaagctgtcaatattgttagagagacccagtctctggatggagccaaaatggtagccaggttttttctacagcttggtgactatgggtctgccatccagtttcttgtcatgtccaaatgcaacaatgaagctttcacactggctcagcaacacaacaaaatggaaatctatgcagatattattggttctgaagacactactaatgaagactatcaaagcattgccttatactttgaaggagaaaagagatatcttcaggctggaaaattcttcttgctgtgtggccaatattcacgagcacttaaacacttcctgaaatgcccaagctcggaagataatgtggcaatagaaatggcaattgaaactgttggtcaggccaaagatgaactgctgaccaatcagctgatagaccatctcctgggggagaacgatggcatgcctaaggatgccaagtacctgttccgcttgtacatggctctgaagcaataccgagaagctgcccagactgccatcatcattgccagagaagagcagtctgcaggcaactaccggaatgcacacgatgttctcttcagtatgtatgcagaactgaaatcccagaagatcaaaattccctccgagatggccaccaacctcatgattctgcacagctatatactagtaaagattcatgttaaaaatggagatcacatgaaaggggctcgcatgctcattcgggtggccaacaacatcagcaaatttccatcacacattgtacccatcctgacgtcaactgtgattgagtgtcacagggcaggcctgaagaactctgctttcagcttcgcagctatgttgatgaggcctgaataccgcagcaaaatagatgccaaatacaaaaagaagatcgagggaatggtcaggagacccgatatatctgagatagaagaggccacgactccatgtccattctgcaaatttcttctcccagagtgtgaactcctctgtcctggatgtaaaaacagtatcccatattgcattgcaacaggtcgacacatgttgaaagatgactggacggtgtgtccacattgtgacttccctgctctatactcagaattgaagatcatgctaaacactgaaagcacatgtcctatgtgttcagaaagattaaacgctgctcagctgaaaaagatttcagactgtacccagtacctgcgaacggaggaggaactgtgattggcacgtgcagatacaatgctcctgagaagacagcattttccacaggaggctgtttcctcccctggtggatttaagagacggtcctttctggatacagagaaatgaaacaacggtgacctctccaggtcggcactttccacttctgtacggtggcaaaacgatgacatgtaaccttgctgtttattgtactttgtatattatttcctcttcaaagtctttcttacacactctatcctctgcactgttaatagtaacctatgacataattgtaaatattcagctttttgctaacttttgtattttgaaaaactttaaaataaaattgttgactaga

SEQ ID NO: 34359 - DNA, 1966 bp, Homo sapiens
  source 1..1966: mol_type = unassigned DNA
aaacgtattttctcactgctagaaaagacttggcttggcgcaccaatacagtttgcctggcaaaaaacatcaggaaactaccttgcagtaacaggagctgattatattgtgaaaatctttgatcgccatggtcaaaaaagaagtgaaattaacttacctggtaactgtgttgccatggattgggataaagatggagatgtcctagcagtgattgctgagaaatctagctgcatttatctttgggatgccaacacaaataagaccagccagttagacaatggcatgagggatcaaatgtctttccttctttggtcaaaagttggaagtttcctggctgttggaactgttaaaggaaatttgcttatttataatcatcagacatctcgaaagattcctgtccttggaaaacatactaagagaatcacttgtggatgttggaatgcagaaaatctgcttgctttaggtggtgaagataaaatgattacagttagtaatcaggaaggtgacacgataagacagacacaagtgagatcagagcctagcaacatgcagtttttcttgatgaagatggatgaccgaacctctgctgctgaaagcatgataagtgtggtgcttggcaagaaaactttgttttttttaaatctgaatgaaccagataacccagctgatcttgaatttcagcaggactttggcaacattgtctgctataattggtatggtgatggccgcatcatgattggtttttcatgtggacattttgtggtcatttctactcatactggagagcttggtcaagagatatttcaggctcgtaaccataaagataatctaaccagcattgcagtatcacagactcttaacaaagttgctacatgtggagataactgcattaaaatccaagacttggttgacttaaaagacatgtatgttatactcaacctggatgaggaaaataaaggattgggtaccttgtcctggactgatgatggccagttgctagcactctctacccaaaggggctcacttcatgttttcctgaccaagcttcccatacttggggatgcctgcagcacaaggattgcctatctcacctccctccttgaagtcaccgtagccaaccctgttgaaggagagctaccaatcacagtttctgttgatgtggaacccaactttgtggcagtaggtctttatcatctggctgtaggaatgaataatcgagcttggttttatgtccttggagaaaatgctgtgaaaaaattgaaagatatggagtatctgggaacagtagccagtatttgccttcattctgactatgctgctgcactttttgaaggcaaagtccagttacatttgaaagcgaaatcttggatgctcaagaagaacgtgagactcggcttttcccagcagtggatgataagtgccgtatcttatgccatgccttaactagtgatttcctcatctatggtacagatactggtgtcgttcagtatttctacatctctatactcagaattgaagatcatgctaaacactgaaagcacatgtcctatgtgttcagaaagattaaacgctgctcagctgaaaaagatttcagactgtacccagtacctgcgaacggaggaggaactgtgattggcacgtgcagatacaatgctcctgagaagacagcattttccacaggaggctgtttcctcccctggtggatttaagagacggtcctttctggatacagagaaatgaaacaacggtgacctctccaggtcggcactttccacttctgtacggtggcaaaacgatgacatgtaaccttgctgtttattgtactttgtatattatttcctcttcaaagtctttcttacacactctatcctctgcactgttaatagtaacctatgacataattgtaaatattcagctttttgctaacttttgtattttgaaaaactttaaaataaaattgttgact

SEQ ID NO: 34360 - DNA, 2513 bp, Homo sapiens
  source 1..2513: mol_type = unassigned DNA
gagcgtggagatgaagcgtattttctcactgctagaaaagacttggcttggcgcaccaatacagtttgcctggcaaaaaacatcaggaaactaccttgcagtaacaggagctgattatattgtgaaaatctttgatcgccatggtcaaaaaagaagtgaaattaacttacctggtaactgtgttgccatggattgggataaagatggagatgtcctagcagtgattgctgagaaatctagctgcatttatctttgggatgccaacacaaataagaccagccagttagacaatggcatgagggatcaaatgtctttccttctttggtcaaaagttggaagtttcctggctgttggaactgttaaaggaaatttgcttatttataatcatcagacatctcgaaagattcctgtccttggaaaacatactaagagaatcacttgtggatgttggaatgcagaaaatctgcttgctttaggtggtgaagataaaatgattacagttagtaatcaggaaggtgacacgataagacagacacaagtgagatcagagcctagcaacatgcagtttttcttgatgaagatggatgaccgaacctctgctgctgaaagcatgataagtgtggtgcttggcaagaaaactttgttttttttaaatctgaatgaaccagataacccagctgatcttgaatttcagcaggactttggcaacattgtctgctataattggtatggtgatggccgcatcatgattggtttttcatgtggacattttgtggtcatttctactcatactggagagcttggtcaagagatatttcaggctcgtaaccataaagataatctaaccagcattgcagtatcacagactcttaacaaagttgctacatgtggagataactgcattaaaatccaagacttggttgacttaaaagacatgtatgttatactcaacctggatgaggaaaataaaggattgggtaccttgtcctggactgatgatggccagttgctagcactctctacccaaaggggctcacttcatgttttcctgaccaagcttcccatacttggggatgcctgcagcacaaggattgcctatctcacctccctccttgaagtcaccgtagccaaccctgttgaaggagagctaccaatcacagtttctgttgatgtggaacccaactttgtggcagtaggtctttatcatctggctgtaggaatgaataatcgagcttggttttatgtccttggagaaaatgctgtgaaaaaattgaaagatatggagtatctgggaacagtagccagtatttgccttcattctgactatgctgctgcactttttgaaggcaaagtccagttacatttgaaagcgaaatcttggatgctcaagaagaacgtgagactcggcttttcccagcagtggatgataagtgccgtatcttatgccatgccttaactagtgatttcctcatctatggtacagatgtatgtattgccttcttttttagagaacactgggaatttttaatttttattttgtgatctcagtcattctcttttcctaccagtcttttttctatattgaatccaatacaattaatgaagttatctgtgattaattatatacattcatgtgtctctttgcagtggggatacattctgagaaacgtgtcattgggcaatttcatcattgtgtggatgtcatagagtgtgcttacaggaacctagatggtacagcccactgcacacctagcctgtgtggtagagcctattgctcctaggctacaaaccagtacagcatgtgactgtactgaatactataggtaattgtaacacaatgctatctagacatagacaaggtacagtatatgtgtgatataaaatatttaaaatggcatgcctgtatagggcacttaccatgacaggagcttgcaggactggaaatggctctgggtgagtgagtgagtgagtggtgagtgaacgtgaaggcctgcagcattactgtacactaccatagatttttatcaacactgtacacttagggacactaaacttatttaaacattttttcttcaaaaataaattaaccttagctcactgtaactttataagctttatatttaaaaaaactttttgactcttttgtagtaacacttagcttaaaacacaaacacattgtacagttacacaaaatattttcttaaaaaatattttattatatcctattctataagcttttccttgtttttcactttttttaacttttaaactttttataaaaactaagacacaaacacacacattagtgcaggcctgcatagcatcaggatcatcagtatcactgtctcccacctccgcatcttgtcccactgaaaggtcttcagcgggaataacatgcatggagctgtcatctcctgtgataacaatgccttcttctggatacctcctgaaggacctggttgagcctgttttacagttaacttttttttaataaatagaagtgcactccaaaa

SEQ ID NO: 34361 - DNA, 3858 bp, Homo sapiens
  source 1..3858: mol_type = unassigned DNA
ctcgtggaggctgagattgcttcacctgtggtatcagacatcacaacatggggctcaccaagcagtacctacgctatgttgctagtgcggtctttggcgttatcggcagccaaaaaggtaatattgtctttgtgacacttcgtggtgagaaaggacgttatgtggcagtaccagcttgtgaacacgttttcatctgggacttaaggaaaggagagaagattcttatccttcaggggcttaaacaagaagttacttgcttatgcccctccccagatgggctacacttagctgttgggtatgaggatgggtcgatccgaatcttcagtctcctgagtggggaaggaaatgtgaccttcaatggtcacaaagcagctatcactaccttgaagtatgatcagctaggaggcagactggcatctgggtccaaggacacagatattattgtatgggatgtgatcaatgaaagtggtctgtaccgtctaaaggggcacaaggatgccatcacacaagcattgtttctacgagaaaagaacctgctagttactagtgggaaagataccatggtgaaatggtgggaccttgatactcagcactgctttaaaacaatggttggccaccggactgaggtatgggggttggttctgttgtcagaagaaaagcgactcatcactggggcctcagacagtgaactgagggtatgggacatagcttatctgcaagagattgaagacccggaagaaccagaccccaagaaaatcaaaggatcttctcctggaatacaagatactcttgaggcagaggatggtgcctttgagacggatgaagcccctgaggatcgaatcctttcatgcagaaaagctggttccataatgcgggaaggaagagacagagttgtaaaccttgcagtcgacaagacaggcaggattcttgcttgccatggaactgactctgtgctagaattgttttgtatcctttccaaaaaggaaattcagaagaaaatggataagaagatgaagaaagctagaaagaaagcaaaattacattctagcaaaggagaggaggaagatcctgaggttaatgttgaaatgagtctgcaagatgaaatccagcgggtgactaatataaaaacttctgccaaaatcaagtcctttgacttgattcattcacctcacggagagttaaaggctgtcttcctgctgcagaacaacctggtggaattgtattcactgaatccatccttgcctactcctcagcctgtcaggacaagcagaatcactattgggggtcatcgcagtgatgtgcggactttgtcattcagctcagacaatattgctgttctttcagctgcagctgattccattaaaatatggaacaggtctacactgcagtgtattcgcacaatgacctgtgaatatgcactttgctcattctttgtacctggtgatagacaggtagtcataggaacaaagacagggaagctgcagctttatgacttggcttcagggaatctgctggagacaatagatgcacatgatggagctttgtggtccatgtccctctctccagatcagcgtggctttgtgacaggtggtgcagataaatctgtcaaattctgggattttgagttagtgaaagatgaaaatagtacccaaaagagactttctgtgaagcaaacccgaactttgcaactagatgaagatgttctgtgtgtcagttactctcccaatcaaaagctattggctgtgtctttgctggactgtactgtgaaaattttctacgttgatactttaaagttttttctgtcactgtatggacacaaactgcctgttatatgcatggacatctctcatgatggagcactcatagcaactggctccgctgataggaatgtgaaaatctggggtttggactttggggactgccacaagtctctctttgcacatgatgacagtgtgatgtacctacagtttgtacccaagtctcacctcttcttcactgccggaaaagatcataagattaaacagtgggatgcagacaaatttgaacacatacagactctggagggtcatcaccaggaaatatggtgtttggctgtaagccccagtggagactatgttgtatcatcgtcccatgacaaatctctgagactttgggagagaacaagggagcctcttattcttgaggaagaaagggagatggaaagagaagcagaatatgaggagagtgtggccaaagaagaccaaccagcagttccaggagagactcaaggtgacagttactttactggaaagaaaactattgaaacagtgaaagcagctgagaggattatggaggctattgagttgtaccgagaagaaactgcaaaaatgaaggaacacaaagccatttgtaaagctgcagggaaagaggttccacttcccagcaaccccatcctaatggcttatggcagtatctcaccttcagcttatgtattagagatttttaaagggatcaagtcgagtgagctggaagaatctctacttgtgctgcctttctcttatgtcccagacattcttaaactctttaacgaattcattcagctgggctctgatgttgaacttatatgccggtgcctcttcttcctccttaggattcactttggacagatcactagcaatcaaatgcttgtgccagtgatagaaaaattaagggaaacaactatttcaaaagtcagccaagtccgggatgttatcggcttcaatatggctggtcttgattatctcaagagggaatgcgaggcaaaaagtgaagttatgttttttgctgatgctactagccacttggaagagaagaagaggaagaggaaaaagagggagaagttgattctaacgttgacttagaactgaaatgtggtatctttttttttttcaactttttcctttaaaggactcctaaactaagcacagaagagttggcgtcatcttaaaaataccaaataacagaagatcgcattgcagatgatatcaggatgtggtttccagctttgcctgagggaattccaacatgagattatgggctggctccatttcttggacttaaaatgcattattagtttaaaaatctttctgtgctctcaaagcttgagccttgcagctcaagcttgttgttccctttatattctagcagggaataaataattgttttaattaggtatttgtttcattggagttgaaattaacatttcaaaagtttttcgtatttttttatggcagatgatttgtcatttatttatattaggttttactgcctattgagacaaccaggtgcataattgattgccctttggccataaaaatgcagtgtcatggatcttagagctaaaaaggactgtaaaaattacccagaacagcgtcctcagacttaaccttctgcaagttatgtctgtatataagaagattctaattgctaactgtttatacttttctgaataaaatagttgtttctaattaaaaagtagccaagctaagatgcctggctgggcttctgaggaattaatacactcgtgtgtgtgtgtgtgtgtgtgtgtgtgtgtgtgtgtgtatgtgtatgtgtatgtacacatacatatatatagttgacacttgaaaaatgcaggtggtaggggcactgacccacccctacgccccgcacagtcaaaaatctgcatataacttttgattccccaaagtcttaagtactagtagcctgttattgactgggagcctgactgatgtattatatatattgtatactgtattcttaaagtaagctagagaaaagaaaatgttacttagaaaatcataaggaagagaaaatatatttactgtgtttatcaatact

SEQ ID NO: 34362 - DNA, 1035 bp, Homo sapiens
  source 1..1035: mol_type = unassigned DNA
ggacccggaaggggcaggtcttgtgggcgggtccaatcggctgggagcctcgtggaggctgagattgcttcacctgtggtatcagacatcacaacatggggctcaccaagcagtacctacgctatgttgctagtgcggtctttggcgttatcggcagccaaaaaggtctagctagccaagcatcaagttcctttgtgttcttcgccactgaattctgaaaaccacaatgaaataggagcttatttcttagatgtctatttgttggaatatttacagattcttatccttcaggggcttaaacaagaagttacttgcttatgcccctccccagatgggctacacttagctgttgggtatgaggatgggtcgatccgaatcttcagtctcctgagtggggaaggaaatgtgaccttcaatggtcacaaagcagctatcactaccttgaagtatgatcagctaggaggcagactggcatctgggtccaaggacacagatattattgtatgggatgtgatcaatgaaagtggtctgtaccgtctaaaggggcacaaggatgccatcacacaagcattgtttctacgagaaaagaacctgctagttactagtgggaaagataccatggtgaaatggtgggaccttgatactcagcactgctttaaaacaatggttggccaccggactgaggtatgggggttggttctgttgtcagaagaaaagcgactcatcactggggcctcagacagtgaactgagggtatgggacatagcttatctgcaagagattgaagacccggaagaaccagaccccaagaaaatcaaaggatcttctcctggaatacaagatactcttgaggcagaggatggtgcctttgagacggatgaagcccctgaggatcgaatcctttcatgcagaaaagctggttccataatgcgggaaggaagagacagagttgtaaaccttgcagtcgacaagacaggcaggattcttgcttgccatggaactgactctgtgctagaattgttttgtatcctttcc

SEQ ID NO: 34363 - DNA, 1755 bp, Homo sapiens
  source 1..1755: mol_type = unassigned DNA
ggcggcgtaggggcggaggtcgcgcctgagtgcgtccgcacgagagggcggaaccgtctccatggcaacccgcgcgcagccggggccactcagccaggcgggaagcgctggtgttgcggcgctggcgacagtcggggttgcgagcggcccggggccggggcggccagggccgctgcaggacgagaccctgggtgtggcgtccgtgccctcgcagtggagggccgtccagggcatccgctgggagacgaaaagttgccagacggccagcattgccactgccagtgcatccgcccaggccaggaatcatgtggacgcccaggtgcagacggaggcccccgtgcctgtcagcgtgcagcccccgtcccagtatgacatacccaggctcgcagcctttcttcggagagtggaggccatggtcatccgagagctgaacaagaattggcagagccacgcgtttgatggcttcgaggtgaactggaccgagcagcagcagatggtgtcttgtctgtataccctgggctacccgccagcccaagcgcagggtctgcatgtgaccagcatctcctggaactccactggctctgtggtggcctgtgcctacggccggctggaccatggggactggagcacgcttaagtccttcgtgtgtgcctggaacctggaccggcgagacctgcgtccccagcagccgtcggccgtggtggaggtccccagcgctgtcctgtgtctggccttccaccccacgcagccctcccacgtcgcaggagggctgtacagtggtgaggtgttggtgtgggacctgagccgtcttgaggacccgctgctgtggcgcacaggcctgacggatgacacccacacagaccctgtgtcccaggtggtgtggctgcccgagcctgggcacagccaccgcttccaggtgctgagtgtggccaccgacgggaaggtgctactctggcagggcatcggggtaggccagctgcagctcacagagggcttcgccctggtcatgcagcagctgccacggagcaccaagctcaagaagcatccccgcggggagaccgaggtgggcgccacggcagtggccttctccagctttgaccctaggctgttcattctgggcacggaaggcggcttcccgctcaagtgttccctggcagctggagaggcagccctcacgcggatgcccagctccgtgcccctgcgggccccagcacagtttaccttctccccccacggcggtcccatctactctgtgagctgttcccccttccacaggaatctcttcctgagcgctgggactgacgggcatgtccacctgtactccatgctgcaggcccctcccttgacttcgctgcagctctccctcaagtatctgtttgctgtgcgctggtccccagtgcggcccttggtttttgcagctgcctctgggaaaggtgacgtgcagctgtttgatctccagaaaagctcccagaaacccacagttttgatcaagcaaacccaggatgaaagccctgtctactgtctggagttcaacagccagcagactcagctcttggctgcgggcgatgcccagggcacagtgaaggtgtggcagctgagcacagagttcacggaacaagggccccgggaagctgaggacctggactgcctggcagcagaggtggcggcctgaggggtcccgggaggcgggtgcaagccttcgctgtgccgagccttgtgtttctgacgcaagccaaatgaagaaaagcaaagctt

SEQ ID NO: 34364 - DNA, 745 bp, Homo sapiens
  source 1..745: mol_type = unassigned DNA
gctggtgttgcggcgctggcgacagtcggggttgcgagcggcccggggccggggcggccagggccgctgcaggacgagaccctgggtgtggcgtccgtgccctcgcagtggagggccgtccagggcatccgctgggagacgaaaagttgccagacggccagcattgccactgccagtgcatccgcccaggccaggaatcatgtggacgcccaggtgcagacggaggcccccgtgcctgtcagcgtgcagcccccgtcccagtatgacatacccaggctcgcagcctttcttcggagagtggaggccatggtcatccgagagctgaacaagaattggcagagccacgcgtttgatggcttcgaggtgaactggaccgagcagcagcagatggctggaccatggggactggagcacgcttaagtccttcgtgtgtgcctggaacctggaccggcgagacctgcgtccccagcagccgtcggccgtggtggaggtccccagcgctgtcctgtgtctggccttccaccccacgcagccctcccacgtcgcaggtgagctgcctgctgtgtccgcctcctctcctctcaggactcagcttcccgccctgcagagggcacaagggagctttccatgggccctttggcccggagacaggaaggcgggccctgaccctctcagtctggagcccaggtgaaggtctgcagtgagccctgaggggtggaactcgggggaggagtctggaaggggg

SEQ ID NO: 34365 - DNA, 1039 bp, Homo sapiens
  source 1..1039: mol_type = unassigned DNA
ctcagccaggcgggaagcgctggtgttgcggcgctggcgacagtcggggttgcgagcggcccggggccggggcggccagggccgctgcaggacgagaccctgggtgtggcgtccgtgccctcgcagtggagggccgtccagggcatccgctgggagacgaaaagttgccagacggccagcattgccactgccagtgcatccgcccaggccaggaatcatgtggacgcccaggtgcagacggaggcccccgtgcctgtcagcgtgcagcccccgtcccagtatgacatacccaggctcgcagcctttcttcggagagtggaggccatggtcatccgagagctgaacaagaattggcagagccacgcgtttgatggcttcgaggtgaactggaccgagcagcagcagatggtgtcttgtctgtataccctgggctacccgccagcccaagcgcagggtctgcatgtgaccagcatctcctggaactccactggctctgtggtggcctgtgcctacggccggctggaccatggggactggagcacgcttaagtccttcgtgtgtgcctggaacctggaccggcgagacctgcgtccccagcagccgtcggccgtggtggaggtccccagcgctgtcctgtgtctggccttccaccccacgcagccctcccacgtcgcaggtgagctgcctgctgtgtccgcctcctctcctctcaggactcagcttcccgccctgcagagggcacaagggagctttccatgggccctttggcccggagacaggaaggcgggccctgaccctctcagtctggagcccaggtgaaggtctgcagtgagccctgaggggtggaactcgggggaggagtctggaagggggccagggtcggggccaggacagggggctgtggagaggccagaagaggcaggtgcccttgggaagccgtcagtggtagggggcaggcaacgctggagggagctgccaggtgcagggcaggggtgtccggcaaagctccctggggtacaacaggggagctgggggctag

SEQ ID NO: 34366 - DNA, 6918 bp, Homo sapiens
  source 1..6918: mol_type = unassigned DNA
agggcgacgggagctttccggagctgctggtactcccgattggagacgtagaaccgttacttgtcgagggccttagcggccgccgtgaccctctcggggatcccacgatgttcttctacctgagcaagaaaatttccattcccaataacgtgaagctgcagtgtgtatcctggaacaaggaacaagggttcatagcatgcggtggtgaagatggattactgaaagttttgaaattagagacgcagacagatgatgcaaaattgaggggccttgcagcccccagtaacctttctatgaatcagactcttgaaggtcatagtggttctgttcaagttgtaacatggaatgagcagtatcagaagttgactaccagtgatgaaaacgggcttatcattgtgtggatgttatataaaggctcttggattgaggagatgatcaacaatcgaaataaatcagttgttcgcagtatgagctggaatgctgacggacagaagatctgcattgtatatgaagatggggctgtgatagttggttcagtggatggcaatcgtatttggggaaaagacctgaagggtatacagctatcccatgtaacatggtctgcggacagtaaagtcttactttttggaatggcaaatggggaaatacacatttacgataatcaaggaaattttatgataaaaatgaaactgagttgtttggtgaatgtcactggagctatcagcattgctggaattcattggtaccatggcacagaaggctacgtggagcctgattgcccttgccttgctgtttgctttgataatggaagatgccaaataatgagacatgagaatgaccaaaatcccgttttgattgacactggcatgtacgtagtaggcatccagtggaaccacatgggcagcgtgttagctgtggcaggcttccagaaggcagccatgcaggacaaagatgtgaacattgtgcagttttacactccgtttggtgagcatctgggtactttgaaagttcctggaaaggaaatatctgcactatcttgggaaggaggtggactgaaaattgcactagctgttgattcctttatatattttgcaaacattcgacctaattataagtggggttattgctcaaacactgtagtttatgcatataccagacctgatcgtccagaatattgtgttgtcttctgggatacgaaaaacaatgaaaaatatgttaaatatgtgaagggtctcatttctattactacctgtggagatttctgcattttggctacaaaagctgatgaaaatcatcctcagtttgtactagttctttgtaattctattggtacacccttggatcccaaatacattgatattgtaccattgtttgttgcaatgaccaaaacccatgtgatagcagcctcgaaagaagcattttatacctggcaatatcgtgtggcaaagaagctcacagcattggaaattaatcagatcacacggtctcgaaaagaagggagagaaagaatttatcatgttgatgataccccttctggatcaatggatggtgtgcttgattatagtaaaaccattcaaggcacaagggatccaatttgtgccataactgcatcagataagatattgattgtgggtcgtgaatctggcaccattcagagatacagtctacctaatgttggtttgattcaaaaatattcccttaattgtcgagcctaccagttatccttgaattgcaactctagccgtcttgctatcatagacatctcaggagttctgactttctttgacttggatgctcgagtaacggacagtacgggacagcaagtagttggagagttgttaaaattggaacgaagagatgtctgggatatgaagtgggccaaagataatcctgatttgtttgcaatgatggagaagacaagaatgtatgttttcagaaacttggatcctgaggaacccattcagacctctggatatatttgtaattttgaggatttagaaattaaatctgttcttttggatgagatattaaaggatccagaacatccaaacaaggattacctaattaactttgagattcggtctctgcgagatagccgagcactgattgagaaggttggaattaaagatgcatctcagttcatagaggacaatccacacccccgactttggcgcctactggctgaagcagctcttcagaaactggatctatacactgcagagcaagcatttgtgcgctgcaaagattaccaaggcattaagtttgtgaagcgcttgggcaaactactgagtgagtcaatgaaacaggctgaagttgttggctacttcggcaggtttgaagaggctgaaagaacgtatctcgagatggacagaagggatcttgctattggcctccggctgaaattgggggattggtttagagtactccagctcctgaaaactggatctggtgatgcagatgacagtctcctggaacaagccaacaatgccattggagactactttgctgatcgacaaaagtggttgaatgctgtacaatattatgtacaaggacggaaccaggaacgcttagctgaatgttactatatgttagaggattatgaagggttagagaaccttgccatttcacttccagaaaaccacaagttacttccagaaatagcacaaatgtttgtcagagttggaatgtgtgaacaagcagtgactgcatttttgaaatgtagtcaaccaaaggcagcagtagatacctgcgtacatctcaaccaatggaacaaagctgttgaattggctaaaaatcatagtatgaaagaaattggatctctgttagctaggtatgcatctcatttactggaaaagaataaaactcttgatgccatagaactctatcggaaagccaattacttttttgatgcagctaaactgatgtttaagattgcagatgaagaggcaaagaaaggaagtaaacctttacgtgtcaagaagctctatgtactgtcagccttacttatagagcaataccatgaacagatgaagaatgcccagcgaggaaaagttaaaggaaaaagttcagaggccacttctgccttggctggtttgctggaagaagaagttctgtctacaacagatcgtttcacagataatgcatggagaggggcagaggcttaccacttctttatacttgcacagaggcagctctatgagggatgtgtggacactgcactgaagacagctcttcacctgaaagactatgaagacatcatccctcctgtggagatctactctctgctagcactctgcgcatgcgccagcagagcctttgggacttgttcaaaagctttcattaaacttaaatctttagagaccctcagttcagaacagaaacagcagtatgaagaccttgctttagaaatcttcaccaaacatacttcaaaagataacagaaaacctgaattggacagccttatggaaggtggagaagggaaactgccaacatgcgttgccacaggaagcccaatcactgagtatcaattctggatgtgcagtgtatgcaaacacggtgtccttgctcaggaaataagccactacagcttctgccccttatgccatagtccagtgggataaaggaatgataaactgtatataactgtaaaatatatgtagcatatatacatggctatatgctgtatatgtaataaggtttatttctgtgagttttgtatgaaaatcagcctcattatttatagttgaatttttgcacaaaatatatgttaataaaataatttttatggcaatacaactgtgaaataataaggccgattttcatataaatgtatgaaaatcaaccatgttttctctcaccctctctcttttgtttatcttgtttttggttacatgataccatggaaatattccaaataaatttttttctcacagtgtcaaggtaactgaattcattaaaaaatcttgaagggagtagggagtgggggaagcatgggagtggggcaaagttgaatttagagaatttttataacccatgttacaaggaagttaaacaattgtaataatgaaatgagctttctctatagccatatttaattaaataagtgtcgaatgtcttctttattgtattttcagaagtgaggcgatggcattttaagacattttttacaatctgaattgtttctaatagccctattcttctattttaaaacctgtccttttagtctcatttaagagatggcatttggaatttacactttcatatgattgtgcagaaaacttgcctctatttataatgaagataacttaaacagaaatatccattttgtagttatagcttctgttgaaacattgtcactaagttggaccgtttatttacacaagtattgttgagggagtgattttttcttgatatgcgtctgttttcatttattattaatttgaaagataaacagttgtgatccataatggatcatttcttatgtcttttacatagctaataatgttctctgtttatttctcatgaattcccattttgtggctaaagaccagacctttgcactatttcatcaagattattttattgaggtttggcttacatatagtagaggcaatacatagagatacgcaactttgtttttgcagctacaatacactttctcaatctcatatgtttttgtcttgtagagacagagacaagttcagcatgttgcagattgggaatagtgagctatgagaagagatttagagcctagatgagcttaggatagagagtgggctcattggcctaaataaaaagagaagaccagaagtctttgaggtctctgtctctattcatgcgcctcgtggaaaattaccttggtacaatggtagcctctaaatagactgcctcgcaagctattccagaggtcatggaacagaaagccttataaaccaaataaaaattctcaaaatacattggtttattgaaccaatttgcaatacacagtgaggaacaaggagaaagcaatgatagattaacactgttagtgtaacgtgccagtggagtggaaagaccgcaacacctgaatcctgggttttgtaatgtttttatgtcctgactcacattctgtcacatacgctttcccctaatagtcgggttacaaaaaggaccagagtggccgcttgagccagatgactcaatcagatgaaatgtgcctgaggccaacgatgtacacttgctctatagaagggtgtcaggggcaagtacacttcaccacagcaatagcttgcctattagtctgctgagcagtcatgaattttattgtatttcttgggtaaggacaggccagaatgagtgtcaccagtgggtaattgaatcaacttctcacacatactgaaggctttatatgtctcatgcatacttagtgtatcatgaatatttggtatctttgtggcttttcatatttttagtgcttcatgaatatttggtatctcttgctcctttctatctgtggtcacacatacacgctctattaactttgcctaataagtctcctaggttactaacttacttacctaaatgtaacacaatgaattccagctttctcatttgttctataccagaatgggaaatttccccaaatcagaaaatcacatcctaacaaagaagtctgtctaagacagtacatctcctgttgaacttgcatctttccacaggactttctgtttttagggatgagactattctctgcttcatcaaggaaagagaaatgttcagggttgtagggatggcacacttattagttctgcctgtctgaaaggttcctgcaggacagtttggtcagagctgcaattcttagtccatggtctaatgcttgagtatctcttctttccctttcctgtctcaggaatcagctgagaattcattcgattgtcatgcctctagccccttactgtgatttgttggttgcactttcatttgctttagttctagaatcacctgttgactcctcagacttcacctaactttggaaactctcttttggaggcttctcatttccccctaattctgtgctgcctgagccctagaattttcccaccaacgaattattccaggtagatcctaagttgctggatctagttgatatttaaacaatatctagttgatatttctcattcagttggatccagaaaccagtatctctaaaaacaacctctcataccttgtggacctaattttgtgtgcgtgtgtgtgtgcgcgcatatgtatatagacaggcacatcttttttacttttgtaaaagcttatgcctctttggtatctatatctgtgaaagttttaatgatctgccataatgtcttggggacctttgtcttctgtgtaaatggtactagagaaaacacctatattatgagtcaatctagttggttttattcgacatgaaggaaatttccagataacaacactaacaaactctcccttgactagggggacaaagaaaagcaaaactgaccataaaaaacaattacctggtgagaagttgcataaacagaattaggtagtatattgaagacagcatcattaaacagttatgttgttctccttgcaaaaaacatgtactgacttcccgttgagtaatgccaagttgttttttttattataaaacttgcccttcattacatgtttcaaagtggtgtggtgggccaaaatattgaaatgatggaactgactgataaagctgtacaaataagcagtgtgcctaacaagcaacacagtaatgttgacatgcttaattcacaaatgctaatttcattataaattgttttgctaaaatacactttgaaactatttttctgtattccaagagctgagatcttagattttatgtagtattaagtgaaaaaatacgaaaataataaacattgaagaaaaaaataa

SEQ ID NO: 34367 - DNA, 6960 bp, Homo sapiens
  source 1..6960: mol_type = unassigned DNA
gcggttgccagggcgacgggagctttccggagctgctggtactcccgattggagacgtagaaccgttacttgtcgagggccttagcggccgccgtgaccctctcggggatcccacgatgttcttctacctgagcaagaaaatttccattcccaataacgtgaagctgcagtgtgtatcctggaacaaggaacaagggttcatagcatgcggtggtgaagatggattactgaaagttttgaaattagagacgcagacagatgatgcaaaattgaggggccttgcagcccccagtaacctttctatgaatcagactcttgaaggtcatagtggttctgttcaagttgtaacatggaatgagcagtatcagaagttgactaccagtgatgaaaacgggcttatcattgtgtggatgttatataaaggctcttggattgaggagatgatcaacaatcgaaataaatcagttgttcgcagtatgagctggaatgctgacggacagaagatctgcattgtatatgaagatggggctgtgatagttggttcagtggatggcaatcgtatttggggaaaagacctgaagggtatacagctatcccatgtaacatggtctgcggacagtaaagtcttactttttggaatggcaaatggggaaatacacatttacgataatcaaggaaattttatgataaaaatgaaactgagttgtttggtgaatgtcactggagctatcagcattgctggaattcattggtaccatggcacagaaggctacgtggagcctgattgcccttgccttgctgtttgctttgataatggaagatgccaaataatgagacatgagaatgaccaaaatcccgttttgattgacactggcatgtacgtagtaggcatccagtggaaccacatgggcagcgtgttagctgtggcaggcttccagaaggcagccatgcaggacaaagatgtgaacattgtgcagttttacactccgtttggtgagcatctgggtactttgaaagttcctggaaaggaaatatctgcactatcttgggaaggaggtggactgaaaattgcactagctgttgattcctttatatattttgcaaacattcgacctaattataagtggggttattgctcaaacactgtagtttatgcatataccagacctgatcgtccagaatattgtgttgtcttctgggatacgaaaaacaatgaaaaatatgttaaatatgtgaagggtctcatttctattactacctgtggagatttctgcattttggctacaaaagctgatgaaaatcatcctcaggaggagaacgagatggagacatttggtgcaacgtttgtactagttctttgtaattctattggtacacccttggatcccaaatacattgatattgtaccattgtttgttgcaatgaccaaaacccatgtgatagcagcctcgaaagaagcattttatacctggcaatatcgtgtggcaaagaagctcacagcattggaaattaatcagatcacacggtctcgaaaagaagggagagaaagaatttatcatgttgatgataccccttctggatcaatggatggtgtgcttgattatagtaaaaccattcaaggcacaagggatccaatttgtgccataactgcatcagataagatattgattgtgggtcgtgaatctggcaccattcagagatacagtctacctaatgttggtttgattcaaaaatattcccttaattgtcgagcctaccagttatccttgaattgcaactctagccgtcttgctatcatagacatctcaggagttctgactttctttgacttggatgctcgagtaacggacagtacgggacagcaagtagttggagagttgttaaaattggaacgaagagatgtctgggatatgaagtgggccaaagataatcctgatttgtttgcaatgatggagaagacaagaatgtatgttttcagaaacttggatcctgaggaacccattcagacctctggatatatttgtaattttgaggatttagaaattaaatctgttcttttggatgagatattaaaggatccagaacatccaaacaaggattacctaattaactttgagattcggtctctgcgagatagccgagcactgattgagaaggttggaattaaagatgcatctcagttcatagaggacaatccacacccccgactttggcgcctactggctgaagcagctcttcagaaactggatctatacactgcagagcaagcatttgtgcgctgcaaagattaccaaggcattaagtttgtgaagcgcttgggcaaactactgagtgagtcaatgaaacaggctgaagttgttggctacttcggcaggtttgaagaggctgaaagaacgtatctcgagatggacagaagggatcttgctattggcctccggctgaaattgggggattggtttagagtactccagctcctgaaaactggatctggtgatgcagatgacagtctcctggaacaagccaacaatgccattggagactactttgctgatcgacaaaagtggttgaatgctgtacaatattatgtacaaggacggaaccaggaacgcttagctgaatgttactatatgttagaggattatgaagggttagagaaccttgccatttcacttccagaaaaccacaagttacttccagaaatagcacaaatgtttgtcagagttggaatgtgtgaacaagcagtgactgcatttttgaaatgtagtcaaccaaaggcagcagtagatacctgcgtacatctcaaccaatggaacaaagctgttgaattggctaaaaatcatagtatgaaagaaattggatctctgttagctaggtatgcatctcatttactggaaaagaataaaactcttgatgccatagaactctatcggaaagccaattacttttttgatgcagctaaactgatgtttaagattgcagatgaagaggcaaagaaaggaagtaaacctttacgtgtcaagaagctctatgtactgtcagccttacttatagagcaataccatgaacagatgaagaatgcccagcgaggaaaagttaaaggaaaaagttcagaggccacttctgccttggctggtttgctggaagaagaagttctgtctacaacagatcgtttcacagataatgcatggagaggggcagaggcttaccacttctttatacttgcacagaggcagctctatgagggatgtgtggacactgcactgaagacagctcttcacctgaaagactatgaagacatcatccctcctgtggagatctactctctgctagcactctgcgcatgcgccagcagagcctttgggacttgttcaaaagctttcattaaacttaaatctttagagaccctcagttcagaacagaaacagcagtatgaagaccttgctttagaaatcttcaccaaacatacttcaaaagataacagaaaacctgaattggacagccttatggaaggtggagaagggaaactgccaacatgcgttgccacaggaagcccaatcactgagtatcaattctggatgtgcagtgtatgcaaacacggtgtccttgctcaggaaataagccactacagcttctgccccttatgccatagtccagtgggataaaggaatgataaactgtatataactgtaaaatatatgtagcatatatacatggctatatgctgtatatgtaataaggtttatttctgtgagttttgtatgaaaatcagcctcattatttatagttgaatttttgcacaaaatatatgttaataaaataatttttatggcaatacaactgtgaaataataaggccgattttcatataaatgtatgaaaatcaaccatgttttctctcaccctctctcttttgtttatcttgtttttggttacatgataccatggaaatattccaaataaatttttttctcacagtgtcaaggtaactgaattcattaaaaaatcttgaagggagtagggagtgggggaagcatgggagtggggcaaagttgaatttagagaatttttataacccatgttacaaggaagttaaacaattgtaataatgaaatgagctttctctatagccatatttaattaaataagtgtcgaatgtcttctttattgtattttcagaagtgaggcgatggcattttaagacattttttacaatctgaattgtttctaatagccctattcttctattttaaaacctgtccttttagtctcatttaagagatggcatttggaatttacactttcatatgattgtgcagaaaacttgcctctatttataatgaagataacttaaacagaaatatccattttgtagttatagcttctgttgaaacattgtcactaagttggaccgtttatttacacaagtattgttgagggagtgattttttcttgatatgcgtctgttttcatttattattaatttgaaagataaacagttgtgatccataatggatcatttcttatgtcttttacatagctaataatgttctctgtttatttctcatgaattcccattttgtggctaaagaccagacctttgcactatttcatcaagattattttattgaggtttggcttacatatagtagaggcaatacatagagatacgcaactttgtttttgcagctacaatacactttctcaatctcatatgtttttgtcttgtagagacagagacaagttcagcatgttgcagattgggaatagtgagctatgagaagagatttagagcctagatgagcttaggatagagagtgggctcattggcctaaataaaaagagaagaccagaagtctttgaggtctctgtctctattcatgcgcctcgtggaaaattaccttggtacaatggtagcctctaaatagactgcctcgcaagctattccagaggtcatggaacagaaagccttataaaccaaataaaaattctcaaaatacattggtttattgaaccaatttgcaatacacagtgaggaacaaggagaaagcaatgatagattaacactgttagtgtaacgtgccagtggagtggaaagaccgcaacacctgaatcctgggttttgtaatgtttttatgtcctgactcacattctgtcacatacgctttcccctaatagtcgggttacaaaaaggaccagagtggccgcttgagccagatgactcaatcagatgaaatgtgcctgaggccaacgatgtacacttgctctatagaagggtgtcaggggcaagtacacttcaccacagcaatagcttgcctattagtctgctgagcagtcatgaattttattgtatttcttgggtaaggacaggccagaatgagtgtcaccagtgggtaattgaatcaacttctcacacatactgaaggctttatatgtctcatgcatacttagtgtatcatgaatatttggtatctttgtggcttttcatatttttagtgcttcatgaatatttggtatctcttgctcctttctatctgtggtcacacatacacgctctattaactttgcctaataagtctcctaggttactaacttacttacctaaatgtaacacaatgaattccagctttctcatttgttctataccagaatgggaaatttccccaaatcagaaaatcacatcctaacaaagaagtctgtctaagacagtacatctcctgttgaacttgcatctttccacaggactttctgtttttagggatgagactattctctgcttcatcaaggaaagagaaatgttcagggttgtagggatggcacacttattagttctgcctgtctgaaaggttcctgcaggacagtttggtcagagctgcaattcttagtccatggtctaatgcttgagtatctcttctttccctttcctgtctcaggaatcagctgagaattcattcgattgtcatgcctctagccccttactgtgatttgttggttgcactttcatttgctttagttctagaatcacctgttgactcctcagacttcacctaactttggaaactctcttttggaggcttctcatttccccctaattctgtgctgcctgagccctagaattttcccaccaacgaattattccaggtagatcctaagttgctggatctagttgatatttaaacaatatctagttgatatttctcattcagttggatccagaaaccagtatctctaaaaacaacctctcataccttgtggacctaattttgtgtgcgtgtgtgtgtgcgcgcatatgtatatagacaggcacatcttttttacttttgtaaaagcttatgcctctttggtatctatatctgtgaaagttttaatgatctgccataatgtcttggggacctttgtcttctgtgtaaatggtactagagaaaacacctatattatgagtcaatctagttggttttattcgacatgaaggaaatttccagataacaacactaacaaactctcccttgactagggggacaaagaaaagcaaaactgaccataaaaaacaattacctggtgagaagttgcataaacagaattaggtagtatattgaagacagcatcattaaacagttatgttgttctccttgcaaaaaacatgtactgacttcccgttgagtaatgccaagttgttttttttattataaaacttgcccttcattacatgtttcaaagtggtgtggtgggccaaaatattgaaatgatggaactgactgataaagctgtacaaataagcagtgtgcctaacaagcaacacagtaatgttgacatgcttaattcacaaatgctaatttcattataaattgttttgctaaaatacactttgaaactatttttctgtattccaagagctgagatcttagattttatgtagtattaagtgaaaaaatacgaaaataataaacattgaagaaaaaaataa

SEQ ID NO: 34368 - DNA, 2788 bp, Homo sapiens
  source 1..2788: mol_type = unassigned DNA
agggtatacagctatcccatgtaacatggtctgcggacagtaaagtcttactttttggaatggcaaatggggaaatacacatttacgataatcaaggaaattttatgataaaaatgaaactgagttgtttggtgaatgtcactggagctatcagcattgctggaattcattggtaccatggcacagaaggctacgtggagcctgattgcccttgccttgctgtttgctttgataatggaagatgccaaataatgagacatgagaatgaccaaaatcccgttttgattgacactggcatgtacgtagtaggcatccagtggaaccacatgggcagcgtgttagctgtggcaggcttccagaaggcagccatgcaggacaaagatgtgaacattgtgcagttttacactccgtttggtgagcatctgggtactttgaaagttcctggaaaggaaatatctgcactatcttgggaaggaggtggactgaaaattgcactagctgttgattcctttatatattttgcaaacattcgacctaattataagtggggttattgctcaaacactgtagtttatgcatataccagacctgatcgtccagaatattgtgttgtcttctgggatacgaaaaacaatgaaaaatatgttaaatatgtgaagggtctcatttctattactacctgtggagatttctgcattttggctacaaaagctgatgaaaatcatcctcagtaccattgtttgttgcaatgaccaaaacccatgtgatagcagcctcgaaagaagcattttatacctggcaatatcgtgtggcaaagaagctcacagcattggaaattaatcagatcacacggtctcgaaaagaagggagagaaagaatttatcatgttgatgataccccttctggatcaatggatggtgtgcttgattatagtaaaaccattcaaggcacaagggatccaatttgtgccataactgcatcagataagatattgattgtgggtcgtgaatctggcaccattcagagatacagtctacctaatgttggtttgattcaaaaatattcccttaattgtcgagcctaccagttatccttgaattgcaactctagccgtcttgctatcatagacatctcaggagttctgactttctttgacttggatgctcgagtaacggacagtacgggacagcaagtagttggagagttgttaaaattggaacgaagagatgtctgggatatgaagtgggccaaagataatcctgatttgtttgcaatgatggagaagacaagaatgtatgttttcagaaacttggatcctgaggaacccattcagacctctggatatatttgtaattttgaggatttagaaattaaatctgttcttttggatgagatattaaaggatccagaacatccaaacaaggattacctaattaactttgagattcggtctctgcgagatagccgagcactgattgagaaggttggaattaaagatgcatctcagttcatagaggacaatccacacccccgactttggcgcctactggctgaagcagctcttcagaaactggatctatacactgcagagcaagcatttgtgcgctgcaaagattaccaaggcattaagtttgtgaagcgcttgggcaaactactgagtgagtcaatgaaacaggctgaagttgttggctacttcggcaggtttgaagaggctgaaagaacgtatctcgagatggacagaagggatcttgctattggcctccggctgaaattgggggattggtttagagtactccagctcctgaaaactggatctggtgatgcagatgacagtctcctggaacaagccaacaatgccattggagactactttgctgatcgacaaaagtggttgaatgctgtacaatattatgtacaaggacggaaccaggaacgcttagctgaatgttactatatgttagaggattatgaagggttagagaaccttgccatttcacttccagaaaaccacaagttacttccaattgcagatgaagaggcaaagaaaggaagtaaacctttacgtgtcaagaagctctatgtactgtcagccttacttatagagcaataccatgaacagatgaagaatgcccagcgaggaaaagttaaaggaaaaagttcagaggccacttctgccttggctggtttgctggaagaagaagttctgtctacaacagatcgtttcacagataatgcatggagaggggcagaggcttaccacttctttatacttgcacagaggcagctctatgagggatgtgtggacactgcactgaagacagtggagaagggaaactgccaacatgcgttgccacaggaagcccaatcactgagtatcaattctggatgtgcagtgtatgcaaacacggtgtccttgctcaggaaataagccactacagcttctgccccttatgccatagtccagtgggataaaggaatgataaactgtatataactgtaaaatatatgtagcatatatacatggctatatgctgtatatgtaataaggtttatttctgtgagttttgtatgaaaatcagcctcattatttatagttgaatttttgcacaaaatatatgttaataaaataatttttatggcaatacaactgtgaaataataaggccgattttcatataaatgtatgaaaatcaaccatgttttctctcaccctctctcttttgtttatcttgtttttggttacatgataccatggaaatattccaaataaatttttttctcacagtgtc

SEQ ID NO: 34369 - DNA, 7048 bp, Homo sapiens
  source 1..7048: mol_type = unassigned DNA
tcaaggaatactgacttaatccaggaatcccaataacatttaatatttatcttccttttctgggaggaatctacacttatccaagttgcccaagtgagcagttccctccccacaagtaattagttctactccccagagggtctgtgagtgaatccctctgtcagttttgaaatgtcccattatagttttcatctgtaaatatgtcaatatgtatccaaaagatgaggatctttaaaaacgtaatcataatgctactatcatatgtaaaaatgaaacataattccttaatatcatcagatatccagtgtttaaatttttccagtctcatgtttttgtacatttttaaataatcacatgtttaaatcgtttccatctccaaggcgtcgacctcccctccattctcctgggcgtcgcgcttccctctttgtttcccgcccttgcggttctgtcggaacctaacgagcttccttccaccgcaaaagagctggagaacaatgctaggcaacgtgctggagaccttggccctcggaacccaagtcacgcctcccatgtgagctctggagggagaactttatgtgttgcactgagggcagtctccggaaacgcgattcgcagcgggcgccggaagcggtgttgtgtctgcagctctggcagaggactgttccactagacacgctgaagggactgggtacgtgttttccttcaggaccagagctgagaggagctgggatcgcggcggcaatggaacgggcctcagaaaggcgcacggccagcgcgctttttgcggggttccgggccttgggacttttcagcaacgacattccacacgtggtgcggttcagcgcgctcaagcgccggttctatgtaacaacctgcgtgggcaagagtttccacacctatgacgttcagaaacttagtctggttgcagtaagtaattctgttccacaggatatctgctgtatggcagctgatggcagattagtctttgctgcttatggaaatgttttctctgcatttgcccgtaataaagagatagtacatacctttaagggtcataaggcagaaatccatttcttgcaaccctttggagaccacattatctctgttgatactgatggcattcttattatttggcacatatattcagaagaagaatacctgcagttgacttttgataaatcagtatttaaaatttctgcaattttgcatccaagtacctacttgaataaaatacttctgggcagtgaacaaggaagcctgcagttgtggaatgtaaaatccaataaacttctatatacatttccaggatggaaagttggagtgacagctcttcagcaggcaccagccgtggatgttgttgctattggtcttatgtcaggtcaagttatcattcacaacattaaatttaatgaaacattaatgaagtttcgtcaagactggggacccattacttcaatttcatttcgcacagatggtcatccagtaatggcagctggaagcccatgtggccatattggactctgggatctagaagacaaaaaattaatcaaccaaatgagaaatgcacactctacagcaattgccggactgacatttctccatagagagccacttcttgtcacaaatggcgctgacaatgctcttaggatatggatatttgatggtcctacaggtgaaggccgacttttgagattcagaatgggtcatagtgctcctcttaccaatatcagatattatggacagaatggacagcagattctaagtgcaagtcaagatggaactcttcagtcattttccacggtacatgaaaaattcaataagagcttgggacatggattaataaataaaaagagagttaaacgtaaaggacttcagaataccatgtcagtgagacttccacccatcacaaagtttgcagcagaggaagctcgtgaaagtgactgggatggtatcattgcttgccatcaaggtaagctatcttgctcaacctggaattatcagaaatctacaataggcgcttactttctcaagccaaaagagttgaagaaagatgacataactgcaacagcagtggatataacttcttgtggaaactttgctgtaattggcctctcatcaggaactgtagatgtatataacatgcagtctggcatacatcgaggaagttttggcaaggatcaagctcacaagggatctgttagaggtgtcgcagtggatggattaaaccagttgacagttacaactggtagtgaaggattactcaaattctggaactttaaaaacaaaattttaatccattctgtgagcctcagttcatctccaaatatcatgttgctacatagggacagtggcattctgggactcgccttggatgacttctccattagtgttctggacatagaaactaggaagattgtcagagagttttctggacaccaaggccaaataaatgacatggcttttagtcctgatggtcgttggttaataagtgctgcgatggattgctctattaggacttgggaccttccttctgggtgccttatagactgctttttgttggactcggctcctctcaatgtttctatgtctcctactggagactttctggcaacttcccatgtggaccaccttggaatttatctatggtccaatatttccctgtattcagttgtttcattacggccacttcctgcagattatgtcccttcaatagtcatgcttcctggtacttgtcaaacccaagatgtagaagtatcagaagaaacagtagaaccaagtgatgaattgatagaatatgattcgccagaacagttgaatgagcaattggtgactctttcacttcttcctgaatcacgatggaaaaaccttcttaaccttgatgttattaagaaaaagaataaaccaaaggaaccacccaaagtacccaaatcagcaccatttttcattccaacaattcctggccttgtacccagatatgctgcacctgaacaaaataatgatccccagcagtctaaagtggtaaatcttggagttttggctcaaaaatcagatttctgcttgaaacttgaagaaggactggtaaataataagtatgacactgctctcaaccttctgaaagaatcaggcccatcaggaattgaaacagagctgcgaagcttgtctcctgattgtggtgggtccatagaagttatgcagagcttcttgaaaatgattgggatgatgctggacagaaagcgtgattttgagttagcccaggcataccttgcattgtttctaaagttacaccttaaaatgcttccttcagagccagtactcctagaagaaataacaaatttgtcatcccaggtggaagaaaactggacccatttgcaatcactcttcaatcaaagcatgtgtattttaaattatctcaaaagtgctttgttgtaaaaataaatttgtgactaaacaaagactttcatattaaatgggttcaattgaactcatttcttattttccaagtgtcaatgtgaaaagaaaataaatgctagcactactgactagtcagtatatctccactttaaatgctaaatactttcttgaaataaaatcgcacctcccggccaggcatgatggataatgcctgtaattccagcactttcagaggccaaagcgggaggattgcttgaagccaggaatttgagcccagcctgggcaacatagcaagcaagatcccatctctacaaaaagttaaaaaaataaattacacctgccttttgttttgaagacttaaagaatctgctcaaatgatttattttctgagtctcttcacattaacttttatatgatttttaaaaaattattacctgcttatattttttgagtatctgtttcatataaagagatgctgcatgttcactgtgaagtattgctgaattaaattgaaaatgtcagataaaactgatacatgatgtagttataaaaatgctgttatgaagaaaaaaggaatgcttttttcctcggtggcctttgataaaaatatgaatgattgactctcagagttggaggataaactaatcatcttctagcacagccctgttgtgttgcaggagaggaatcaggctaaagtctgctggtatttcagtgacagattaaaactttctaacagtggcctagtgctttctccattgtaatgtactgaaaggaagttgttcatggatcagaaatgtgggaggcccttccttgcccaaggcaagtcgctgtagatggttaaactgataccaaggataggtaagggaaattccaaattccattggaagatggccttttactgacactgcagacatgtagataacaatagtttaatgtcctctgaaaaggtaaaaattccataaatccttgcaaacaatttttagcaatattgtttattgctaccacagccaagaatgggtatttcaaagccagggttttttttattttgttttgttttgtttttttttttttttttttggctacacttttttgggggggaccttttaatttgggaagaaaatgctgagtatacttttctttcacaaccattgcaaacccaggtagccctggagttttctttttttctcatcatcattgttttgttttttttatggttcaagacttttgcaatacatgaattaaaaataagcagttctttaaagcatagcgctctaaaaactattcttagtttataccctcaaaagttgggtctttcatgaaacacagtggtttgaatatgaacaccagtagcattctcgttcgttgttagggtaagagagttttgtagaatgatctccaaaagaagcagtcctcaaaaggcatttaccagtgatatcttttaatattcatgtttttatttaatgatgtaagatagaattaataaactactaaggaaataagccaatgtggttattgtactcaatttcgtttttcttttagaaatgtgtattgacttattaaagccactgacagaaatgttaatcatgacttaagttctaatttaaaaaactattttcctctttcctaaatactatattctaaattggaatatggcaaaatcccaatatataattctatacctagtaaagattgtaaataactaaaacaaaatgataagagctgtgaactgaaattgtattgcttacagaaatcatgaaccgaattttcttctctttttaaagtgagcataaagacttaagtgtattgttaccagagatatatttagatagaatacatcattttggcaggtaatcttctagaacctttcatgtactgtttccatcaagggagggaaagaaatagaaaatataattttatctatattttccttaaaatatatcaatctgtgcacactctttcagttttttaattactcatgtaatatatgactacattttgcttgtgtgctttttgaaaaccatcttcagtcccaatatcctctgtagaagtaatagttttaactctcctagatcttcttttagagtgtttttatgagtgtttaatgtaggaatgtgtatatattatctacagccacaggaaatgtatagttacgatttttacatacgtgtatgtatattattgtacaacttgctatttctacttgggagttttttattttggtacattcacatttacctaatctcttgtgcactgtccaacagtactttgcctataatagacacttaaggaagttttccttctttttattcctttataattacaaacaatgctgaaaggaacatcatcctacatgagccctttttgtacatataaggctctctctgtggtatatgcttaggatttgaatttcaggccagagtataaccatttttaatttgaagagatacttccatttgggttccagaatggctgtatcaagttacagttcccctgagcaagatatgagcatctgcttccccatgtaattaatgacacttgctattggatttttgtaatttaattactctgaaaaaattattttggttttaaatcagaaatttctcactagtgaagatggacatatttttgtatgtttattttagaacatataaacatttgttaattttctttttcctctcatttttctattgaatgatttgtccttttatctcatggatttgttaggagttctcttgtattttctgtattttatgtctgttgccaatgttttctcctacttagccatttggctttaattttacatggtgtctgtttaaataaatgttttatatttgtatacaatcaaattgattaattttcatgacttatttcaggatataaagcaaattattttctaagacatttacagtgtatgttttcctatgtttacatgtgctcatttcacgtcatgtattttcctctacgacatgtttctgtgtgagtagttaacatgtagatctttagaattgatttttctgaagagtgaaacagcgctgcttccaatatctgttcaaaattcatttattgaaaagtccactcatatgtctgatttgaaatgctgtttcattatgtgttaaattctttcactgagctcttccatattcctagtaaatgatgcattactttggtatgttctcagatttgggtaaagccttcctcatgttctataaaaattggttaactgctggtgagcacatctcttgaagttttgatatgggttgcacaacatttataggactgatttggagagaccgacaataccgagtgcagtcctcccttggtatctagttccaggacccctgtggataccaaaatccaagcaatgccctgcagatcatgggacctatgcatatgaaaagtcggtccttgtatttgagggttttgcatccctcaaataccatatgttttatttgtgtttggttgaaaaaagtttgcatataagtgaaacttagcatttcaaacctgtgttgttcaaagatcatttgtatttctcttcaagaacaatgaatgtcttcattaaatcatcttttgtgggagagcttttggtttcatagattttcatatatatatatgatataataaacactttttgacattc

SEQ ID NO: 34370 - DNA, 2922 bp, Homo sapiens
  source 1..2922: mol_type = unassigned DNA
ctttatgtgttgcactgagggcagtctccggaaacgcgattcgcagcgggcgccggaagcggtgttgtgtctgcagctctggcagaggactgttccactagacacgctgaagggactgggtacgtgttttccttcaggaccagagctgagaggagctgggatcgcggcggcaatggaacgggcctcagaaaggcgcacggccagcgcgctttttgcggggttccgggccttgggacttttcagcaacgacattccacacgtggtgcggttcagcgcgctcaagcgccggttctatgtaacaacctgcgtgggcaagagtttccacacctatgacgttcagaaacttagtctggttgcagtaagtaattctgttccacaggatatctgctgtatggcagctgatggcagattagtctttgctgcttatggaaatgttttctctgcatttgcccgtaataaagagatagtacatacctttaagggtcataaggcagaaatccatttcttgcaaccctttggagaccacattatctctgttgatactgatggcattcttattatttggcacatatattcagaagaagaatacctgcagttgacttttgataaatcagtatttaaaatttctgcaattttgcatccaagtacctacttgaataaaatacttctgggcagtgaacaaggaagcctgcagttgtggaatgtaaaatccaataaacttctatatacatttccaggatggaaagttggagtgacagctcttcagcaggcaccagccgtggatgttgttgctattggtcttatgtcaggtcaagttatcattcacaacattaaatttaatgaaacattaatgaagtttcgtcaagactggggacccattacttcaatttcatttcgcacagatggtcatccagtaatggcagctggaagcccatgtggccatattggactctgggatctagaagacaaaaaattaatcaaccaaatgagaaatgcacactctacagcaattgccggactgacatttctccatagagagccacttcttgtcacaaatggcgctgacaatgctcttaggatatggatatttgatggtcctacaggtgaaggccgacttttgagattcagaatgggtcatagtgctcctcttaccaatatcagatattatggacagaatggacagcagattctaagtgcaagtcaagatggaactcttcagtcattttccacggtacatgaaaaattcaataagagcttgggacatggattaataaataaaaagagagttaaacgtaaaggacttcagaataccatgtcagtgagacttccacccatcacaaagtttgcagcagaggaagctcgtgaaagtgactgggatggtatcattgcttgccatcaaggtaagctatcttgctcaacctggaattatcagaaatctacaataggcgcttactttctcaagccaaaagagttgaagaaagatgacataactgcaacagcagtggatataacttcttgtggaaactttgctgtaattggcctctcatcaggaactgtagatgtatataacatgcagtctggcatacatcgaggaagttttggcaaggatcaagctcacaagggatctgttagaggtgtcgcagtggatggattaaaccagttgacagttacaactggtagtgaaggattactcaaattctggaactttaaaaacaaaattttaatccattctgtgagcctcagttcatctccaaatatcatgttgctacatagggacagtggcattctgggactcgccttggatgacttctccattagtgttctggacatagaaactaggaagattgtcagagagttttctggacaccaaggccaaataaatgacatggcttttagtcctgatggtcgttggttaataagtgctgcgatggattgctctattaggacttgggaccttccttctgggtgccttatagactgctttttgttggactcggctcctctcaatgtttctatgtctcctactggagactttctggcaacttcccatgtggaccaccttggaatttatctatggtccaatatttccctgtattcagttgtttcattacggccacttcctgcagattatgtcccttcaatagtcatgcttcctggtacttgtcaaacccaagatgtagaagtatcagaagaaacagtagaaccaagtgatgaattgatagaatatgattcgccagaacagttgaatgagcaattggtgactctttcacttcttcctgaatcacgatggaaaaaccttcttaaccttgatgttattaagaaaaagaataaaccaaaggaaccacccaaagtacccaaatcagcaccatttttcattccaacaattcctggccttgtacccagatatgctgcacctgaacaaaataatgatccccagcagtctaaagtggtaaatcttggagttttggctcaaaaatcagatttctgcttgaaacttgaagaaggactggtaaataataagtatgacactgctctcaaccttctgaaagaatcaggcccatcaggaattgaaacagagctgcgaagcttgtctcctgattgtggtgggtccatagaagttatgcagagcttcttgaaaatgattgggatgatgctggacagaaagcgtgattttgagttagcccaggcataccttgcattgtttctaaagttacaccttaaaatgcttccttcagagccagtactcctagaagaaataacaaatttgtcatcccaggtggaagaaaactggacccatttgcaatcactcttcaatcaaagcatgtgtattttaaattatctcaaaagtgctttgttgtaaaaataaatttgtgactaaacaaagactttcatattaaatgggttcaattgaactcatttctt

SEQ ID NO: 34371 - DNA, 1471 bp, Homo sapiens
  source 1..1471: mol_type = unassigned DNA
ctggcacatgtgtatggcggtgaggcgggcgggtacatggcgggctctgtgggactggcgttgtgcgggcagacgttggtggtgcggggcggcagccgattcctggccacctccatagcaagcagtgatgatgacagcctcttcatctatgactgcagtgctgcagaaaagaagtcacaagaaaataaaggggaggacgcgcccttggaccaggggagcggtgcgattctggcgtccaccttctccaagtctggcagctattttgctttaaccgatgacagtaagcgtctgattcttttccgtacaaaaccatggcaatgtctgagtgtcaggaccgtggcaaggaggtgtacagccctgactttcatagcctcggaggagaaggtcttggtggccgacaagtctggagacgtctactccttttcggtgctggagccacacgggtgtggccgtctagagctggggcacctgtctatgctgttagatgtggctgtgagtcctgatgaccgcttcatcctcactgccgaccgggacgagaagatccgagtcagctgggccgcggcgccccatagcatcgagtccttctgcttggggcacacagagtttgtgagccgtatctccgtggtgccaactcagcccgggctgcttctgtcctcctctggggacggcaccctgaggctctgggagtacaggagcggccgccagctgcactgctgtcacctggccagtctgcaggagctggtggacccccaggccccccagaagtttgccgcgtccaggattgcattctggtgccaggagaactgcgtggcgctcctgtgcgacggcactcctgtggtctacatcttccagctggacgcccgcagacagcagttggtgtacaggcagcagctggcgttccagcaccaagtgtgggacgtggctttcgaggagacccaggggctgtgggtgctccaggactgccaggaagcccccctggtgctctacaggcctgtgggcgaccagtggcagtctgttcctgagagcaccgtgttaaagaaagtctctggtgttcttcgtgggaactgggccatgctggaaggctctgccggcgcagacgccagcttcagcagtctctacaaggccacgttcgacaacgtgacctcctacctgaagaagaaagaggagagactgcagcagcagctagagaagaagcagcggcgccggagtcccccgcctgggcccgacgggcatgccaagaagatgagaccgggggaggcgacgctaagttgctgatcgtggcggtctgtttctgtcgactgtggaccacttatgtgcgatccgtggaccacttgcgtgcgatctgtcggccgacgatgagcttgttcggatgtagctccatcgtaagtcgaggagcatctgtgatttgtcctctgcttatgggatatgtttttccgctactgagtctgtgtagtaaatttttgactaggaa

SEQ ID NO: 34372 - DNA, 2122 bp, Homo sapiens
  source 1..2122: mol_type = unassigned DNA
gtgcggacaggaagaggctctgggctggcacatgtgtatggcggtgaggcgggcgggtacatggcgggctctgtgggactggcgttgtgcgggcagacgttggtggtgcggggcggcagccgattcctggccacctccatagcaagcagtgatgatgacagcctcttcatctatgactgcagtgctgcagaaaagaagtcacaagaaaataaaggggaggacgcgcccttggaccaggggagcggtgcgattctggcgtccaccttctccaagtctggcagctattttgctttaaccgatgacagtaagcgtctgattcttttccgtacaaaaccatggcaatgtctgagtgtcaggaccgtggcaaggaggtgtacagccctgactttcatagcctcggaggagaaggtcttggtggccgacaagtctggagacgtctactccttttcggtgctggagccacacgggtgtggccgtctagagctggggcacctgtctatgctgttagatgtggctgtgagtcctgatgaccgcttcatcctcactgccgaccgggacgagaagatccgagtcagctgggccgcggcgccccatagcatcgagtccttctgcttggggcacacagagtttgtgagccgtatctccgtggtgccaactcagcccgggctgcttctgtcctcctctggggacggcaccctgaggctctgggagtacaggagcggccgccagctgcactgctgtcacctggccagtctgcaggagctggtggacccccaggccccccagaagtttgccgcgtccaggattgcattctggtgccaggagaactgcgtggcgctcctgtgcgacggcactcctgtggtctacatcttccagctggacgcccgcagacagcagttggtgtacaggcagcagctggcgttccagcaccaagtgtgggacgtggctttcgaggagacccaggggctgtgggtgctccaggactgccaggaagcccccctggtgctctacaggcctgtgggcgaccagtggcagtctgttcctgagagcaccgtgttaaagaaagtctctggtgttcttcgtgggaactgggccatgctggaaggctctgccggcgcagacgccagcttcagcagtctctacaaggccacgttcgacaacgtgacctcctacctgaagaagaaagaggagagactgcagcagcagctagagaagaagcagcggcgccggagtcccccgcctgggcccgacgggcatgccaagaagatgagaccgggggaggcgacgctaagttgctgatcgtggcggtcagtggtgtctctcacctcaaattaggaaaagctttttaacttgttcccctgcatcctggcatgtcccttcaagaaggaaaaggtgacatcagttgtgaccagctcagaggatggggctgtcccctgggctctagaaagaacattctgtgtcaccagcacaggctcttgctgggtgcctgtgccccctttctggttgaagggaagccagaccagtggagtggaagctcttgaagcactttcttttcatgtcggaggctgcgtgtgagccggtggtggcggcagctgtctgtgtttctcctgttctcataccgcccttcgtgtccgctgcatcttcctctaggagcatctgtgggctgacgtttctggcatggtggatgttttcatgttgttccgccgtctcagcatccaggtgacgtgctgtcccgcagtagctgctcgccacacaggctgttgaaactcagcacgaatgcttgagcctgccccagccccagccgtagcccttgtgctcaggagctgctcctggagagtggctcccttgtgggaagtgagaaacacgtttcggagtcgcagggagctctgtctggcatcggtggcacagatggtgaacttgtttcaggaagtgtgagcacgggcctggctggcacccggtttacagggaggtgattgaggacgtcgttatgatttgatttgaccttggcacacactgcagagccacagggatgttgctgaatttcaatcaccgatcagcaaggatgaaccttctcaacttcctaggaatgtttagcagcaaccgaatataccaggcaaaactc

SEQ ID NO: 34373 - DNA, 3707 bp, Homo sapiens
  source 1..3707: mol_type = unassigned DNA
aagtgacgtcggagtgtcaacatgcaagatggcggcccatcaccggcagaacacagcagggcggaggaaagtgcaggtttcctatgttattcgagatgaagtggagaagtacaaccgaaatggagtcaatgctctgcagctggatccagcactaaatagacttttcacagccggtcgagactctatcataagaatatggagtgtcaatcagcacaagcaagatccatatatagcatctatggaacaccatactgattgggtaaacgacattgtactctgttgtaatgggaaaacattaatatctgcttcttctgacacgacagtaaaagtatggaatgcacacaagggattttgcatgtcaacattaaggacacataaggattacgtaaaggccttagcatatgccaaggataaagaactagtagcatcagctgggttggacagacaaatattcctttgggatgtgaatactctaacagcattgactgcctcaaataacactgtcacaacttcttctttaagtggaaacaaagattccatttatagcctggccatgaatcaactgggaacaatcattgtatcagggtccactgaaaaggtgttacgggtatgggatccaagaacatgtgcaaaactaatgaagcttaaagggcacacggataatgtgaaggcattgctattaaacagagatggcacgcaatgcctgtcaggcagttctgatgggacaattcgcctttggtcccttggccagcagagatgtatagcaacataccgagtccatgatgaaggtgtttgggcgctgcaagtcaatgatgccttcacacatgtgtattctggtggaagggacaggaagatttattgtacagacctaagaaaccctgacattcgggtgctaatttgtgaagaaaaagcaccagttctcaagatggagcttgatagatcagctgatcctcctcctgcaatttgggttgcaacaactaagtctacagtaaataaatggactttgaaaggaattcataattttagagcctctggagattatgacaatgactgtacaaatcctataacacctctttgtacacaacctgaccaggttattaaagggggtgctagtattattcagtgccacattcttaatgataagagacatatattaaccaaagataccaataataatgtggcatattgggatgtattgaaggcatgtaaagttgaagatctgggcaaagtggattttgaagatgaaattaagaaaagatttaaaatggtgtatgtgccaaattggttctcagtagacttaaaaacagggatgttaactattactttggatgaaagtgattgttttgctgcctgggtttctgcaaaagatgctggtttcagcagccctgatgggtcagatccaaaattgaatttaggaggacttttactccaagcactcctggaatattggcctagaacacatgtgaatccaatggatgaagaggaaaatgaagtaaaccatgtaaatggggagcaggagaaccgagtgcagaagggaaatggatattttcaagtgcccccacatacacccgtgatctttggtgaagctggaggtcgcacactgttcaggctgctctgccgagattccgggggtgagactgagtctatgcttcttaatgaaacagtgccacaatgggtaattgacatcactgtggataaaaatatgcccaaattcaacaaaattcctttctacctccaacctcatgcatcttcaggagcaaaaaccttaaaaaaagatagactctctgctagtgacatgctccaagtccgaaaagttatggaacatgtttatgaaaaaattatcaacttggataatgagtctcaaaccactagctcttctaataatgaaaaaccaggagaacaggaaaaagaagaagatattgctgtgttggcagaggagaaaattgaacttttgtgccaggaccaggttttggatccaaatatggaccttcgaacagtgaaacacttcatatggaagagcggtggagacctcaccctccattaccgtcagaagtccacgtgaaggctgggctaatgctcctggatattcatttacgaccttcctctatggccccaagagtagtcctaggaagcccactgatccccaacgggagcaagacttctaacggctgattggtatggaccgagattatctttcaattgaagtgactaatcgagatgtaatatagaaaccagtctccatgtgtagattaagctgtccccagggaagcagagtgcaagagcagaagagccccaagcagactatgtctttcaagatgtacagaagactgacaacaggccagtgcagactttgcttcctccttttgtttcaaaggaccttatctacccattaacacttgttagagacacctcagtcgggccacaactgtctctgtttcaactttaagcccacacactctgtagcttttctaaaacagtacattccattcatgcagtagatatgaaggctttttccaagtttgtcatataaagtaatcaaattgttttcaccgtttaagacagttatttttaatgggaatttgctgttgcacaatttgagaaccagcccatttcataataaaagattaatgttgggcttgttgttaatattgcatctcagatgtgttcttgtaggaagatctgttgaaattccaggtgctggatcatagcacttggactgttgggccggagtttgtgcagcccatgcctagcgatgctgcacctcccatgatgtcctggctttgtggcaaccccagggaggtgcagcagtttcactccttcctccactgtgtccagttttatttacacaaagcgagctgagaccacaggttcttgctctggatgagcagcatgacaccatcaaaatttaagaccatgatgaaatttcagtttcattcaaatgttacctaaaatttatggtgtcagaataaagggagatcatagtgagttaatttgatattcatatcctggaagtatacatatttgtttttccaaagttttatatgcaggtttttgttgtacctgtatccagatcttcttttcactgttctaacaatctaacactttcatagaatcatttggatcttgtatagagtgtaacttattggggataaacacttcaacttttggcagaaaatactttggattctccccaaggtcatttgtattcagagtaaatcagtggtccacccccataaaactgtaagacaagcctcctgtatgaagccagaagcacaagtgccttcagagggcagttgattccagtccagttgcctccctagcttgtgtgtggcctgcctccaccatagcagggactagggagggaggcagggaacgttttttcttttctacatcttcacaggttcggctgggggcagctgataggcctaaggccataccttactatttaagatactctgatcgcacaactgcagagacagggttccctcactgctagtcagcttcttttggaaactggacaggccattgccacctgcactttgaagaagtgagcaaagacgtggccacatttctaataagttgaaatggtctttctcccttcctcagagagcaaccagcttctttttttttaaaagtcctttctatctgttggatacaacagtgtgcttttggtgcacattttttagcaatagttgtgaattaatggc

SEQ ID NO: 34374 - DNA, 3610 bp, Homo sapiens
  source 1..3610: mol_type = unassigned DNA
aacatgcaagatggcggcccatcaccggcagaacacagcagggcggaggaaagtgcaggtttcctatgttattcgagatgaagtggagaagtacaaccgaaatggagtcaatgctctgcagctggatccagcactaaatagacttttcacagccggtcgagactctatcataagaatatggagtgtcaatcagcacaagtaatatctgcttcttctgacacgacagtaaaagtatggaatgcacacaagggattttgcatgtcaacattaaggacacataaggattacgtaaaggccttagcatatgccaaggataaagaactagtagcatcagctgggttggacagacaaatattcctttgggatgtgaatactctaacagcattgactgcctcaaataacactgtcacaacttcttctttaagtggaaacaaagattccatttatagcctggccatgaatcaactgggaacaatcattgtatcagggtccactgaaaaggtgttacgggtatgggatccaagaacatgtgcaaaactaatgaagcttaaagggcacacggataatgtgaaggcattgctattaaacagagatggcacgcaatgcctgtcaggcagttctgatgggacaattcgcctttggtcccttggccagcagagatgtatagcaacataccgagtccatgatgaaggtgtttgggcgctgcaagtcaatgatgccttcacacatgtgtattctggtggaagggacaggaagatttattgtacagacctaagaaaccctgacattcgggtgctaatttgtgaagaaaaagcaccagttctcaagatggagcttgatagatcagctgatcctcctcctgcaatttgggttgcaacaactaagtctacagtaaataaatggactttgaaaggaattcataattttagagcctctggagattatgacaatgactgtacaaatcctataacacctctttgtacacaacctgaccaggttattaaagggggtgctagtattattcagtgccacattcttaatgataagagacatatattaaccaaagataccaataataatgtggcatattgggatgtattgaaggcatgtaaagttgaagatctgggcaaagtggattttgaagatgaaattaagaaaagatttaaaatggtgtatgtgccaaattggttctcagtagacttaaaaacagggatgttaactattactttggatgaaagtgattgttttgctgcctgggtttctgcaaaagatgctggtttcagcagccctgatgggtcagatccaaaattgaatttaggaggacttttactccaagcactcctggaatattggcctagaacacatgtgaatccaatggatgaagaggaaaatgaagtaaaccatgtaaatggggagcaggagaaccgagtgcagaagggaaatggatattttcaagtgcccccacatacacccgtgatctttggtgaagctggaggtcgcacactgttcaggctgctctgccgagattccgggggtgagactgagtctatgcttcttaatgaaacagtgccacaatgggtaattgacatcactgtggataaaaatatgcccaaattcaacaaaattcctttctacctccaacctcatgcatcttcaggagcaaaaaccttaaaaaaagatagactctctgctagtgacatgctccaagtccgaaaagttatggaacatgtttatgaaaaaattatcaacttggataatgagtctcaaaccactagctcttctaataatgaaaaaccaggagaacaggaaaaagaagaagatattgctgtgttggcagaggagaaaattgaacttttgtgccaggaccaggttttggatccaaatatggaccttcgaacagtgaaacacttcatatggaagagcggtggagacctcaccctccattaccgtcagaagtccacgtgaaggctgggctaatgctcctggatattcatttacgaccttcctctatggccccaagagtagtcctaggaagcccactgatccccaacgggagcaagacttctaacggctgattggtatggaccgagattatctttcaattgaagtgactaatcgagatgtaatatagaaaccagtctccatgtgtagattaagctgtccccagggaagcagagtgcaagagcagaagagccccaagcagactatgtctttcaagatgtacagaagactgacaacaggccagtgcagactttgcttcctccttttgtttcaaaggaccttatctacccattaacacttgttagagacacctcagtcgggccacaactgtctctgtttcaactttaagcccacacactctgtagcttttctaaaacagtacattccattcatgcagtagatatgaaggctttttccaagtttgtcatataaagtaatcaaattgttttcaccgtttaagacagttatttttaatgggaatttgctgttgcacaatttgagaaccagcccatttcataataaaagattaatgttgggcttgttgttaatattgcatctcagatgtgttcttgtaggaagatctgttgaaattccaggtgctggatcatagcacttggactgttgggccggagtttgtgcagcccatgcctagcgatgctgcacctcccatgatgtcctggctttgtggcaaccccagggaggtgcagcagtttcactccttcctccactgtgtccagttttatttacacaaagcgagctgagaccacaggttcttgctctggatgagcagcatgacaccatcaaaatttaagaccatgatgaaatttcagtttcattcaaatgttacctaaaatttatggtgtcagaataaagggagatcatagtgagttaatttgatattcatatcctggaagtatacatatttgtttttccaaagttttatatgcaggtttttgttgtacctgtatccagatcttcttttcactgttctaacaatctaacactttcatagaatcatttggatcttgtatagagtgtaacttattggggataaacacttcaacttttggcagaaaatactttggattctccccaaggtcatttgtattcagagtaaatcagtggtccacccccataaaactgtaagacaagcctcctgtatgaagccagaagcacaagtgccttcagagggcagttgattccagtccagttgcctccctagcttgtgtgtggcctgcctccaccatagcagggactagggagggaggcagggaacgttttttcttttctacatcttcacaggttcggctgggggcagctgataggcctaaggccataccttactatttaagatactctgatcgcacaactgcagagacagggttccctcactgctagtcagcttcttttggaaactggacaggccattgccacctgcactttgaagaagtgagcaaagacgtggccacatttctaataagttgaaatggtctttctcccttcctcagagagcaaccagcttctttttttttaaaagtcctttctatctgttggatacaacagtgtgcttttggtgcacattttttagcaatagttgtgaattaatggc

SEQ ID NO: 34375 - DNA, 2140 bp, Homo sapiens
  source 1..2140: mol_type = unassigned DNA
aacatgcaagatggcggcccatcaccggcagaacacagcagggcggaggaaagtgcaggtttcctatgttattcgagatgaagtggagaagtacaaccgaaatggagtcaatgctctgcagctggatccagcactaaatagacttttcacagccggtcgagactctatcataagaatatggagtgtcaatcagcacaagcaagatccatatatagcatctatggaacaccatactgattgggtaaacgacattgtactctgttgtaatgggaaaacattaaaagtatggaatgcacacaagggattttgcatgtcaacattaaggacacataaggattacgtaaaggccttagcatatgccaaggataaagaactagtagcatcagctgggttggacagacaaatattcctttgggatgtgaatactctaacagcattgactgcctcaaataacactgtcacaacttcttctttaagtggaaacaaagattccatttatagcctggccatgaatcaactgggaacaatcattgtatcagggtccactgaaaaggtgttacgggtatgggatccaagaacatgtgcaaaactaatgaagcttaaagggcacacggataatgtgaaggcattgctattaaacagagatggcacgcaatgcctgtcaggcagttctgatgggacaattcgcctttggtcccttggccagcagagatgtatagcaacataccgagtccatgatgaaggtgtttgggcgctgcaagtcaatgatgccttcacacatgtgtattctggtggaagggacaggaagatttattgtacagacctaagaaaccctgacattcgggtgctaatttgtgaagaaaaagcaccagttctcaagatggagcttgatagatcagctgatcctcctcctgcaatttgggttgcaacaactaagtctacagtaaataaatggactttgaaaggaattcataattttagagcctctggagattatgacaatgactgtacaaatcctataacacctctttgtacacaacctgaccaggttattaaagggggtgctagtattattcagtgccacattcttaatgataagagacatatattaaccaaagataccaataataatgtggcatattgggatgtattgaaggcatgtaaagttgaagatctgggcaaagtggattttgaagatgaaattaagaaaagatttaaaatggtgtatgtgccaaattggttctcagtagacttaaaaacagggatgttaactattactttggatgaaagtgattgttttgctgcctgggtttctgcaaaagatgctggtttcagcagccctgatgggtcagatccaaaattgaatttaggaggacttttactccaagcactcctggaatattggcctagaacacatgtgaatccaatggatgaagaggaaaatgaagtaaaccatgtaaatggggagcaggagaaccgagtgcagaagggaaatggatattttcaagtgcccccacatacacccgtgatctttggtgaagctggaggtcgcacactgttcaggctgctctgccgagattccgggggtgagactgagtctatgcttcttaatgaaacagtgccacaatgggtaattgacatcactgtggataaaaatatgcccaaattcaacaaaattcctttctacctccaacctcatgcatcttcaggagcaaaaaccttaaaaaaagatagactctctgctagtgacatgctccaagtccgaaaagttatggaacatgtttatgaaaaaattatcaacttggataatgagtctcaaaccactagctcttctaataatgaaaaaccaggagaacaggaaaaagaagaagatattgctgtgttggcagaggagaaaattgaacttttgtgccaggaccaggtaagagttttggatccaaatatggaccttcgaacagtgaaacacttcatatggaagagcggtggagacctcaccctccattaccgtcagaagtccacgtgaaggctgggctaatgctcctggatattcatttacgaccttcctctatggccccaagagtagtcctaggaagcccactgatccccaacgggagcaagacttctaacggctgattggtat

SEQ ID NO: 34376 - DNA, 2864 bp, Homo sapiens
  source 1..2864: mol_type = unassigned DNA
aacatgcaagatggcggcccatcaccggcagaacacagcagggcggaggaaagtgcagtgcctgtcaggcagttctgatgggacaattcgcctttggtcccttggccagcagagatgtatagcaacataccgagtccatgatgaaggtgtttgggcgctgcaagtcaatgatgccttcacacatgtgtattctggtggaagggacaggaagatttattgtacagacctaagaaaccctgacattcgggtgctaatttgtgaagaaaaagcaccagttctcaagatggagcttgatagatcagctgatcctcctcctgcaatttgggttgcaacaactaagtctacagtaaataaatgggcatgtaaagttgaagatctgggcaaagtggattttgaagatgaaattaagaaaagatttaaaatggtgtatgtgccaaattggttctcagtagacttaaaaacagggatgttaactattactttggatgaaagtgattgttttgctgcctgggtttctgcaaaagatgctggtttcagcagccctgatgggtcagatccaaaattgaatttaggaggacttttactccaagcactcctggaatattggcctagaacacatgtgaatccaatggatgaagaggaaaatgaagtaaaccatgtaaatggggagcaggagaaccgagtgcagaagggaaatggatattttcaagtgcccccacatacacccgtgatctttggtgaagctggaggtcgcacactgttcaggctgctctgccgagattccgggggtgagactgagtctatgcttcttaatgaaacagtgccacaatgggtaattgacatcactgtggataaaaatatgcccaaattcaacaaaattcctttctacctccaacctcatgcatcttcaggagcaaaaaccttaaaaaaagatagactctctgctagtgacatgctccaagtccgaaaagttatggaacatgtttatgaaaaaattatcaacttggataatgagtctcaaaccactagctcttctaataatgaaaaaccaggagaacaggaaaaagaagaagatattgctgtgttggcagaggagaaaattgaacttttgtgccaggaccaggttttggatccaaatatggaccttcgaacagtgaaacacttcatatggaagagcggtggagacctcaccctccattaccgtcagaagtccacgtgaaggctgggctaatgctcctggatattcatttacgaccttcctctatggccccaagagtagtcctaggaagcccactgatccccaacgggagcaagacttctaacggctgattggtatggaccgagattatctttcaattgaagtgactaatcgagatgtaatatagaaaccagtctccatgtgtagattaagctgtccccagggaagcagagtgcaagagcagaagagccccaagcagactatgtctttcaagatgtacagaagactgacaacaggccagtgcagactttgcttcctccttttgtttcaaaggaccttatctacccattaacacttgttagagacacctcagtcgggccacaactgtctctgtttcaactttaagcccacacactctgtagcttttctaaaacagtacattccattcatgcagtagatatgaaggctttttccaagtttgtcatataaagtaatcaaattgttttcaccgtttaagacagttatttttaatgggaatttgctgttgcacaatttgagaaccagcccatttcataataaaagattaatgttgggcttgttgttaatattgcatctcagatgtgttcttgtaggaagatctgttgaaattccaggtgctggatcatagcacttggactgttgggccggagtttgtgcagcccatgcctagcgatgctgcacctcccatgatgtcctggctttgtggcaaccccagggaggtgcagcagtttcactccttcctccactgtgtccagttttatttacacaaagcgagctgagaccacaggttcttgctctggatgagcagcatgacaccatcaaaatttaagaccatgatgaaatttcagtttcattcaaatgttacctaaaatttatggtgtcagaataaagggagatcatagtgagttaatttgatattcatatcctggaagtatacatatttgtttttccaaagttttatatgcaggtttttgttgtacctgtatccagatcttcttttcactgttctaacaatctaacactttcatagaatcatttggatcttgtatagagtgtaacttattggggataaacacttcaacttttggcagaaaatactttggattctccccaaggtcatttgtattcagagtaaatcagtggtccacccccataaaactgtaagacaagcctcctgtatgaagccagaagcacaagtgccttcagagggcagttgattccagtccagttgcctccctagcttgtgtgtggcctgcctccaccatagcagggactagggagggaggcagggaacgttttttcttttctacatcttcacaggttcggctgggggcagctgataggcctaaggccataccttactatttaagatactctgatcgcacaactgcagagacagggttccctcactgctagtcagcttcttttggaaactggacaggccattgccacctgcactttgaagaagtgagcaaagacgtggccacatttctaataagttgaaatggtctttctcccttcctcagagagcaaccagcttctttttttttaaaagtcctttctatctgttggatacaacagtgtgcttttggtgcacattttttagcaatagttgtgaattaatggc

SEQ ID NO: 34377 - DNA, 746 bp, Homo sapiens
  source 1..746: mol_type = unassigned DNA
cttcttagccgtggctgcctcagcacctcgaggatcgacatggacgctctcgaggactacgtttggccgcgggcaacctcggagcttatactcctcccagtgacgggtctggagtgcgtgggggaccggctgttggcgggtgagggtcccgatgtcctggtgtacagcttggactttggtgggcatctgcggatgataaagcgagtgcagaacctgcttggccactatcttatccatggcttccgggtacggccagagcctaatggagaccttgacttggaggccatggtggctgtgtttggaagcaagggactccgagttgtgaaaattagctggggacagggccacttctgggagctttggcgctctggcctgtggaacatgtctgactggatttgggatgcacgctggcttgagggaaatatagccttggccctgggccacaactcagtggtgctatatgaccctgtagtagggtgcatcctgcaagaggtgccctgcacagacaggtgcaccctctcttcagcctgcctgattggagacgcctggaaggagctgaccatagtggcaggtgctgtttccaaccagctcttggtctggtacccagcaactgcctttaccctatacctctctgcacgtcccaccccattttgctgtgtgctcacccccaggatgtgtacccggttgtagtaggagctgaaatccatgctgagctgtaccagaataaagaatagagtgtagagtgt

SEQ ID NO: 34378 - DNA, 4401 bp, Homo sapiens
  source 1..4401: mol_type = unassigned DNA
tttattgtgtactgactccatctgccccgtcaaataaaaaaccacaaggttcgagccgccgggcccgacaaactccgggtcggcgaaacagagtccgcgataggtgcagcgggctggcagctgggagcgccccgcaagcgtcacgtgagggggcgaggggcgggatgcccctccgcgggccccgccaatgatgagctggattgcgtgggacgaagggtcgtcattggacaaccgccgcgggcgccctggtctctgctacctgtagctgagggcgctgttgatgggcagcgcggcgcgctgggaaggctcgttctcgcgagagttcagctcccttcttagccgtggctgcctcagcacctcgaggatcgacatggacgctctcgaggactacgtttggccgcgggcaacctcggagcttatactcctcccagtgacgggtctggagtgcgtgggggaccggctgttggcgggtgagggtcccgatgtcctggtgtacagcttggactttggtgggcatctgcggatgataaagcgagtgcagaacctgcttggccactatcttatccatggcttccgggtacggccagagcctaatggagaccttgacttggaggccatggtggctgtgtttggaagcaagggactccgagttgtgaaaattagctggggacagggccacttctgggagctttggcgctctggcctgtggaacatgtctgactggatttgggatgcacgctggcttgagggaaatatagccttggccctgggccacaactcagtggtgctatatgaccctgtagtagggtgcatcctgcaagaggtgccctgcacagacaggtgcaccctctcttcagcctgcctgattggagacgcctggaaggagctgaccatagtggcaggtgctgtttccaaccagctcttggtctggtacccagcaactgccttagcagacaacaaacctgtagcacctgaccgacgaatcagtgggcatgtgggcatcatcttcagcatgtcatacctggaaagcaagggattgctggctacagcttcagaagaccgaagcgttcgtatctggaaggtgggcgacctgcgagtgcctgggggtcgggtgcagaatattgggcactgctttgggcacagcgcccgtgtgtggcaggtcaagcttctagagaattaccttatcagtgcaggagaggattgtgtctgcttggtgtggagccatgaaggtgagatcctccaggcctttcggggacaccagggacgtgggatccgggccatagctgcccatgagaggcaggcctgggtgatcactgggggtgatgactcaggcattcggctgtggcacttggtagggcgtgggtaccggggattgggggtctcggctctctgcttcaagtcccgtagtaggccaggtacactcaaggctgtgactctggctggctcttggcgactgctggcagtgactgatacaggggccctgtatctctatgacgtcgaggtcaagtgctgggagcagctgctagaggataaacatttccagtcctactgcctgctggaggcagctcctggtcccgagggcttcggattgtgtgctatggccaatggggaaggtcgtgtcaaggttgtccccatcaacactccaactgctgctgtggaccagaccctgtttcctgggaaggtgcacagcttgagctgggccctgcgtggttatgaggagctcctgttgctggcatcgggccctggcggggtagtagcttgcctagagatctcagccgcaccctctggcaaggccatctttgtcaaggaacgttgtcggtacctgctgcccccaagcaagcagagatggcacacatgcagtgccttcctacccccaggtgacttcctggtgtgtggtgaccgccggggctctgtgctgctattcccctccagaccaggtctgctcaaggaccctggggtgggaggcaaggctcgggctggtgctggggcacctgtagtgggtagtggtagtagtgggggtgggaatgctttcactgggttgggcccagtgtctaccctgccctctctgcacgggaagcagggtgtgacctcagtcacatgccatggtggctatgtgtataccacagggcgtgatggagcctactaccagctgtttgtacgagacggccagctccagccagtcctaaggcagaagtcctgtcgaggcatgaactggctagctgggctccgtatagtgcccgatgggagcatggttatcctgggtttccatgccaatgagtttgtggtgtggaaccctcggtcacacgagaagctgcacatcgtcaactgtggtggagggcaccgttcgtgggcattctctgatactgaggcggccatggcctttgcttacctcaaggatggggatgtcatgctgtacagggctctgggtggctgcacccggccacacgtgattctccgggagggtctgcatggccgtgagatcacttgtgtaaagcgtgtgggcaccattaccctggggcctgaatatggagtgcccagcttcatgcagcctgatgacctggagcctggcagtgaggggcccgacttgactgacattgtgatcacatgtagtgaggacactactgtctgtgtcctagcactccctacaaccacaggctcagcccacgcactcacagctgtttgtaaccatatctcctcggtacgtgctgtggctgtgtggggcattggcaccccaggtggccctcaggatcctcagccaggcctgactgcccatgtggtgtctgcgggggggcgggctgagatgcactgcttcagcatcatggttactccggaccccagcaccccaagccgcctcgcctgccatgtcatgcacctttcgtcccaccggctagatgagtattgggaccggcaacgcaatcggcatcggatggttaaggtagacccagagaccaggtacatgtcccttgctgtgtgtgaacttgaccagcccggccttggcccccttgtggctgcagcctgtagtgatggggccgtaaggctctttcttttgcaggattctgggcggattctgcagctccttgctgaaaccttccaccataagcgatgtgtcctcaaggtccactcctttacacacgaggcacccaaccagaggcggaggctcctcctgtgcagcgcagctactgatggcagcctggctttctgggatctcaccaccatgctagaccatgactccactgtcctggagcctccagtggatcctgggcttccctaccggcttggcaccccctccctgactctccaggcccacagctgtggtatcaacagcctgcacaccttgcccacccgtgagggccaccatctcgtggccagtggcagtgaagatggatccctccatgtcttcgtgcttgctgtggagatgctacagctagaagaggctgtgggagaggctgggctggtaccccagctgcgtgtgctagaggaatactctgtcccctgtgcacatgctgcccatgtgacaggcctcaagatcctaagcccaagcatcatggtctcagcctccattgatcaacggctgaccttctggcgtctggggcatggtgaacccaccttcatgaatagcactgtgttccatgtgcctgatgtggctgacatggactgctggcctgtgagccctgagtttggccaccgttgtgcccttgggggtcaggggcttgaggtttacaactggtatgactgaggtatcctgcggtggctggcgtgctgggcatggggcctgctcacagacagcatggagcagggatgggctgtctgtgcccatgctcagcatgccttgaggggaggaggtggtggccgtgggttcctgatgtcggtgcaggagctgaaggtgagtggagtgctgccaagaatatgcccgactccccatgacaagacagaactttgtaacaaacagtaccaatttattttggccgtgggtttttgctttttttccagttgatgactttgtgaacattcccaggtattggagcctctgtggccttaaatgtggctcagtggagggagacccagcatagccaggccagtatggagcacctcacgcacagctctcagaagctgcaggcggacgaacatctgaccaaagaggtgtggtcgaggctcctgaaagagaaagggcctgctggtctcatcctctgcttcctttgcctttaccctatacctctctgcacgtcccaccccattttgctgtgtgctcacccccaggatgtgtacccggttgtagtaggagctgaaatccatgctgagctgtaccaggaacttgcatatctagagacagagactgagtcactggcccatctctttgctcttgtgccccaggccagaataaagaatagagtgtagagtgtc

SEQ ID NO: 34379 - DNA, 3377 bp, Homo sapiens
  source 1..3377: mol_type = unassigned DNA
aaaaggggtgccctgaggagaaggacgggcagcaggttgaggccgatcggaggtgagggtcccgatgtcctggtgtacagcttggactttggtgggcatctgcggatgataaagcgagtgcagaacctgcttggccactatcttatccatggcttccgggtacggccagagcctaatggagaccttgacttggaggccatggtggctgtgtttggaagcaagggactccgagttgtgaaaattagctggggacagggccacttctgggagctttggcgctctggcctgtggaacatgtctgactggatttgggatgcacgctggcttgagggaaatatagccttggccctgggccacaactcagtggtgctatatgaccctgtagtagggtgcatcctgcaagaggtgccctgcacagacaggtgcaccctctcttcagcctgcctgattggagacgcctggaaggagctgaccatagtggcaggtgctgtttccaaccagctcttggtctggtacccagcaactgccttagcagacaacaaacctgtagcacctgaccgacgaatcagtgggcatgtgggcatcatcttcagcatgtcatacctggaaagcaagggattgctggctacagcttcagaagaccgaagcgttcgtatctggaaggtgggcgacctgcgagtgcctgggggtcgggtgcagaatattgggcactgctttgggcacagcgcccgtgtgtggcaggtcaagcttctagagaattaccttatcagtgcaggagaggattgtgtctgcttggtgtggagccatgaaggtgagatcctccaggcctttcggggacaccagggacgtgggatccgggccatagctgcccatgagaggcaggcctgggtgatcactgggggtgatgactcaggcattcggctgtggcacttggtagggcgtgggtaccggggattgggggtctcggctctctgcttcaagtcccgtagtaggccaggtacactcaaggctgtgactctggctggctcttggcgactgctggcagtgactgatacaggggccctgtatctctatgacgtcgaggtcaagtgctgggagcagctgctagaggataaacatttccagtcctactgcctgctggaggcagctcctggtcccgagggcttcggattgtgtgctatggccaatggggaaggtcgtgtcaaggttgtccccatcaacactccaactgctgctgtggaccagaccctgtttcctgggaaggtgcacagcttgagctgggccctgcgtggttatgaggagctcctgttgctggcatcgggccctggcggggtagtagcttgcctagagatctcagccgcaccctctggcaaggccatctttgtcaaggaacgttgtcggtacctgctgcccccaagcaagcagagatggcacacatgcagtgccttcctacccccaggtgacttcctggtgtgtggtgaccgccggggctctgtgctgctattcccctccagaccaggtctgctcaaggaccctggggtgggaggcaaggctcgggctggtgctggggcacctgtagtgggtagtggtagtagtgggggtgggaatgctttcactgggttgggcccagtgtctaccctgccctctctgcacgggaagcagggtgtgacctcagtcacatgccatggtggctatgtgtataccacagggcgtgatggagcctactaccagctgtttgtacgagacggccagctccagccagtcctaaggcagaagtcctgtcgaggcatgaactggctagctgggctccgtatagtgcccgatgggagcatggttatcctgggtttccatgccaatgagtttgtggtgtggaaccctcggtcacacgagaagctgcacatcgtcaactgtggtggagggcaccgttcgtgggcattctctgatactgaggcggccatggcctttgcttacctcaaggatggggatgtcatgctgtacagggctctgggtggctgcacccggccacacgtgattctccgggagggtctgcatggccgtgagatcacttgtgtaaagcgtgtgggcaccattaccctggggcctgaatatggagtgcccagcttcatgcagcctgatgacctggagcctggcagtgaggggcccgacttgactgacattgtgatcacatgtagtgaggacactactgtctgtgtcctagcactccctacaaccacaggctcagcccacgcactcacagctgtttgtaaccatatctcctcggtacgtgctgtggctgtgtggggcattggcaccccaggtggccctcaggatcctcagccaggcctgactgcccatgtggtgtctgcgggggggcgggctgagatgcactgcttcagcatcatggttactccggaccccagcaccccaagccgcctcgcctgccatgtcatgcacctttcgtcccaccggctagatgagtattgggaccggcaacgcaatcggcatcggatggttaaggtagacccagagaccaggtacatgtcccttgctgtgtgtgaacttgaccagcccggccttggcccccttgtggctgcagcctgtagtgatggggccgtaaggctctttcttttgcaggattctgggcggattctgcagctccttgctgaaaccttccaccataagcgatgtgtcctcaaggtccactcctttacacacgaggcacccaaccagaggcggaggctcctcctgtgcagcgcagctactgatggcagcctggctttctgggatctcaccaccatgctagaccatgactccactgtcctggagcctccagtggatcctgggcttccctaccggcttggcaccccctccctgactctccaggcccacagctgtggtatcaacagcctgcacaccttgcccacccgtgagggccaccatctcgtggccagtggcagtgaagatggatccctccatgtcttcgtgcttgctgtggagatgctacagctagaagaggctgtgggagaggctgggctggtaccccagctgcgtgtgctagaggaatactctgtcccctgtgcacatgctgcccatgtgacaggcctcaagatcctaagcccaagcatcatggtctcagcctccattgatcaacggctgaccttctggcgtctggggcatggtgaacccaccttcatgaatagcactgtgttccatgtgcctgatgtggctgacatggactgctggcctgtgagccctgagtttggccaccgttgtgcccttgggggtcaggggcttgaggtttacaactggtatgactgaggtatcctgcggtggctggcgtgctgggcatggggcctgctcacagacagcatggagca

SEQ ID NO: 34380 - DNA, 4557 bp, Homo sapiens
  source 1..4557: mol_type = unassigned DNA
atggcggccgtagggtccggaggctatgcgcggaacgatgcaggggagaagctgccctctgtcatggcgggagttccggcgcggaggggccagtcctccccgccccccgccccaccaatctgcctacggcggcggacgcgactctcgacggcctccgaggagacggtgcagaaccgggtgtcactcgagaaggtgcttggcatcacagcccagaacagcagtggcctaacctgtgaccccggcacaggccatgtggcctacctggcaggctgtgtggtggtgattttggaccccaaggagaacaagcagcagcacatctttaacaccgccaggaagtctctcagtgctctggccttctcccctgatgggaagtacatagtgacaggggagaatgggcataggcctgctgtgcgcatctgggatgtggaggagaagaatcaggtggcggagatgctaggccacaagtatggtgtggcgtgtgtggccttctcacccaatatgaagcacatcgtgtccatgggctaccaacatgacatggtgctcaacgtctgggactggaagaaagacatcgtagtggcctccaacaaggtatcttgtagagtcattgccctctccttctcagaggacagcagctattttgtcactgttgggaaccgccatgtgaggttctggttcttggaagtctccactgagacaaaggtgacgagcacagtgccccttgtagggcgctcgggcatcctgggcgagctgcacaacaacatcttctgtggtgtggcctgcggtcggggccggatggcgggcagtaccttctgtgtgtcctactcgggcctcctctgccagttcaatgagaagagggtgctggagaagtggatcaacctgaaggtctccctgtcttcctgcctctgtgtcagccaggagctcatcttctgtggctgcacagatgggatagtccgcatcttccaggcccatagcctgcactacctcgccaacctgcccaagccacactaccttggggtagacgtggcacagggcctggagcccagcttcctcttccacaggaaggcggaagcagtctacccagatacagtggcactgaccttcgaccccatccaccagtggctgtcctgcgtgtataaggaccacagcatctacatctgggatgtcaaggacatcaacagagtgggcaaggtgtggtcagagctcttccacagctcctacgtttggaacgtggaggtgtatcctgagtttgaagaccagagagcttgtttgccatcaggatcctttctgacttgttcttcagacaacaccattcgcttctggaacttggacagcagccctgattctcactggcagaaaaacatcttcagcaataccctgctgaaggtcgtgtacgtggagaatgacatccagcacctgcaggacatgtcacacttcccagaccgggggagcgagaatgggacacccatggacgtgaaagccggggtgcgggtcatgcaggtcagtcctgacggccagcatttggcttcaggcgaccgaagtggaaatctgaggatccacgagctgcacttcatggacgagctggtcaaggtggaggcccatgatgctgaggtgctgtgcctggagtactccaagccagagacggggctgaccttgctggcctcagccagtcgggaccggctgatccatgtgctgaacgtggagaagaactacaacctggagcagacgctggatgaccactcctcctccatcaccgccatcaagttcgctggcaacagagacatccagatgatcagctgtggggctgacaagagcatctactttcgcagtgcccagcagggttcggatggactacactttgtccgtacccaccacgtagcagagaaaaccaccttgtatgacatggacattgacatcacccagaagtacgtggccgtggcctgccaggaccgcaatgtgagagtctacaacactgtgaacgggaagcagaagaagtgctacaagggctcccagggtgacgaagggtccttgctgaaggtccatgtggacccctcaggcaccttcctggccaccagctgctctgacaaaagcatctcagtgattgacttttactcgggcgagtgcattgccaagatgtttggccattcagaaattattaccagcatgaagttcacctatgactgtcatcacttgatcacagtatctggagacagctgcgtgttcatctggcacctgggcccggagatcaccaactgcatgaagcagcacttgctggagattgaccaccggcagcagcagcagcacacaaatgacaagaagcggagtggccaccccaggcaggatacgtatgtgtccacacctagtgagattcactccctgagccctggagagcaaacagaggatgatctggaggaagagtgtgagccagaagagatgctgaagacaccatccaaagatagcttggatccagatcctcgttgcctgctaaccaacggcaagctgccactgtgggcaaagcggctgctaggggacgatgatgtggcagatggcttggccttccacgccaagcgcagctaccagccccacggccgctgggcagagcgggccggccaagagcccctcaagaccatcctggatgcccaggacctggattgctactttacccccatgaagcccgagagtctggagaactccattctggattcactggagccacagagcctggccagcctgctgagtgagtcagagagtccccaggaagctggccgcgggcacccctccttcctgccccagcagaaggaatcatctgaggccagtgagctcatcctctactctctggaggcagaagtgacagtcacagggacagacagccagtattgcaggaaggaggtggaggccgggcctggagaccagcagggcgactcctacctcagggtgtcctccgacagcccaaaggaccagagcccgcctgaggactcgggggagtcagaggccgacctggagtgcagcttcgcagccatccactccccagctccgcctcctgaccctgcccctcggtttgccacgtcgctgccccatttcccaggatgcgcaggtcccacagaagatgagctgtccctgcccgagggacccagcgtccccagcagctccctaccccagactccggagcaggagaagttcctccgccaccactttgagacactgactgagtccccctgcagagctctgggagacgtggaggcctctgaagctgaagaccacttcttcaacccacgcctgagtatctccacgcagttcctctcaagcctccagaaggcatccaggttcacccataccttccctccccgggcaacccagtgccttgtgaagtctccagaggtcaagctcatggaccgaggcggaagccagcccagagcaggtactggctacgcctccccagacaggacccacgtcctcgctgcagggaaggctgaagagaccctggaggcctggcgcccaccacctccctgccttacgagcctggcgtcctgtgtccctgcttcctccgtgctgcccacagacaggaatctcccaacgcccacatctgcacccaccccaggcctggctcagggtgtccatgccccctccacctgttcctacatggaggccactgccagctcccgtgccaggatatcacgcagcatctccctcggtgacagtgagggccctatcgtggccacactggcccagcccctccgtaggccatcgtccgttggggagctggcctccttgggccaggagcttcaggccatcaccaccgcgacaacacccagtttggacagtgagggccaagagcctgccctgcgttcctggggcaaccacgaggcccgggccaacctgagactgaccctgtcaagtgcctgtgatgggctcctgcagccccccgtggatacccagcctggcgtcaccgtccctgcagtgagcttcccagcccctagccctgtggaagagagcgccctgaggctccacggctctgcctttcgcccaagtctcccagctcctgagtcccctggccttcctgcccaccccagtaacccccagcttccagaggcccggcctggcatccctggcggcactgcctccctcctggagcccacctccggtgcacttggtctgttacagggcagccctgcccgctggagtgagccctgggtgccggttgaagccctgcccccatctccccttgagctgagcagggtggggaacatcttgcacaggctgcagaccaccttccaagaagccctcgacctttaccgtgtgttggtctccagtggccaggtggacaccgggcagcagcaggcacggactgagctggtctccaccttcctgtggatccacagccagctggaggctgaatgcctggtggggactagtgtggccccagcccaggctctgcccagcccaggacccccgtccccaccgacgctgtaccccctggccagcccagacctgcaggccctgctggaacactactcggagctgctggtgcaggccgtgcggaggaaggcacgggggcactga

SEQ ID NO: 34381 - DNA, 1980 bp, Homo sapiens
  source 1..1980: mol_type = unassigned DNA
tttcccgcggctgttcgctgttccagtgggtcgtggcggtggcggcagcggcggttaggggatgtaacggtcgcccgcctccggcgtgacgatggcggccgtagggtccggaggctatgcgcggaacgatgcaggggagaagctgccctctgtcatggcgggagttccggcgcggaggggccagtcctccccgccccccgccccaccaatctgcctacggcggcggacgcgactctcgacggcctccgaggagacggtgcagaaccgggtgtcactcgagaaggtgcttggcatcacagcccagaacagcagtggcctaacctgtgaccccggcacaggccatgtggcctacctggcaggctgtgtggtggtgattttggaccccaaggagaacaagcagcagcacatctttaacaccgccaggaagtctctcagtgctctggccttctcccctgatgggaagtacatagtgacaggggagaatgggcataggcctgctgtgcgcatctgggatgtggaggagaagaatcaggtggcggagatgctaggccacaagtatggtgtggcgtgtgtggccttctcacccaatatgaagcacatcgtgtccatgggctaccaacatgacatggtgctcaacgtctgggactggaagaaagacatcgtagtggcctccaacaaggtatcttgtagagtcattgccctctccttctcagaggacagcagctattttgtcactgttgggaaccgccatgtgaggttctggttcttggaagtctccactgagacaaaggtgacgagcacagtgccccttgtagggcgctcgggcatcctgggcgagctgcacaacaacatcttctgtggtgtggcctgcggtcggggccggatggcgggcagtaccttctgtgtgtcctactcgggcctcctctgccagttcaatgagaagagggtgctggagaagtggatcaacctgaaggtctccctgtcttcctgcctctgtgtcagccaggagctcatcttctgtggctgcacagatgggatagtccgcatcttccaggcccatagcctgcactacctcgccaacctgcccaagccacactaccttggggtagacgtggcacagggcctggagcccagcttcctcttccacaggaaggcggaagcagtctacccagatacagtggcactgaccttcgaccccatccaccagtggctgtcctgcgtgtataaggaccacagcatctacatctgggatgtcaaggacatcaacagagtgggcaaggtgtggtcagagctcttccacagctcctacgtttggaacgtggaggccctgtcctaggtgctgaggacacagacacaaaatccctgcccttaacaagctcacatttggatgggaaaggaaacctggaaacatcatcagtgaataacacgccaagcagcagtaaccctctgaagaaaaatgaggcggggaaggggaaggggaatgcaggtggtattctagagaggagaggggtcagggaaggcctccctgaggacatatgagcagagacctgcaggaaatcggggagtgagacctgcaactgctggggagaaccacaagcacagaggccctgcggcaggaacatgcactccacagagagctttgctgtggaggtcgtttatgtatttcactgctttttttaaaaaggagttgaagacggggcatggtggctcacacctgtaatcccaacactttgggaatctgaggcgggaggatcacttgagtccaggagtttgagaccagcctgggcaacacaagaccctgtctctacaaataatttttaaaaattagccaggcatggtagcacacacgtgtggtcccagctactcaagaggtggaggcaggaagatcacttgagcctgggatgtcaaggctgcagtgagctgtgattgtgccaccacactcccacactccagcctgggtaacagtgagaccatgtctag

SEQ ID NO: 34382 - DNA, 1543 bp, Homo sapiens
  source 1..1543: mol_type = unassigned DNA
tttcccgcggctgttcgctgttccagtgggtcgtggcggtggcggcagcggcggttaggggatgtaacggtcgcccgcctccggcgtgacgatggcggccgtagggtccggaggctatgcgcggaacgatgcaggggagaagctgccctctgtcatggcgggagttccggcgcggaggggccagtcctccccgccccccgccccaccaatctgcctacggcggcggacgcgactctcgacggcctccgaggagacggtgcagaaccgggtgtcactcgagaaggtgcttggcatcacagcccagaacagcagtggcctaacctgtgaccccggcacaggccatgtggcctacctggcaggctgtgtggtggtgattttggaccccaaggagaacaagcagcagcacatctttaacaccgccaggaagtctctcagtgctctggccttctcccctgatgggaagtacatagtgacaggggagaatgggcataggcctgctgtgcgcatctgggatgtggaggagaagaatcaggtggcggagatgctaggccacaagtatggtgtggcgtgtgtggccttctcacccaatatgaagcacatcgtgtccatgggctaccaacatgacatggtgctcaacgtctgggactggaagaaagacatcgtagtggcctccaacaaggtatcttgtagagtcattgccctctccttctcagaggacagcagctattttgtcactgttgggaaccgccatgtgaggttctggttcttggaagtctccactgagacaaaggtgacgagcacagtgccccttgtagggcgctcgggcatcctgggcgagctgcacaacaacatcttctgtggtgtggcctgcggtcggggccggatggcgggcagtaccttctgtgtgtcctactcgggcctcctctgccagttcaatgagaagagggtgctggagaagtggatcaacctgaaggtctccctgtcttcctgcctctgtgtcagccaggagctcatcttctgtggctgcacagatgggatagtccgcatcttccaggcccatagcctgcactacctcgccaacctgcccaagccacactaccttggggtagacgtggcacagggcctggagcccagcttcctcttccacaggaaggcggaagcagtctacccagatacagtggcactgaccttcgaccccatccaccagtggctgtcctgcgtgtataaggaccacagcatctacatctgggatgtcaaggacatcaacagagtgggcaaggtgtggtcagagctcttccacagctcctacgtttggaacgtggaggtgtatcctgagtttgaagaccagagagcttgtttgccatcaggatcctttctgacttgttcttcagacaacaccattcgcttctggaacttggacagcagccctgattctcactggcagaaaaacatcttcagcaatttggctcctgctctgcagatgtgtggacgtggccactcccggcagcccaacacacccagcccaggtgaaattgcttcctaa

SEQ ID NO: 34383 - DNA, 4745 bp, Homo sapiens
  source 1..4745: mol_type = unassigned DNA
tttcccgcggctgttcgctgttccagtgggtcgtggcggtggcggcagcggcggttaggggatgtaacggtcgcccgcctccggcgtgacgatggcggccgtagggtccggaggctatgcgcggaacgatgcaggggagaagctgccctctgtcatggcgggagttccggcgcggaggggccagtcctccccgccccccgccccaccaatctgcctacggcggcggacgcgactctcgacggcctccgaggagacggtgcagaaccgggtgtcactcgagaaggtgcttggcatcacagcccagaacagcagtggcctaacctgtgaccccggcacaggccatgtggcctacctggcaggctgtgtggtggtgattttggaccccaaggagaacaagcagcagcacatctttaacaccgccaggaagtctctcagtgctctggccttctcccctgatgggaagtacatagtgacaggggagaatgggcataggcctgctgtgcgcatctgggatgtggaggagaagaatcaggtggcggagatgctaggccacaagtatggtgtggcgtgtgtggccttctcacccaatatgaagcacatcgtgtccatgggctaccaacatgacatggtgctcaacgtctgggactggaagaaagacatcgtagtggcctccaacaaggtatcttgtagagtcattgccctctccttctcagaggacagcagctattttgtcactgttgggaaccgccatgtgaggttctggttcttggaagtctccactgagacaaaggtgacgagcacagtgccccttgtagggcgctcgggcatcctgggcgagctgcacaacaacatcttctgtggtgtggcctgcggtcggggccggatggcgggcagtaccttctgtgtgtcctactcgggcctcctctgccagttcaatgagaagagggtgctggagaagtggatcaacctgaaggtctccctgtcttcctgcctctgtgtcagccaggagctcatcttctgtggctgcacagatgggatagtccgcatcttccaggcccatagcctgcactacctcgccaacctgcccaagccacactaccttggggtagacgtggcacagggcctggagcccagcttcctcttccacaggaaggcggaagcagtctacccagatacagtggcactgaccttcgaccccatccaccagtggctgtcctgcgtgtataaggaccacagcatctacatctgggatgtcaaggacatcaacagagtgggcaaggtgtggtcagagctcttccacagctcctacgtttggaacgtggaggtgtatcctgagtttgaagaccagagagcttgtttgccatcaggatcctttctgacttgttcttcagacaacaccattcgcttctggaacttggacagcagccctgattctcactggcagaaaaacatcttcagcaataccctgctgaaggtcgtgtacgtggagaatgacatccagcacctgcaggacatgtcacacttcccagaccgggggagcgagaatgggacacccatggacgtgaaagccggggtgcgggtcatgcaggtcagtcctgacggccagcatttggcttcaggcgaccgaagtggaaatctgaggatccacgagctgcacttcatggacgagctggtcaaggtggaggcccatgatgctgaggtgctgtgcctggagtactccaagccagagacggggctgaccttgctggcctcagccagtcgggaccggctgatccatgtgctgaacgtggagaagaactacaacctggagcagacgctggatgaccactcctcctccatcaccgccatcaagttcgctggcaacagagacatccagatgatcagctgtggggctgacaagagcatctactttcgcagtgcccagcagggttcggatggactacactttgtccgtacccaccacgtagcagagaaaaccaccttgtatgacatggacattgacatcacccagaagtacgtggccgtggcctgccaggaccgcaatgtgagagtctacaacactgtgaacgggaagcagaagaagtgctacaagggctcccagggtgacgaagggtccttgctgaaggtccatgtggacccctcaggcaccttcctggccaccagctgctctgacaaaagcatctcagtgattgacttttactcgggcgagtgcattgccaagatgtttggccattcagaaattattaccagcatgaagttcacctatgactgtcatcacttgatcacagtatctggagacagctgcgtgttcatctggcacctgggcccggagatcaccaactgcatgaagcagcacttgctggagattgaccaccggcagcagcagcagcacacaaatgacaagaagcggagtggccaccccaggcaggatacgtatgtgtccacacctagtgagattcactccctgagccctggagagcaaacagaggatgatctggaggaagagtgtgagccagaagagatgctgaagacaccatccaaagatagcttggatccagatcctcgttgcctgctaaccaacggcaagctgccactgtgggcaaagcggctgctaggggacgatgatgtggcagatggcttggccttccacgccaagcgcagctaccagccccacggccgctgggcagagcgggccggccaagagcccctcaagaccatcctggatgcccaggacctggattgctactttacccccatgaagcccgagagtctggagaactccattctggattcactggagccacagagcctggccagcctgctgagtgagtcagagagtccccaggaagctggccgcgggcacccctccttcctgccccagcagaaggaatcatctgaggccagtgagctcatcctctactctctggaggcagaagtgacagtcacagggacagacagccagtattgcaggaaggaggtggaggccgggcctggagaccagcagggcgactcctacctcagggtgtcctccgacagcccaaaggaccagagcccgcctgaggactcgggggagtcagaggccgacctggagtgcagcttcgcagccatccactccccagctccgcctcctgaccctgcccctcggtttgccacgtcgctgccccatttcccaggatgcgcaggtcccacagaagatgagctgtccctgcccgagggacccagcgtccccagcagctccctaccccagactccggagcaggagaagttcctccgccaccactttgagacactgactgagtccccctgcagagagctcttccccgcagctctgggagacgtggaggcctctgaagctgaagaccacttcttcaacccacgcctgagtatctccacgcagttcctctcaagcctccagaaggcatccaggttcacccataccttccctccccgggcaacccagtgccttgtgaagtctccagaggtcaagctcatggaccgaggcggaagccagcccagagcaggtactggctacgcctccccagacaggacccacgtcctcgctgcagggaaggctgaagagaccctggaggcctggcgcccaccacctccctgccttacgagcctggcgtcctgtgtccctgcttcctccgtgctgcccacagacaggaatctcccaacgcccacatctgcacccaccccaggcctggctcagggtgtccatgccccctccacctgttcctacatggaggccactgccagctcccgtgccaggatatcacgcagcatctccctcggtgacagtgagggccctatcgtggccacactggcccagcccctccgtaggccatcgtccgttggggagctggcctccttgggccaggagcttcaggccatcaccaccgcgacaacacccagtttggacagtgagggccaagagcctgccctgcgttcctggggcaaccacgaggcccgggccaacctgagactgaccctgtcaagtgcctgtgatgggctcctgcagccccccgtggatacccagcctggcgtcaccgtccctgcagtgagcttcccagcccctagccctgtggaagagagcgccctgaggctccacggctctgcctttcgcccaagtctcccagctcctgagtcccctggccttcctgcccaccccagtaacccccagcttccagaggcccggcctggcatccctggcggcactgcctccctcctggagcccacctccggtgcacttggtctgttacagggcagccctgcccgctggagtgagccctgggtgccggttgaagccctgcccccatctccccttgagctgagcagggtggggaacatcttgcacaggctgcagaccaccttccaagaagccctcgacctttaccgtgtgttggtctccagtggccaggtggacaccgggcagcagcaggcacggactgagctggtctccaccttcctgtggatccacagccagctggaggctgaatgcctggtggggactagtgtggccccagcccaggctctgcccagcccaggacccccgtccccaccgacgctgtaccccctggccagcccagacctgcaggccctgctggaacactactcggagctgctggtgcaggccgtgcggaggaaggcacgggggcactgagggcgcagcccctccaccgcagccctgctgcttctgaggacttaggtattttaagcgaataaactgacagctttgaggaatg

SEQ ID NO: 34384 - DNA, 1299 bp, Homo sapiens
  source 1..1299: mol_type = unassigned DNA
ggaggctatgcgcggaacgatgcaggggagaagctgccctctgtcatggcgggagttccggcgcggaggggccagtcctccccgccccccgccccaccaatctgcctacggcggcggacgcgactctcgacggcctccgaggagacggtgcagaaccgggtgtcactcgagaaggtgcttggcatcacagcccagaacagcagtggcctaacctgtgaccccggcacaggccatgtggcctacctggcaggaatgtggagaatggggcctgcctctgagagctgtggagaggattccatagccccctctctgtctagaacagttcctggcatgtactgtgtggtggtgattttggaccccaaggagaacaagcagcagcacatctttaacaccgccaggaagtctctcagtgctctggccttctcccctgatgggaagtacatagtgacaggggagaatgggcataggcctgctgtgcgcatctgggatgtggaggagaagaatcaggtggcggagatgctaggccacaagtatggtgtggcgtgtgtggccttctcacccaatatgaagcacatcgtgtccatgggctaccaacatgacatggtgctcaacgtctgggactggaagaaagacatcgtagtggcctccaacaaggtatcttgtagagtcattgccctctccttctcagaggacagcagctattttgtcactgttgggaaccgccatgtgaggttctggttcttggaagtctccactgagacaaaggtgacgagcacagtgccccttgtagggcgctcgggcatcctgggcgagctgcacaacaacatcttctgtggtgtggcctgcggtcggggccggatggcgggcagtaccttctgtgtgtcctactcgggcctcctctgccagttcaatgagaagagggtgctggagaagtggatcaacctgaaggtctccctgtcttcctgcctctgtgtcagccaggagctcatcttctgtggctgcacagatgggatagtccgcatcttccaggcccatagcctgcactacctcgccaacctgcccaagccacactaccttggggtagacgtggcacagggcctggagcccagcttcctcttccacaggaaggcggaagcagtctacccagatacagtggcactgaccttcgaccccatccaccagtggctgtcctgcgtgtataaggaccacagcatctacatctgggatgtcaaggacatcaacagagtgggcaaggtgtggtcagagctcttccacagctcctacgtttggaacgtggag

SEQ ID NO: 34385 - DNA, 3037 bp, Homo sapiens
  source 1..3037: mol_type = unassigned DNA
acttccggtttgtcgttgctataggaaccgctacggcgtttgaaagtgtccgggttgcttaggatccctacaggtagcgcctctggatacatgcgtggtctgctgacccagagagaaacgaaagcagaactgtttggcgggagatcatgtcagccgtggtagctcagacgctgcatgtttttggtcttcgatcccacgtggccaacaatatcttctacttcgatgaacagatcattatatttccttcaggaaatcactgtgtgaagtacaatgtggatcagaaatggcaaaaattcattccaggctcagagaagagtcagggcatgttggccttgtccatcagtcccaatcggcggtacctcgctatctctgagactgtgcaagaaaaacctgccatcaccatttatgaattgtcatccatcccttgccggaagcgcaaagttcttaataattttgacttccaagttcagaaatttattagcatggctttttctccagactccaaatacctattggctcagacgtcacctccagagtcaaatcttgtctactggctgtgggaaaaacagaaagtaatggccattgttagaatcgacactcagaacaaccctgtctaccaggtgagcttcagtccacaggataacactcaggtgtgtgtcactggaaatgggatgtttaagcttctccgttttgctgagggaaccctgaagcaaaccagctttcagaggggagaaccccaaaactatctagctcacacctgggtggctgatgacaagattgtcgttggcactgacacaggcaaactcttcctctttgaatctggagatcagcgttgggagaccagcataatggtcaaggaacctaccaatggctcaaagagcctggatgtcattcaggaatcagagagcctgattgaatttccaccagtcagttctccactcccttcctatgaacagatggtggcggccagtagccatagccagatgtccatgccccaggtgtttgccattgcagcctattcaaagggatttgcctgttctgctgggccagggagagttctgctgtttgagaagatggaagaaaaggatttttaccgtgagagcagagaaatcaggattcctgtggacccgcagagcaatgatccaagtcagtctgacaaacaggacgttctctgcctgtgcttcagcccctcagaggaaactctggttgccagcaccagtaagaaccaactctacagcatcaccatgtccctgacagagatcagcaagggggagcctgctcactttgagtatttgatgtatccattgcactcagcacccatcaccggtctagctacctgcatccgcaaaccccttatagccacctgttctctggatcgatccatccgcctttggaattatgaaacaaacaccctggaactatttaaggaataccaagaagaggcatattccatcagccttcatccatctggacacttcattgtagtagggtttgctgacaaactacgcctcatgaatctactcattgatgatatacgttctttcaaagaatactctgttagaggatgcggagagtgttcctttagcaatggaggtcacctgtttgctgcagtcaatggaaatgtgattcacgtttacaccaccacgagcctagagaacatctcaagcctgaaaggacacacagggaagattcgctcaattgtgtggaatgcagatgatagcaaactgatttctggtggcacagatggtgctgtgtatgaatggaatctgtccacaggaaagagagagacagaatgcgtgctcaagtcttgcagctacaactgtgttactgtctcccccgatgccaaaattatctttgctgttggatcagaccacaccctcaaggagattgcagattccttgatccttcgagagatatcggcgtttgatgtcacctacaccgccattgtcatctcgcattctggacgcatgatgtttgtgggcacctcggtgggaaccattcgtgccatgaagtaccctctgcctctgcagaaggaattcaatgagtaccaggcccatgccggtcctatcaccaaggtgagcagggccctctccccaggaacccagtcccacacctgcctgctacgtgccttgttcatcccttcaacctcccaatgtcttttctctctccttcttctctcttatttattcatccatcattcattgaatcaccatctattgactatgaatatactctttgtttaaactacttccaggaatttagcctaggaaatcatcagagatacacctaaaaatgtatgtacaacgttttcaccataatattatgcataataaggggccgtttggtggatgccgtagctgccgtgagtgtgggctgcacttgaccacagctgcctcctcctccagagaatgccccagactgaaaggagccatagccctgaagattggcccctacctctccctgagggtacaaaaggccaccccaggggcaataccatgagtacacatttgtaaattgtccttccattcacccttctcataaagtagtatctatgttcaacagtcaaaatgtggaagcaaccaagcatccatcgacagacgaatgcataagcaaaagatggtatatctatacaatggaacaataccctgcctaaaaaggaagggaattctgcaatgtgctaccacatggatgaaccttgaggatgttatgctaaattaaataaggccaaccacaaaaagataagtacagtgtgattccacttttaggagatacttggagcagtcagaatcacaaagacagagtggtggttggcaggggctgcaggaagggggaatgaggaatgattgtttcataggtatagagttttggttttacaagacaaaaggattatgggggtagttggtggcaatggctgcacaacattacaaatgtatttaataacatgaactgtacacttgaaaatggttaagatagcaaattttacagaatatgtattttacgacaattttaaaaatgaaataaaaaagaattatcttgc

SEQ ID NO: 34386 - DNA, 576 bp, Homo sapiens
  source 1..576: mol_type = unassigned DNA
gttgctataggaaccgctacggcgtttgaaagtgtccgggttgcttaggatccctacagaactgtttggcgggagatcatgtcagccgtggtagctcagacgctgcatgtttttggtcttcgatcccacgtggccaacaatatcttctacttcgatgaacagatcattatatttccttcaggaaatcactgtgtgaagtacaatgtggatcagaaatggcaaaaattcattccaggctcagagaagagtcagggcatgttggccttgtccatcagtcccaatcggcggtacctcgctatctctgagactgtgcaagaaaaacctgccatcaccatttatgaattgtcatccatcccttgccggaagcgcaaagttcttaataattttgacttccaagttcagaaatttattagcatggctttttctccagactccaaatacctattggctcagacgtcacctccagagtcaaatcttgtctactggctgtgggaaaaacagaaagtaatggccattgttagaatcgacactcagaacaaccctgtctaccaggtgagcttcagtccacaggataac

SEQ ID NO: 34387 - DNA, 9074 bp, Homo sapiens
  source 1..9074: mol_type = unassigned DNA
ggcggcaccggcaccttgcagtatcactggggagacggcggctgtatagcgcttgccgccccacggattatcccagcaggatctacgcaccccgcatcctccgtagttccgccctatccttgtcctccttggctggggcgcccaccggcggtctgataggctacatcgcggcatgagatgaagctgtgacaggtttgaaaacacaaacacaatggcaggaaacagccttgttctacccattgttctttggggtcgaaaagcgcccacacattgcatctcagccgtacttttaacagatgatggggccacgatcgtaacaggatgtcacgacggacaaatatgtctctgggatctttcagtagaactgcaaattaatcctcgagcactgttgtttggtcatacagcatcaatcacttgtttgtctaaagcttgtgcttccagtgacaaacagtatattgtgagtgcatctgaaagtggagagatgtgcctctgggatgtgagtgatggcagatgtattgaatttacaaaattagcttgcacacatactggcatacagttctaccagttctctgttgggaatcagcgagaaggaaggcttttatgccacggacattaccctgaaatccttgttgtggatgctaccagccttgaagtattatactccttagtatcaaagatatcaccagactggattagctccatgagtattattcgatcccaccgaacacaagaggacacagtggtagcactctcggtgactggcatcctgaaggtctggattgttacctcggaaataagtgacatgcaggatactgagccaatatttgaggaggaatccaaaccaatttattgtcagaattgccaaagcatctctttttgtgcatttacacaaaggtcacttttggttgtgtgttccaaatattggagggtgttcgatgccggagactattccttgttgtgttcaggtcctagtgaaaatggacagacatggaccgggggggactttgtctcatcagataaagtcatcatttggacagaaaatgggcaaagttatatttacaaactacctgccagttgccttccagctagtgattcattccgcagtgatgtggggaaggcagttgaaaatttaattcctcctgtacaacatatcctcttggatcgaaaagataaagagttgctaatttgtcctcctgttactcggttcttctatggatgcagagaatatttccataaactgttaattcagggtgattcttctggaaggttgaatatttggaacatatcagacacagctgataaacagggaagtgaagaagggctggcaatgacaacttctattagtttgcaagaggcatttgataaactgaatccttgtcctgctggaattatagatcagctgagtgtgattcccaatagtaatgaacctcttaaagtaactgcaagtgtgtacataccagcacatggacgacttgtttgtggtcgtgaagatggaagcatagttattgtacctgccacacagacggccatagtacagctgttgcaaggggaacacatgctcagaagaggttggccacctcacagaacactccgtggtcatcggaacaaagtcacatgtttgctatatcctcatcaggtctcagctcggtatgatcaaagatacctgatatctggaggtgtggatttttcagtcataatttgggacatattttctggagaaatgaaacatatcttctgtgttcatggtggtgagattactcaacttctagttccacctgaaaactgtagtgcaagagtacagcactgcatctgctctgtagccagtgaccactcagtaggacttctaagtttgcgagagaaaaaatgcataatgttggcatctcgtcacctttttcctattcaagtaatcaaatggaggccttctgatgattacctggtggtggggtgttcagatggttctgtgtacgtctggcaaatggatactggtgcattggatcgttgtgtgatggggataacagcagttgagattctaaacgcttgtgatgaagctgttcctgctgctgttgattcacttagtcatccagcagtcaacctaaaacaagctatgacgagacgtagtcttgctgctcttaaaaatatggcccatcataagctacaaacccttgcaactaacctcttggcttctgaggcatctgacaagggaaatttacctaaatattctcataactccctgatggttcaagcaataaagacaaacctaacagacccggacatacatgtgctattctttgatgtggaagcgttgattattcaactcctgactgaagaagcctctaggccgaatactgctcttatttccccagagaatttgcaaaaagcatctggcagttcagacaaagggggctcttttttaactggaaaacgagcagcagttctcttccaacaagtgaaagaaacgatcaaagagaacatcaaggaacacctccttgatgatgaagaggaggatgaggagataatgaggcagagaagggaagaaagtgatcctgaatatcggtccagcaaatcaaagccattgaccctattagaatataatttaactatggacactgcaaagctgtttatgtcctgccttcacgcctggggtttgaatgaagtactggatgaagtttgcctggatcgccttggaatgctgaaaccccactgcaccgtatcgtttggcctcttgtcaagaggaggccatatgtcactgatgctgccgggttataatcagcctgcttgtaaactgtcacatgggaaaacagaagtaggaaggaagctgccagcgtctgagggagtaggaaagggaacttacggagtgtcccgtgccgtcaccacacagcatctcctgtctatcatttctttggcaaatactttaatgagtatgaccaatgcaacttttattggtgatcatatgaagaagggtcctaccaggccacctagaccaagcaccccagacctttctaaggcaaggggttcccctccaacttccagtaatattgtgcaaggacagattaaacaagttgctgcacctgtcgtttccgctcggtctgatgctgatcactctggctctgaccctccttctgctcctgctttacatacctgtttcttagtaaatgaaggttggagtcagttagctgctatgcactgtgttatgctgccagacctactgggattggataaatttaggcctccccttctggagatgctggcccgaagatggcaagatcgatgcttggaggtgagagaagccgcgcaggccctgcttctggcggaactgagaagaattgagcaggcaggcaggaaggaagccattgatgcctgggctccttacttacctcagtacatagaccacgtcatatcacctggagtcacatcagaagccgcgcagactatcaccacggctcctgatgcctcagggcctgaagcaaaagtccaggaggaagagcatgaccttgttgacgatgacatcaccactggttgcttatcaagtgtcccacaaatgaaaaaaatttctacatcttacgaggaaagacggaagcaagctaccgctattgttttacttggagtaataggagctgaatttggtgctgaaattgaacctcctaaactattgaccagacctcgaagctctagccaaattcctgagggattcgggttgactagtggtggatccaactactcgctggccagacatacttgcaaggcactgacgtttcttctgctacagcctccaagccccaaacttcctccacacagcactatccgaagaacagccattgatctgattggacgtgggttcactgtttgggagccttacatggatgtgtccgctgttctgatggggcttctcgaactttgtgccgatgccgagaaacaacttgccaacatcacaatggggttgcctctgagcccagcagctgactcggcccgctctgcgaggcatgccctctcgctcattgccaccgccagaccacccgccttcatcaccaccatagccaaagaggtacacagacatacggctcttgcagcaaatacccaatcacagcagaatatgcacacaacaactcttgcacgagctaaaggggaaattttgagagtcattgaaattcttattgaaaagatgcccacagatgttgtggatcttctcgtggaggttatggacatcattatgtactgccttgaaggatctttagttaaaaagaaaggtcttcaagaatgtttcccagccatctgcaggttctacatggtcagctattatgagcggaatcacagaatagcagttggagctcgccatggttcagtggccctgtacgacatccggactggaaaatgtcagacaatccatggacacaagggaccaatcactgcagtggcttttgctcctgatggaagatatcttgccacctactcaaacactgacagccacatttctttttggcagatgaacacgtcactgctgggaagcatcggcatgctgaactcggcacctcagctgcgctgcattaaaacctaccaggtgccccctgtgcagcccgcgtcccccggctcccacaatgccctcaagctggcccggctcatctggacttccaaccgcaacgtcatcctcatggcccatgacgggaaggagcaccgcttcatggtctaatgctgctgcctgccgccgtgactgcgttttagttctctaaattatccaagccgatgttgctctgtccttcctcacaccagattgttcccaggggcctgcccaccccagtgccatccagtggcacggccgggtcttgtcacttgtgcatgcttctcaggggcagaacccgctcgtgccatctgtcgattcagaggcacgcacacatgctctgcaggatgtggccatcctgtcaccaggtagtttttccctgccagagatggcaggggaaagccagtggttcctgggaacgctcttgttgcttggtgcaacagaagcacaaaaatcaataaacactgtgattgcactcccagcccagatcagcatttttagccatctcaaccgcacctctgaagtgctgcttgaatctggccgttctgacactgggtgttgaggtcatgtggcagtcctcacgattgaaattattgccctttgaattacctaaaatattgtttaccaaaaagattctgtgtttacatgttcttttcttctggtgattgctaggaaattactcaatccaatttcctagggtttagctaccaccttctttatcaacagctaaccaatttgagattcatgattaattatgtacacaaaaatattttccttgtagaaaatagttttccagacacttagccttctgaagtgctcatctcttgcttaaatgatagtctatttagtagtttaaaataaaaataatcactccctatgatctagttaatgtaattatccagtcactgtaactaatctcttgaagggacttttgtgataaagagccaagttcagaagcatagcgtgtaccgaaaatgaagactctcctatctactgctacagatcctgttgaagaaagagcttacccctttcccccggaaaacttgcaatcctgtagttcccatatgtgtggcatatgtcagttatgaaattattataattcagccttcaaactactactgatcaactaaaggaaagctaataaggtatttcttttaaacaagtattctggaaaagtaataactatggcacaaatgttcaggagtgtatataaaaatatgtgggctctcgatttatttgagcaaacattgcaatgagggtgttcattatgcttctaagtaagctttaactagaccactttcttcttatgtcagattgtgctggttctagctcataataatgaaaaaaatagaattatattttgtatgaattgtttctaacaaaccttgatctgtatatacttgtgaggggttgtttggttgcctaattgttgattggttggttagttgggcaaaatcatttattacatgcaaaaatagaaaattatttgttaaattcagagaaaatatgtgaagtttacaaaggaaccaaaatgataatgggagaatttagtcttaaaagtttaggttgtcagagtttatctgatatacaaaaaagtaggatcaaagtctaggaacaaacattggttatttcactgaaacagatttttaaagagcatattaagaaattaagaccattagatcatctctttcataatgatatgatgttatttccattgacggcaaatctatactgttccttggttttagagttgggtattctttcaaaagtgaatttaggcacatgcatgtacattgtatttataaagattatatatgtagtttccaaggaagaaacaaagacctatacagtttagactttatttgtttggtgaacgtgctgttgtgtttggcatagctagagaaatgtaaggtaaaaggctcactttgttttccagtgggtccagagtcttctctatacccaacatatgtttactttatgaacttaaatggaaattaatttattgtagactacatctctatttggaatgatgaggtaaatgtataccttagcattttctttaacaaaaatgttctgtgtgtcaggaaagaggtgtgagagtggtaggcagcctgccgcaaacacacggatggctccccccgccacgaaggttgagaacaaagccagggggcccagaggagcaatagccctgggccacaagcgtgggtaggcctttcacgtattccgtctgcacaggcaaccaaggccagtagaaagctatggctgcaaaaccctggggtggacgatgtttgatgattagacggtcatctctaactactaaactaatatctgcattcttgttaacataaatctctccttggctattttaatagccacagtcccaaacttcatcccagcttagatttctcagcactgaggtaaactctgcattgtcatcccagcgtacacctttaatgttttattgatttcactggcactgtatttggacctgtccttgtatatgtagagacatatgtggcttcattggtaatttacaagcaaaagatgacatgacgtgacacctgtatgaaaatgtgatgattgaactccctgtgtacagcgagtgaattaaaatgtctgcctctccagacatttcttaatgattccacttaatagactctatgtgtgctgaatgttcctgtgtacatatgtgtgttaaataaaacaattgtattgaagactgtttttctcacaatattaccttttccagtgttcactcatcttaaacatcctcagttgaaatccgtatgctccgctagccctgctgcttctaatcattcatttccctggagagctggcttgggaaaggcaacttattcccagaggacagtagagcagaagtgcagaggtaagctctccctccagaaactcactggcactctctgtggtttgggaaaggcgttgcatgcctgttgctttatctctactctacatgctcccaaatagactggtaatggcaccaaatcatatcttgtcagattggatggcatgggttggctgcctctcgggagctaggctgagatcatcaagttcattgcatttcacgctcagtttggagtcgaatttgaatccctcaggtaaagggtataattggttttcagaaaaatcaagaataataaaataggtccttactgctcatagagggttatgtgtaagtagtgaatgtacttcttgtctcttaattatttcagataagaacacaaaagcttgatttgagtcaatcatcgtgtaacagtataattttctgtaagaattcggtgaacattccaggagtggtctgaggcatcttgggccctattaaatgcccactgtgggccccaggaaatgttttaacatctcatgacttaaatgtattcttatagggaaaataggggcagtaacagttctatatgatcagcgatcacataaactgatcaaatgtggaaaggcgtgacgttaataggaaggtaaagccaagcagtgctgggtgaactttcacctttcaccccttcggctgactgacagagcccagtgttgaagaaaatcaatactttggagccaggagggaaatacttccaccctctaactagagaatgtgttttgacaaggccaagataatccaagctgcacaggagaaagagaaaagaagactcatttttaaagcctgacacttcaaggtgtttttgtgcaatggtttagagatcgtcaatacatacaaataccaaaggtcaaaaagaaaagccagaagaatttcaaaaattagatgttcagttctttttgctgtttaaaaaaaaaaaaaaaaggactacagagagttttgtgcttgtaattgtccttttaatgaactaagctcacaattgtgtgaccattgaggtgatcatccctctttaatcaaaacttacatttttgtagcagcagaacgatgaatattgaatgctcaaaaagcattcagacttcctgcttctgtacaccttttggctacagattgttttgttttgttttgttttgtttttttgagtggttacattgttttgtgctaacatctcagaatttggttttgcaattcatgttgattctgccataatggcattgtaaatcctggatcctccttcacattcagttcaatcctttgcatgagaaaagagttcttgtacctagaacttaattttttttctagtttcccaagtccctttaagcaaattacttatgaagatattctaattaatgtctctctgagtgagaggtttatgcacctctaggaagatggtaaacaattcattcttaccagcaagattagagccattcattctgtagacaaatacctccatcaagtggatatagattctttgctttcctactgataagaaaactaagaagccagtggtgcccatacctgccagacaagctcagaaggacaaaggagtcttaagtatctaaagtacatcatcaggcctgctgtaaacatgtgctaattaaagagtattaaaaatatagtgaaaatata

SEQ ID NO: 34388 - DNA, 7183 bp, Homo sapiens
  source 1..7183: mol_type = unassigned DNA
ggcggcaccggcaccttgcagtatcactggggagacggcggctgtatagcgcttgccgccccacggattatcccagcaggatctacgcaccccgcatcctccgtagttccgccctatccttgtcctccttggctggggcgcccaccggcggtctgataggctacatcgcggcatgagatgaagctgtgacaggtttgaaaacacaaacacaatggcaggaaacagccttgttctacccattgttctttggggtcgaaaagcgcccacacattgcatctcagccgtacttttaacagatgatggggccacgatcgtaacaggatgtcacgacggacaaatatgtctctgggatctttcagtagaactgcaaattaatcctcgagcactgttgtttggtcatacagcatcaatcacttgtttgtctaaagcttgtgcttccagtgacaaacagtatattgtgagtgcatctgaaagtggagagatgtgcctctgggatgtgagtgatggcagatgtattgaatttacaaaattagcttgcacacatactggcatacagttctaccagttctctgttgggaatcagcgagaaggaaggcttttatgccacggacattaccctgaaatccttgttgtggatgctaccagccttgaagtattatactccttagtatcaaagatatcaccagactggattagctccatgagtattattcgatcccaccgaacacaagaggacacagtggtagcactctcggtgactggcatcctgaaggtctggattgttacctcggaaataagtgacatgcaggatactgagccaatatttgaggaggaatccaaaccaatttattgtcagaattgccaaagcatctctttttgtgcatttacacaaaggtcacttttggttgtgtgttccaaatattggagggtgttcgatgccggagactattccttgttgtgttcaggtcctagtgaaaatggacagacatggaccgggggggactttgtctcatcagataaagtcatcatttggacagaaaatgggcaaagttatatttacaaactacctgccagttgccttccagctagtgattcattccgcagtgatgtggggaaggcagttgaaaatttaattcctcctgtacaacatatcctcttggatcgaaaagataaagagttgctaatttgtcctcctgttactcggttcttctatggatgcagagaatatttccataaactgttaattcagggtgattcttctggaaggttgaatatttggaacatatcagacacagctgataaacagggaagtgaagaagggctggcaatgacaacttctattagtttgcaagaggcatttgataaactgaatccttgtcctgctggaattatagatcagctgagtgtgattcccaatagtaatgaacctcttaaagtaactgcaagtgtgtacataccagcacatggacgacttgtttgtggtcgtgaagatggaagcatagttattgtacctgccacacagacggccatagtacagctgttgcaaggggaacacatgctcagaagaggttggccacctcacagaacactccgtggtcatcggaacaaagtcacatgtttgctatatcctcatcaggtctcagctcggtatgatcaaagatacctgatatctggaggtgtggatttttcagtcataatttgggacatattttctggagaaatgaaacatatcttctgtgttcatggtggtgagattactcaacttctagttccacctgaaaactgtagtgcaagagtacagcactgcatctgctctgtagccagtgaccactcagtaggacttctaagtttgcgagagaaaaaatgcataatgttggcatctcgtcacctttttcctattcaagtaatcaaatggaggccttctgatgattacctggtggtggggtgttcagatggttctgtgtacgtctggcaaatggatactggtgcattggatcgttgtgtgatggggataacagcagttgagattctaaacgcttgtgatgaagctgttcctgctgctgttgattcacttagtcatccagcagtcaacctaaaacaagctatgacgagacgtagtcttgctgctcttaaaaatatggcccatcataagctacaaacccttgcaactaacctcttggcttctgaggcatctgacaagggaaatttacctaaatattctcataactccctgatggttcaagcaataaagacaaacctaacagacccggacatacatgtgctattctttgatgtggaagcgttgattattcaactcctgactgaagaagcctctaggccgaatactgctcttatttccccagagaatttgcaaaaagcatctggcagttcagacaaagggggctcttttttaactggaaaacgagcagcagttctcttccaacaagtgaaagaaacgatcaaagagaacatcaaggaacacctccttgatgatgaagaggaggatgaggagataatgaggcagagaagggaagaaagtgatcctgaatatcggtccagcaaatcaaagccattgaccctattagaatataatttaactatggacactgcaaagctgtttatgtcctgccttcacgcctggggtttgaatgaagtactggatgaagtttgcctggatcgccttggaatgctgaaaccccactgcaccgtatcgtttggcctcttgtcaagaggaggccatatgtcactgatgctgccgggttataatcagcctgcttgtaaactgtcacatgggaaaacagaagtaggaaggaagctgccagcgtctgagggagtaggaaagggaacttacggagtgtcccgtgccgtcaccacacagcatctcctgtctatcatttctttggcaaatactttaatgagtatgaccaatgcaacttttattggtgatcatatgaagaagggtcctaccaggccacctagaccaagcaccccagacctttctaaggcaaggggttcccctccaacttccagtaatattgtgcaaggacagattaaacaaggttggagtcagttagctgctatgcactgtgttatgctgccagacctactgggattggataaatttaggcctccccttctggagatgctggcccgaagatggcaagatcgatgcttggaggtgagagaagccgcgcaggccctgcttctggcggaactgagaagaattgagcaggcaggcaggaaggaagccattgatgcctgggctccttacttacctcagtacatagaccacgtcatatcacctggagtcacatcagaagccgcgcagactatcaccacggctcctgatgcctcagggcctgaagcaaaagtccaggaggaagagcatgaccttgttgacgatgacatcaccactggttgcttatcaagtgtcccacaaatgaaaaaaatttctacatcttacgaggaaagacggaagcaagctaccgctattgttttacttggagtaataggagctgaatttggtgctgaaattgaacctcctaaactattgaccagacctcgaagctctagccaaattcctgagggattcgggttgactagtggtggatccaactactcgctggccagacatacttgcaaggcactgacgtttcttctgctacagcctccaagccccaaacttcctccacacagcactatccgaagaacagccattgatctgattggacgtgggttcactgtttgggagccttacatggatgtgtccgctgttctgatggggcttctcgaactttgtgccgatgccgagaaacaacttgccaacatcacaatggggttgcctctgagcccagcagctgactcggcccgctctgcgaggcatgccctctcgctcattgccaccgccagaccacccgccttcatcaccaccatagccaaagaggtacacagacatacggctcttgcagcaaatacccaatcacagcagaatatgcacacaacaactcttgcacgagctaaaggggaaattttgagagtcattgaaattcttattgaaaagatgcccacagatgttgtggatcttctcgtggaggttatggacatcattatgtactgccttgaaggatctttagttaaaaagaaaggtcttcaagaatgtttcccagccatctgcaggttctacatggtcagctattatgagcggaatcacagaatagcagttggagctcgccatggttcagtggccctgtacgacatccggactggaaaatgtcagacaatccatggacacaagggaccaatcactgcagtggcttttgctcctgatggaagatatcttgccacctactcaaacactgacagccacatttctttttggcagatgaacacgtcactgctgggaagcatcggcatgctgaactcggcacctcagctgcgctgcattaaaacctaccaggtgccccctgtgcagcccgcgtcccccggctcccacaatgccctcaagctggcccggctcatctggacttccaaccgcaacgtcatcctcatggcccatgacgggaaggagcaccgcttcatggtctaatgctgctgcctgccgccgtgactgcgttttagttctctaaattatccaagccgatgttgctctgtccttcctcacaccagattgttcccaggggcctgcccaccccagtgccatccagtggcacggccgggtcttgtcacttgtgcatgcttctcaggggcagaacccgctcgtgccatctgtcgattcagaggcacgcacacatgctctgcaggatgtggccatcctgtcaccaggtagtttttccctgccagagatggcaggggaaagccagtggttcctgggaacgctcttgttgcttggtgcaacagaagcacaaaaatcaataaacactgtgattgcactcccagcccagatcagcatttttagccatctcaaccgcacctctgaagtgctgcttgaatctggccgttctgacactgggtgttgaggtcatgtggcagtcctcacgattgaaattattgccctttgaattacctaaaatattgtttaccaaaaagattctgtgtttacatgttcttttcttctggtgattgctaggaaattactcaatccaatttcctagggtttagctaccaccttctttatcaacagctaaccaatttgagattcatgattaattatgtacacaaaaatattttccttgtagaaaatagttttccagacacttagccttctgaagtgctcatctcttgcttaaatgatagtctatttagtagtttaaaataaaaataatcactccctatgatctagttaatgtaattatccagtcactgtaactaatctcttgaagggacttttgtgataaagagccaagttcagaagcatagcgtgtaccgaaaatgaagactctcctatctactgctacagatcctgttgaagaaagagcttacccctttcccccggaaaacttgcaatcctgtagttcccatatgtgtggcatatgtcagttatgaaattattataattcagccttcaaactactactgatcaactaaaggaaagctaataaggtatttcttttaaacaagtattctggaaaagtaataactatggcacaaatgttcaggagtgtatataaaaatatgtgggctctcgatttatttgagcaaacattgcaatgagggtgttcattatgcttctaagtaagctttaactagaccactttcttcttatgtcagattgtgctggttctagctcataataatgaaaaaaatagaattatattttgtatgaattgtttctaacaaaccttgatctgtatatacttgtgaggggttgtttggttgcctaattgttgattggttggttagttgggcaaaatcatttattacatgcaaaaatagaaaattatttgttaaattcagagaaaatatgtgaagtttacaaaggaaccaaaatgataatgggagaatttagtcttaaaagtttaggttgtcagagtttatctgatatacaaaaaagtaggatcaaagtctaggaacaaacattggttatttcactgaaacagatttttaaagagcatattaagaaattaagaccattagatcatctctttcataatgatatgatgttatttccattgacggcaaatctatactgttccttggttttagagttgggtattctttcaaaagtgaatttaggcacatgcatgtacattgtatttataaagattatatatgtagtttccaaggaagaaacaaagacctatacagtttagactttatttgtttggtgaacgtgctgttgtgtttggcatagctagagaaatgtaaggtaaaaggctcactttgttttccagtgggtccagagtcttctctatacccaacatatgtttactttatgaacttaaatggaaattaatttattgtagactacatctctatttggaatgatgaggtaaatgtataccttagcattttctttaacaaaaatgttctgtgtgtcaggaaagaggtgtgagagtggtaggcagcctgccgcaaacacacggatggctccccccgccacgaaggttgagaacaaagccagggggcccagaggagcaatagccctgggccacaagcgtgggtaggcctttcacgtattccgtctgcacaggcaaccaaggccagtagaaagctatggctgcaaaaccctggggtggacgatgtttgatgattagacggtcatctctaactactaaactaatatctgcattcttgttaacataaatctctccttggctattttaatagccacagtcccaaacttcatcccagcttagatttctcagcactgaggtaaactctgcattgtcatcccagcgtacacctttaatgttttattgatttcactggcactgtatttggacctgtccttgtatatgtagagacatatgtggcttcattggtaatttacaagcaaaagatgacatgacgtgacacctgtatgaaaatgtgatgattgaactccctgtgtacagcgagtgaattaaaatgtctgcctctccagacatttcttaatgattccacttaatagactctatgtgtgctgaatgttcctgtgtacatatgtgtgttaaataaaacaattgtattgaagactgtttttctc

SEQ ID NO: 34389 - DNA, 6978 bp, Homo sapiens
  source 1..6978: mol_type = unassigned DNA
atggcaggaaacagccttgttctacccattgttctttggggtcgaaaagcgcccacacattgcatctcagccgtacttttaacagatgatggggccacgatcgtaacaggatgtcacgacggacaaatatgtctctgggatctttcagtagaactgcaaattaatcctcgagcactgttgtttggtcatacagcatcaatcacttgtttgtctaaagcttgtgcttccagtgacaaacagtatattgtgagtgcatctgaaagtggagagatgtgcctctgggatgtgagtgatggcagatgtattgaatttacaaaattagcttgcacacatactggcatacagttctaccagttctctgttgggaatcagcgagaaggaaggcttttatgccacggacattaccctgaaatccttgttgtggatgctaccagccttgaagtattatactccttagtatcaaagatatcaccagactggattagctccatgagtattattcgatcccaccgaacacaagaggacacagtggtagcactctcggtgactggcatcctgaaggtctggattgttacctcggaaataagtgacatgcaggatactgagccaatatttgaggaggaatccaaaccaatttattgtcagaattgccaaagcatctctttttgtgcatttacacaaaggtcacttttggttgtgtgttccaaatattggagggtgttcgatgccggagactattccttgttgtgttcaggtcctagtgaaaatggacagacatggaccgggggggactttgtctcatcagataaagtcatcatttggacagaaaatgggcaaagttatatttacaaactacctgccagttgccttccagctagtgattcattccgcagtgatgtggggaaggcagttgaaaatttaattcctcctgtacaacatatcctcttggatcgaaaagataaagagttgctaatttgtcctcctgttactcggttcttctatggatgcagagaatatttccataaactgttaattcagggtgattcttctggaaggttgaatatttggaacatatcagacacagctgataaacagggaagtgaagaagggctggcaatgacaacttctattagtttgcaagaggcatttgataaactgaatccttgtcctgctggaattatagatcagctgagtgtgattcccaatagtaatgaacctcttaaagtaactgcaagtgtgtacataccagcacatggacgacttgtttgtggtcgtgaagatggaagcatagttattgtacctgccacacagacggccatagtacagctgttgcaaggggaacacatgctcagaagaggttggccacctcacagaacactccgtggtcatcggaacaaagtcacatgtttgctatatcctcatcaggtctcagctcggtatgatcaaagatacctgatatctggaggtgtggatttttcagtcataatttgggacatattttctggagaaatgaaacatatcttctgtgttcatggtggtgagattactcaacttctagttccacctgaaaactgtagtgcaagagtacagcactgcatctgctctgtagccagtgaccactcagtaggacttctaagtttgcgagagaaaaaatgcataatgttggcatctcgtcacctttttcctattcaagtaatcaaatggaggccttctgatgattacctggtggtggggtgttcagatggttctgtgtacgtctggcaaatggatactggtgcattggatcgttgtgtgatggggataacagcagttgagattctaaacgcttgtgatgaagctgttcctgctgctgttgattcacttagtcatccagcagtcaacctaaaacaagctatgacgagacgtagtcttgctgctcttaaaaatatggcccatcataagctacaaacccttgcaactaacctcttggcttctgaggcatctgacaagggaaatttacctaaatattctcataactccctgatggttcaagcaataaagacaaacctaacagacccggacatacatgtgctattctttgatgtggaagcgttgattattcaactcctgactgaagaagcctctaggccgaatactgctcttatttccccagagaatttgcaaaaagcatctggcagttcagacaaagggggctcttttttaactggaaaacgagcagcagttctcttccaacaagtgaaagaaacgatcaaagagaacatcaaggaacacctccttgatgatgaagaggaggatgaggagataatgaggcagagaagggaagaaagtgatcctgaatatcggtccagcaaatcaaagccattgaccctattagaatataatttaactatggacactgcaaagctgtttatgtcctgccttcacgcctggggtttgaatgaagtactggatgaagtttgcctggatcgccttggaatgctgaaaccccactgcaccgtatcgtttggcctcttgtcaagaggaggccatatgtcactgatgctgccgggttataatcagcctgcttgtaaactgtcacatgggaaaacagaagtaggaaggaagctgccagcgtctgagggagtaggaaagggaacttacggagtgtcccgtgccgtcaccacacagcatctcctgtctatcatttctttggcaaatactttaatgagtatgaccaatgcaacttttattggtgatcatatgaagaagggtcctaccaggccacctagaccaagcaccccagacctttctaaggcaaggggttcccctccaacttccagtaatattgtgcaaggacagattaaacaaggttggagtcagttagctgctatgcactgtgttatgctgccagacctactgggattggataaatttaggcctccccttctggagatgctggcccgaagatggcaagatcgatgcttggaggtgagagaagccgcgcaggccctgcttctggcggaactgagaagaattgagcaggcaggcaggaaggaagccattgatgcctgggctccttacttacctcagtacatagaccacgtcatatcacctggagtcacatcagaagccgcgcagactatcaccacggctcctgatgcctcagggcctgaagcaaaagtccaggaggaagagcatgaccttgttgacgatgacatcaccactggttgcttatcaagtgtcccacaaatgaaaaaaatttctacatcttacgaggaaagacggaagcaagctaccgctattgttttacttggagtaataggagctgaatttggtgctgaaattgaacctcctaaactattgaccagacctcgaagctctagccaaattcctgagggattcgggttgactagtggtggatccaactactcgctggccagacatacttgcaaggcactgacgtttcttctgctacagcctccaagccccaaacttcctccacacagcactatccgaagaacagccattgatctgattggacgtgggttcactgtttgggagccttacatggatgtgtccgctgttctgatggggcttctcgaactttgtgccgatgccgagaaacaacttgccaacatcacaatggggttgcctctgagcccagcagctgactcggcccgctctgcgaggcatgccctctcgctcattgccaccgccagaccacccgccttcatcaccaccatagccaaagaggtacacagacatacggctcttgcagcaaatacccaatcacagcagaatatgcacacaacaactcttgcacgagctaaaggggaaattttgagagtcattgaaattcttattgaaaagatgcccacagatgttgtggatcttctcgtggaggttatggacatcattatgtactgccttgaaggatctttagttaaaaagaaaggtcttcaagaatgtttcccagccatctgcaggttctacatggtcagctattatgagcggaatcacagaatagcagttggagctcgccatggttcagtggccctgtacgacatccggactggaaaatgtcagacaatccatggacacaagggaccaatcactgcagtggcttttgctcctgatggaagatatcttgccacctactcaaacactgacagccacatttctttttggcagatgaacacgtcactgctgggaagcatcggcatgctgaactcggcacctcagctgcgctgcattaaaacctaccaggtgccccctgtgcagcccgcgtcccccggctcccacaatgccctcaagctggcccggctcatctggacttccaaccgcaacgtcatcctcatggcccatgacgggaaggagcaccgcttcatggtctaatgctgctgcctgccgccgtgactgcgttttagttctctaaattatccaagccgatgttgctctgtccttcctcacaccagattgttcccaggggcctgcccaccccagtgccatccagtggcacggccgggtcttgtcacttgtgcatgcttctcaggggcagaacccgctcgtgccatctgtcgattcagaggcacgcacacatgctctgcaggatgtggccatcctgtcaccaggtagtttttccctgccagagatggcaggggaaagccagtggttcctgggaacgctcttgttgcttggtgcaacagaagcacaaaaatcaataaacactgtgattgcactcccagcccagatcagcatttttagccatctcaaccgcacctctgaagtgctgcttgaatctggccgttctgacactgggtgttgaggtcatgtggcagtcctcacgattgaaattattgccctttgaattacctaaaatattgtttaccaaaaagattctgtgtttacatgttcttttcttctggtgattgctaggaaattactcaatccaatttcctagggtttagctaccaccttctttatcaacagctaaccaatttgagattcatgattaattatgtacacaaaaatattttccttgtagaaaatagttttccagacacttagccttctgaagtgctcatctcttgcttaaatgatagtctatttagtagtttaaaataaaaataatcactccctatgatctagttaatgtaattatccagtcactgtaactaatctcttgaagggacttttgtgataaagagccaagttcagaagcatagcgtgtaccgaaaatgaagactctcctatctactgctacagatcctgttgaagaaagagcttacccctttcccccggaaaacttgcaatcctgtagttcccatatgtgtggcatatgtcagttatgaaattattataattcagccttcaaactactactgatcaactaaaggaaagctaataaggtatttcttttaaacaagtattctggaaaagtaataactatggcacaaatgttcaggagtgtatataaaaatatgtgggctctcgatttatttgagcaaacattgcaatgagggtgttcattatgcttctaagtaagctttaactagaccactttcttcttatgtcagattgtgctggttctagctcataataatgaaaaaaatagaattatattttgtatgaattgtttctaacaaaccttgatctgtatatacttgtgaggggttgtttggttgcctaattgttgattggttggttagttgggcaaaatcatttattacatgcaaaaatagaaaattatttgttaaattcagagaaaatatgtgaagtttacaaaggaaccaaaatgataatgggagaatttagtcttaaaagtttaggttgtcagagtttatctgatatacaaaaaagtaggatcaaagtctaggaacaaacattggttatttcactgaaacagatttttaaagagcatattaagaaattaagaccattagatcatctctttcataatgatatgatgttatttccattgacggcaaatctatactgttccttggttttagagttgggtattctttcaaaagtgaatttaggcacatgcatgtacattgtatttataaagattatatatgtagtttccaaggaagaaacaaagacctatacagtttagactttatttgtttggtgaacgtgctgttgtgtttggcatagctagagaaatgtaaggtaaaaggctcactttgttttccagtgggtccagagtcttctctatacccaacatatgtttactttatgaacttaaatggaaattaatttattgtagactacatctctatttggaatgatgaggtaaatgtataccttagcattttctttaacaaaaatgttctgtgtgtcaggaaagaggtgtgagagtggtaggcagcctgccgcaaacacacggatggctccccccgccacgaaggttgagaacaaagccagggggcccagaggagcaatagccctgggccacaagcgtgggtaggcctttcacgtattccgtctgcacaggcaaccaaggccagtagaaagctatggctgcaaaaccctggggtggacgatgtttgatgattagacggtcatctctaactactaaactaatatctgcattcttgttaacataaatctctccttggctattttaatagccacagtcccaaacttcatcccagcttagatttctcagcactgaggtaaactctgcattgtcatcccagcgtacacctttaatgttttattgatttcactggcactgtatttggacctgtccttgtatatgtagagacatatgtggcttcattggtaatttacaagcaaaagatgacatgacgtgacacctgtatgaaaatgtgatgattgaactccctgtgtacagcgagtgaattaaaatgtctgcctctccagacatttcttaatgattccacttaatagactctatgtgtgctgaatgttcctgtgtacatatgtgtgttaaataaaacaattgtattgaagactgtttttctcacaata

SEQ ID NO: 34390 - DNA, 5257 bp, Homo sapiens
  source 1..5257: mol_type = unassigned DNA
ggcggcaccggcaccttgcagtatcactggggagacggcggctgtatagcgcttgccgccccacggattatcccagcaggatctacgcaccccgcatcctccgtagttccgccctatccttgtcctccttggctggggcgcccaccggcggtctgataggctacatcgcggcatgagatgaagctgtgacaggtttgaaaacacaaacacaatggcaggaaacagccttgttctacccattgttctttggggtcgaaaagcgcccacacattgcatctcagccgtacttttaacagatgatggggccacgatcgtaacaggatgtcacgacggacaaatatgtctctgggatctttcagtagaactgcaaattaatcctcgagcactgttgtttggtcatacagcagttctcttccaacaagtgaaagaaacgatcaaagagaacatcaaggaacacctccttgatgatgaagaggaggatgaggagataatgaggcagagaagggaagaaagtgatcctgaatatcggtccagcaaatcaaagccattgaccctattagaatataatttaactatggacactgcaaagctgtttatgtcctgccttcacgcctggggtttgaatgaagtactggatgaagtttgcctggatcgccttggaatgctgaaaccccactgcaccgtatcgtttggcctcttgtcaagaggaggccatatgtcactgatgctgccgggttataatcagcctgcttgtaaactgtcacatgggaaaacagaagtaggaaggaagctgccagcgtctgagggagtaggaaagggaacttacggagtgtcccgtgccgtcaccacacagcatctcctgtctatcatttctttggcaaatactttaatgagtatgaccaatgcaacttttattggtgatcatatgaagaagggtcctaccaggccacctagaccaagcaccccagacctttctaaggcaaggggttcccctccaacttccagtaatattgtgcaaggacagattaaacaagttgctgcacctgtcgtttccgctcggtctgatgctgatcactctggctctgaccctccttctgctcctgctttacatacctgtttcttagtaaatgaaggttggagtcagttagctgctatgcactgtgttatgctgccagacctactgggattggataaatttaggcctccccttctggagatgctggcccgaagatggcaagatcgatgcttggaggtgagagaagccgcgcaggccctgcttctggcggaactgagaagaattgagcaggcaggcaggaaggaagccattgatgcctgggctccttacttacctcagtacatagaccacgtcatatcacctggagtcacatcagaagccgcgcagactatcaccacggctcctgatgcctcagggcctgaagcaaaagtccaggaggaagagcatgaccttgttgacgatgacatcaccactggttgcttatcaagtgtcccacaaatgaaaaaaatttctacatcttacgaggaaagacggaagcaagctaccgctattgttttacttggagtaataggagctgaatttggtgctgaaattgaacctcctaaactattgaccagacctcgaagctctagccaaattcctgagggattcgggttgactagtggtggatccaactactcgctggccagacatacttgcaaggcactgacgtttcttctgctacagcctccaagccccaaacttcctccacacagcactatccgaagaacagccattgatctgattggacgtgggttcactgtttgggagccttacatggatgtgtccgctgttctgatggggcttctcgaactttgtgccgatgccgagaaacaacttgccaacatcacaatggggttgcctctgagcccagcagctgactcggcccgctctgcgaggcatgccctctcgctcattgccaccgccagaccacccgccttcatcaccaccatagccaaagaggtacacagacatacggctcttgcagcaaatacccaatcacagcagaatatgcacacaacaactcttgcacgagctaaaggggaaattttgagagtcattgaaattcttattgaaaagatgcccacagatgttgtggatcttctcgtggaggttatggacatcattatgtactgccttgaaggatctttagttaaaaagaaaggtcttcaagaatgtttcccagccatctgcaggttctacatggtcagctattatgagcggaatcacagaatagcagttggagctcgccatggttcagtggccctgtacgacatccggactggaaaatgtcagacaatccatggacacaagggaccaatcactgcagtggcttttgctcctgatggaagatatcttgccacctactcaaacactgacagccacatttctttttggcagatgaacacgtcactgctgggaagcatcggcatgctgaactcggcacctcagctgcgctgcattaaaacctaccaggtgccccctgtgcagcccgcgtcccccggctcccacaatgccctcaagctggcccggctcatctggacttccaaccgcaacgtcatcctcatggcccatgacgggaaggagcaccgcttcatggtctaatgctgctgcctgccgccgtgactgcgttttagttctctaaattatccaagccgatgttgctctgtccttcctcacaccagattgttcccaggggcctgcccaccccagtgccatccagtggcacggccgggtcttgtcacttgtgcatgcttctcaggggcagaacccgctcgtgccatctgtcgattcagaggcacgcacacatgctctgcaggatgtggccatcctgtcaccaggtagtttttccctgccagagatggcaggggaaagccagtggttcctgggaacgctcttgttgcttggtgcaacagaagcacaaaaatcaataaacactgtgattgcactcccagcccagatcagcatttttagccatctcaaccgcacctctgaagtgctgcttgaatctggccgttctgacactgggtgttgaggtcatgtggcagtcctcacgattgaaattattgccctttgaattacctaaaatattgtttaccaaaaagattctgtgtttacatgttcttttcttctggtgattgctaggaaattactcaatccaatttcctagggtttagctaccaccttctttatcaacagctaaccaatttgagattcatgattaattatgtacacaaaaatattttccttgtagaaaatagttttccagacacttagccttctgaagtgctcatctcttgcttaaatgatagtctatttagtagtttaaaataaaaataatcactccctatgatctagttaatgtaattatccagtcactgtaactaatctcttgaagggacttttgtgataaagagccaagttcagaagcatagcgtgtaccgaaaatgaagactctcctatctactgctacagatcctgttgaagaaagagcttacccctttcccccggaaaacttgcaatcctgtagttcccatatgtgtggcatatgtcagttatgaaattattataattcagccttcaaactactactgatcaactaaaggaaagctaataaggtatttcttttaaacaagtattctggaaaagtaataactatggcacaaatgttcaggagtgtatataaaaatatgtgggctctcgatttatttgagcaaacattgcaatgagggtgttcattatgcttctaagtaagctttaactagaccactttcttcttatgtcagattgtgctggttctagctcataataatgaaaaaaatagaattatattttgtatgaattgtttctaacaaaccttgatctgtatatacttgtgaggggttgtttggttgcctaattgttgattggttggttagttgggcaaaatcatttattacatgcaaaaatagaaaattatttgttaaattcagagaaaatatgtgaagtttacaaaggaaccaaaatgataatgggagaatttagtcttaaaagtttaggttgtcagagtttatctgatatacaaaaaagtaggatcaaagtctaggaacaaacattggttatttcactgaaacagatttttaaagagcatattaagaaattaagaccattagatcatctctttcataatgatatgatgttatttccattgacggcaaatctatactgttccttggttttagagttgggtattctttcaaaagtgaatttaggcacatgcatgtacattgtatttataaagattatatatgtagtttccaaggaagaaacaaagacctatacagtttagactttatttgtttggtgaacgtgctgttgtgtttggcatagctagagaaatgtaaggtaaaaggctcactttgttttccagtgggtccagagtcttctctatacccaacatatgtttactttatgaacttaaatggaaattaatttattgtagactacatctctatttggaatgatgaggtaaatgtataccttagcattttctttaacaaaaatgttctgtgtgtcaggaaagaggtgtgagagtggtaggcagcctgccgcaaacacacggatggctccccccgccacgaaggttgagaacaaagccagggggcccagaggagcaatagccctgggccacaagcgtgggtaggcctttcacgtattccgtctgcacaggcaaccaaggccagtagaaagctatggctgcaaaaccctggggtggacgatgtttgatgattagacggtcatctctaactactaaactaatatctgcattcttgttaacataaatctctccttggctattttaatagccacagtcccaaacttcatcccagcttagatttctcagcactgaggtaaactctgcattgtcatcccagcgtacacctttaatgttttattgatttcactggcactgtatttggacctgtccttgtatatgtagagacatatgtggcttcattggtaatttacaagcaaaagatgacatgacgtgacacctgtatgaaaatgtgatgattgaactccctgtgtacagcgagtgaattaaaatgtctgcctctccagacatttcttaatgattccacttaatagactctatgtgtgctgaatgttcctgtgtacatatgtgtgttaaataaaacaattgtattgaagactgtttttctc

SEQ ID NO: 34391 - DNA, 5887 bp, Homo sapiens
  source 1..5887: mol_type = unassigned DNA
cctctgccgctcctccgccccacggctcaggattcgcccaaaatgaggacttccctgcaggcagtggcactctggggacagaaggcccctccccacagcatcactgccatcatgatcactgatgaccagcgaacgattgtgactggaagtcaagagggtcagctctgtctctggaatctctcacatgaactaaagatttcagcgaaagaactcctatttggtcattcagcttcggtaacatgtttggcaagagcaagggacttctctaaacagccctacattgttagtgctgctgaaaatggggagatgtgtgtttggaatgtcaccaatggacagtgcatggagaaggctacacttccttacaggcacactgcaatctgttattaccactgctcattccggatgacaggagaaggctggcttctttgttgtggagaatatcaagatgtccttataattgatgccaaaactttggctgttgttcacagttttagatcatctcagtttcctgactggatcaactgcatgtgcattgttcactccatgagaattcaagaagattctctcttggtggtatcagtagctggtgagctcaaagtatgggatctttcctcatctatcaacagcattcaggaaaagcaagatgtctatgaaaaagaatccaagtttcttgagtccttgaactgccagacaattcgattttgcacatatactgagagacttctattggtggtattttctaaatgttggaaggtttatgattattgtgatttttcccttctgctgactgaagttagtagaaatgggcagttctttgctggtggagaagtgattgctgctcacagaatcctcatctggacagaagatggtcacagttacatctatcagctgctgaacagtgggctttcaaaaagcatataccctgctgatggaagagtgcttaaagagaccatttatcctcatttactgtgctctacttctgtgcaggaaaataaggaacagagccgtccctttgttatgggctacatgaatgaaaggaaagagcctttttacaaggtacttttctctggagaagtctcaggaagaattactttgtggcacatccctgatgttcctgtatccaagtttgatggttctcctagagagataccagtaactgccacctggactcttcaagataattttgataagcatgatactatgtcacaaagtattattgactatttctctgggcttaaagatggggcaggaactgctgtagtcacttcatcagagtatattccaagtcttgataaactaatatgtggctgtgaagatgggacaattatcattacccaggctttgaatgctgccaaagcaagacttctggaaggtggttctttagtaaaagattctccccctcataaagttcttaaaggccaccaccaaagtgtcacttcattactctatccacatggtctctcttcgaaattagaccaaagttggatgttgtctggggacctggactcatgtgtgatcttgtgggatatctttactgaagaaattttgcataaattctttttggaagctggtccagtaacaagtcttttgatgtcaccagagaagtttaaactaaggggtgagcagataatttgctgtgtgtgcggtgaccattccgtggctctccttcaccttgagggaaagagttgcctcctgcatgcccggaagcacctttttcctgtgaggatgataaaatggcacccggttgagaattttttaattgttggatgtgcagatgactcagtttatatctgggaaattgaaacaggcactttggaaagacatgagacaggagaaagagcacgaattattcttaattgttgtgatgattcacagcttgtgaagtctgtacttcccattgcctcagagacacttaagcacaaaagtatagaacagagatcctccagcccctaccagcttgggccattaccttgccctggtctgcaggtggagtcttcatgtaaggttactgatgccaaattttgcccaagaccttttaatgtcttgcctgtgaagacaaaatggagtaacgttggctttcatattcttctatttgatctggaaaaccttgttgaacttttgctaccaactccactcagtgatgttgactcttccagttcattctatggtggtgaggtcctgagaagagccaagagcacagtggagaagaagacactgacactgagaaaaagtaaaactgcctgtggtcctctttcagcagaggcactagccaagcctattactgaaagcctggcccaaggagataataccatcaaattctcagaagaaaatgatggcattaaaaggcagaagaaaatgaagatctccaaaaaaatgcagcctaagccatcaagaaaagtagatgccagtctcacaatagacacagcaaaattgtttctgtcttgccttttgccatggggagtggataaagatttagattatctttgcattaagcacctcaatattttaaagcttcagggtcctatttctttgggaatttctttgaatgaagataatttctcactgatgttgccaggttgggatttatgcaatagtggaatgataaaagactattcaggagtaaatttattttccaggaaagttttggacttgtcagataaatacacagccactcttccaaatcaggttggaattccaagaggattggaaaataattgtgattctttgcgagagtcagatactatagtttatttgttgagcagactatttttagttaataaattagttaacatgcctttagaattggcatgtagagttggcagttctttcagaatggaaagtatacataataagatgagaggtgctgggaatgacattttaaatatgtcaagcttctacagttgcttacgaaatggtaagaatgaatcccatgtacctgaggctgacctttcacttttgaagctaatttcctgttggagagaccagtctgtgcaggtaactgaagcaatacaagctgttctcttggcggaagttcaacaacacatgaagagtttgggaaagatacccgtcaatagtcaaccagtgtccatggcagagaatggtaactgtgagatgaagcagatgctgccaaagctggaatggacagaagaactagagttacagtgtgttagaaacactttgcctctgcaaactccagtcagcccggtcaagcatgacagcaactcaaactcggcaaacttccaagacgtggaggacatgcctgacagatgtgccttggaagagtctgagagtccaggtgagccaaggcatcattcatggatagcaaaggtctgcccctgcaaggtgtcttaaatggaatctcatcagtaggagctgaatttggacaaattaagaaatccaaaagatgccatttgtttattactgtataaaagcattgttgttattggtcaagttattaggctgtagtggatttgctaatactttagccaacatgtattaaagtgattttaatacatgctgattacaatgcaatacatactgattgaaaatattcatattcatctaattttagaaaaatattgcctagatcattctctattcctgtttcttactttttctgttaatatttccaacagggaatgccagtccacagacacaaatttaatactgctttaaattttctcctatccttttagtccctgaattatataataaacaatgttaaaaccaatgtagtacacaatacttacttacaaatttaatactgcttcaaggtatttaatctaaaattttaccaactttgatttgtctggttaggatattttgttttagtggatatgctttaattcggatcaattactgcagtaaatctcatccctaagcatgaaatgttgtcaacaaatacccagttccatttagttatcaattagcccaaataagagatacaaagtataacagtgaccaaccttgtactgttgagttaatttgaacttctaatgacattgaggctaatgtctttagctcaaggttgatcttgttggccatatagatgtgaactagggaaggggaatcaacttacagcatatcacaattgatccttattaagtataaactcttgtaggtcttttcccagaaagaagcttgactagcaggaattctaaaactgaaatatatcaaacagcataaataggaatagacataaagtgctcttctattaaagcctttggtgatctatttactatgatttatattgtacagttcctcgatttacagaaaatcatcaaaattattaatctacatatcttatgtatataaatattgcctaatccatagaaaaaaggatataaagtattaaatatgtgatatatagctatatctatctatctatgtatctaatagggaagtccaagtcacttcaattgaagaaacatatctctgagcataggagcagcctcaggtcctatggtgggatgcagtggacaggagagggggaaattagaaaagagaactatataattgaaaaagggatataaagcattaaatatatgatatatagctatatctatgtatgtatctaacagagaagttcaagtcacttcaattaaagaaacatttttgagcatgggaccagcctcaggtcttatgctgggatgcagtagacaggagatggggaaattagaaaagagaactgtgtaattgaaatgacgtgggctgcacccttaaggaacttataattaatgatgatctgaataaacataccaggataaagatgtcaaatgagtgtgactcccttaaagtagattaaagtgtgcattctttgtttcctaaaatatgattttactgcttgaaattacatttgagttgaagtttagaaactaacatagcattaatatgaataatcatggaaaattattatcctttgaaaactgattgataaatatattccccctcctttagaaacagtcaaaagccacttcaaacaagtttcaaaataaaggaaggtagcaagttaggcgatggattatattttcttgcttgttgtataccagttgtcaaggacattataaggactcccaaaagcattttgaaggatggcaatatcaaataagtgtatgtcctctcaaatgaggcatttttaattgttaaaatctatttggacgctcaggttatgatatgtttatgaaaaataagcttcattatttttatagctacatcctattattcccttttagaaacaagaataacaataggttttaatagttgccatacttagcatttatcagttctaatgaaaccaatattgaatctctgataaatattttctgatgttactagctatgggaaattagaactggcacaaccctgacattactaagtggaaatgttaggatttttcggcatcgcatgttagaatctctaaaatttaaacattcctgttaaatgactaaggtttgcttttatcaatatgaattctgaaggccaatatcataccattaactatgaaagcttttaattcctaaaaatagttttagagatattcaagcaatgctctcctaatatccatacgcaagtgtgtttatgacacaaattcactagtctgtttaaaaatgaattctttatattgactggtgttccacatatttcagtaatttctgttatgagaggacttgaaatagcaaattgccacacagttaactggatagaccacgtacgtggtgatcataaccacttggtactacacccagaaactcaaaattgtctttctcctgatgagatatgggtgtccttttgtacgtctaggcctaggtaaccagtggagtgattatattagcaaatgtgtttgtatccggagtcttcctgtcattgtaataaaaaatttatttaaaaa

SEQ ID NO: 34392 - DNA, 7507 bp, Homo sapiens
  source 1..7507: mol_type = unassigned DNA
gttcttttgttcttttctctctgcccccattttgtgggcccccaaattattatgggtcctgggcaccgtccctaatggataagccagccctgatctgagacacagagaggctgagggtctctaagaccactaagctagctacagcagagctcagacaagagcaactaggtctagacctctttctacatttgcgactatgaaaactatggagaaggctctgctcaagaggattcgcccaaaatgaggacttccctgcaggcagtggcactctggggacagaaggcccctccccacagcatcactgccatcatgatcactgatgaccagcgaacgattgtgactggaagtcaagagggtcagctctgtctctggaatctctcacatgaactaaagatttcagcgaaagaactcctatttggtcattcagcttcggtaacatgtttggcaagagcaagggacttctctaaacagccctacattgttagtgctgctgaaaatggggagatgtgtgtttggaatgtcaccaatggacagtgcatggagaaggctacacttccttacaggcacactgcaatctgttattaccactgctcattccggatgacaggagaaggctggcttctttgttgtggagaatatcaagatgtccttataattgatgccaaaactttggctgttgttcacagttttagatcatctcagtttcctgactggatcaactgcatgtgcattgttcactccatgagaattcaagaagattctctcttggtggtatcagtagctggtgagctcaaagtatgggatctttcctcatctatcaacagcattcaggaaaagcaagatgtctatgaaaaagaatccaagtttcttgagtccttgaactgccagacaattcgattttgcacatatactgagagacttctattggtggtattttctaaatgttggaaggtttatgattattgtgatttttcccttctgctgactgaagttagtagaaatgggcagttctttgctggtggagaagtgattgctgctcacagaatcctcatctggacagaagatggtcacagttacatctatcagctgctgaacagtgggctttcaaaaagcatataccctgctgatggaagagtgcttaaagagaccatttatcctcatttactgtgctctacttctgtgcaggaaaataaggaacagagccgtccctttgttatgggctacatgaatgaaaggaaagagcctttttacaaggtacttttctctggagaagtctcaggaagaattactttgtggcacatccctgatgttcctgtatccaagtttgatggttctcctagagagataccagtaactgccacctggactcttcaagataattttgataagcatgatactatgtcacaaagtattattgactatttctctgggcttaaagatggggcaggaactgctgtagtcacttcatcagagtatattccaagtcttgataaactaatatgtggctgtgaagatgggacaattatcattacccaggctttgaatgctgccaaagcaagacttctggaaggtggttctttagtaaaagattctccccctcataaagttcttaaaggccaccaccaaagtgtcacttcattactctatccacatggtctctcttcgaaattagaccaaagttggatgttgtctggggacctggactcatgtgtgatcttgtgggatatctttactgaagaaattttgcataaattctttttggaagctggtccagtaacaagtcttttgatgtcaccagagaagtttaaactaaggggtgagcagataatttgctgtgtgtgcggtgaccattccgtggctctccttcaccttgagggaaagagttgcctcctgcatgcccggaagcacctttttcctgtgaggatgataaaatggcacccggttgagaattttttaattgttggatgtgcagatgactcagtttatatctgggaaattgaaacaggcactttggaaagacatgagacaggagaaagagcacgaattattcttaattgttgtgatgattcacagcttgtgaagtctgtacttcccattgcctcagagacacttaagcacaaaagtatagaacagagatcctccagcccctaccagcttgggccattaccttgccctggtctgcaggtggagtcttcatgtaaggttactgatgccaaattttgcccaagaccttttaatgtcttgcctgtgaagacaaaatggagtaacgttggctttcatattcttctatttgatctggaaaaccttgttgaacttttgctaccaactccactcagtgatgttgactcttccagttcattctatggtggtgaggtcctgagaagagccaagagcacagtggagaagaagacactgacactgagaaaaagtaaaactgcctgtggtcctctttcagcagaggcactagccaagcctattactgaaagcctggcccaaggagataataccatcaaattctcagaagaaaatgatggcattaaaaggcagaagaaaatgaagatctccaaaaaaatgcagcctaagccatcaagaaaagtagatgccagtctcacaatagacacagcaaaattgtttctgtcttgccttttgccatggggagtggataaagatttagattatctttgcattaagcacctcaatattttaaagcttcagggtcctatttctttgggaatttctttgaatgaagataatttctcactgatgttgccaggttgggatttatgcaatagtggaatgataaaagactattcaggagtaaatttattttccaggaaagttttggacttgtcagataaatacacagccactcttccaaatcaggttggaattccaagaggattggaaaataattgtgattctttgcgagagtcagatactatagtttatttgttgagcagactatttttagttaataaattagttaacatgcctttagaattggcatgtagagttggcagttctttcagaatggaaagtatacataataagatgagaggtgctgggaatgacattttaaatatgtcaagcttctacagttgcttacgaaatggtaagaatgaatcccatgtacctgaggctgacctttcacttttgaagctaatttcctgttggagagaccagtctgtgcaggtaactgaagcaatacaagctgttctcttggcggaagttcaacaacacatgaagagtttgggaaagatacccgtcaatagtcaaccagtgtccatggcagagaatggtaactgtgagatgaagcagatgctgccaaagctggaatggacagaagaactagagttacagtgtgttagaaacactttgcctctgcaaactccagtcagcccggtcaagcatgacagcaactcaaactcggcaaacttccaagacgtggaggacatgcctgacagatgtgccttggaagagtctgagagtccaggtgagccaaggcatcattcatggatagcaaaggtctgcccctgcaaggtgtcttaaatggaatctcatcagtaggagctgaatttggacaaattaagaaatccaaaagatgccatttgtttattactgtataaaagcattgttgttattggtcaagttattaggctgtagtggatttgctaatactttagccaacatgtattaaagtgattttaatacatgctgattacaatgcaatacatactgattgaaaatattcatattcatctaattttagaaaaatattgcctagatcattctctattcctgtttcttactttttctgttaatatttccaacagggaatgccagtccacagacacaaatttaatactgctttaaattttctcctatccttttagtccctgaattatataataaacaatgttaaaaccaatgtagtacacaatacttacttacaaatttaatactgcttcaaggtatttaatctaaaattttaccaactttgatttgtctggttaggatattttgttttagtggatatgctttaattcggatcaattactgcagtaaatctcatccctaagcatgaaatgttgtcaacaaatacccagttccatttagttatcaattagcccaaataagagatacaaagtataacagtgaccaaccttgtactgttgagttaatttgaacttctaatgacattgaggctaatgtctttagctcaaggttgatcttgttggccatatagatgtgaactagggaaggggaatcaacttacagcatatcacaattgatccttattaagtataaactcttgtaggtcttttcccagaaagaagcttgactagcaggaattctaaaactgaaatatatcaaacagcataaataggaatagacataaagtgctcttctattaaagcctttggtgatctatttactatgatttatattgtacagttcctcgatttacagaaaatcatcaaaattattaatctacatatcttatgtatataaatattgcctaatccatagaaaaaaggatataaagtattaaatatgtgatatatagctatatctatctatctatgtatctaatagggaagtccaagtcacttcaattgaagaaacatatctctgagcataggagcagcctcaggtcctatggtgggatgcagtggacaggagagggggaaattagaaaagagaactatataattgaaaaagggatataaagcattaaatatatgatatatagctatatctatgtatgtatctaacagagaagttcaagtcacttcaattaaagaaacatttttgagcatgggaccagcctcaggtcttatgctgggatgcagtagacaggagatggggaaattagaaaagagaactgtgtaattgaaatgacgtgggctgcacccttaaggaacttataattaatgatgatctgaataaacataccaggataaagatgtcaaatgagtgtgactcccttaaagtagattaaagtgtgcattctttgtttcctaaaatatgattttactgcttgaaattacatttgagttgaagtttagaaactaacatagcattaatatgaataatcatggaaaattattatcctttgaaaactgattgataaatatattccccctcctttagaaacagtcaaaagccacttcaaacaagtttcaaaataaaggaaggtagcaagttaggcgatggattatattttcttgcttgttgtataccagttgtcaaggacattataaggactcccaaaagcattttgaaggatggcaatatcaaataagtgtatgtcctctcaaatgaggcatttttaattgttaaaatctatttggacgctcaggttatgatatgtttatgaaaaataagcttcattatttttatagctacatcctattattcccttttagaaacaagaataacaataggttttaatagttgccatacttagcatttatcagttctaatgaaaccaatattgaatctctgataaatattttctgatgttactagctatgggaaattagaactggcacaaccctgacattactaagtggaaatgttaggatttttcggcatcgcatgttagaatctctaaaatttaaacattcctgttaaatgactaaggtttgcttttatcaatatgaattctgaaggccaatatcataccattaactatgaaagcttttaattcctaaaaatagttttagagatattcaagcaatgctctcctaatatccatacgcaagtgtgtttatgacacaaattcactagtctgtttaaaaatgaattctttatattgactggtgttccacatatttcagtaatttctgttatgagaggacttgaaatagcaaattgccacacagttaactggatagaccacgtacgtggtgatcataaccacttggtactacacccagaaactcaaaattgtctttctcctgatgagatatgggtgtccttttgtacgtctaggcctaggtaaccagtggagtgattatattagcaaatgtgtttgtatccggagtcttcctgtcattgtaataaaaaatttatttaaaaattttgtcttgtgtttcttttttggtaatcatcttggtgatatttatgaatgtatttgtgtgtgtgtgtgtgtgtgtatacatacatatatatgtgtgtatatatatacacacatatatatacacatatatatgtgtgtatatatatatatatatggcatatcccccaaaggaatatcatattttcatttgcaagccttgattctttgacttgctgttgagtttcacattggctccattgtatattgcaggaaaaagtacctggaaagcctggagggttaaaagcagaggctcctcggcagcgtgtccaggccgtgtgtgcttgctgtgcttgtcagagcctcattccctcccctgtgttggagagctttctcacagggctcatccagaggtgctagaaagcaatgtgagcactattaaacacttcaaatataaggaaaaatgtataatgttagaaacacacagttaaaaagtagccccaggtatcaaacattctgttactattttagaaactaaattaaggctgctttgaacatgatggtattagaaaaatggtagaatacagtttgttaaatattaatattctatctttagatgatagcatttggtgacttttatttcttttctcatacattttttccagtgttctgtatttttaaaatcctttcataattattataatgaacactttagaaaagatactatttctcttccatccttagagggcacattataataattgagtattttaaaattaaattttatgccatgtatttaaaatgaaagttcaggttacattaattccaactgattttaaagccttattttcacagagtggactcattcaattttttaaattttatattcatacattttgattgctcagttatataaaagcggtgttatagactcctttattctccacaaaatgttgtcttatatgtaaagtgccaaaagttgtgtttaatttcctaagaaagtcattgctttgtaaacatttgcataatacttagtgttttttgtaattttaaaaaattagcttaaccaaaagagttgcaaaattaaaacttacttgagtaggtatctttcagacaaagctgcatggcttcatgtacaatagtccccagatcacctcgcactgtagtttgctcaagaaggagcctacagatggcaggtaggagaaggtaaactggaaattaacaggtctgtctgtaagagcatgccactggaaacacccatccaatttgggacccctggaagacagcatgtgtctaatgggaggcctgtcctagtacaactcctttactcttttcaccttcatcttgaccttctcagataccatctttatgtaaaatgttgatgttgtggagtttttgcagtaatttaatttttataaatattgtattaaaatatatttatcttga

SEQ ID NO: 34393 - DNA, 5900 bp, Homo sapiens
  source 1..5900: mol_type = unassigned DNA
aggtaaggcaggcacccccagagcgcaggtcgggctgccgggtcccaggattcgcccaaaatgaggacttccctgcaggcagtggcactctggggacagaaggcccctccccacagcatcactgccatcatgatcactgatgaccagcgaacgattgtgactggaagtcaagagggtcagctctgtctctggaatctctcacatgaactaaagatttcagcgaaagaactcctatttggtcattcagcttcggtaacatgtttggcaagagcaagggacttctctaaacagccctacattgttagtgctgctgaaaatggggagatgtgtgtttggaatgtcaccaatggacagtgcatggagaaggctacacttccttacaggcacactgcaatctgttattaccactgctcattccggatgacaggagaaggctggcttctttgttgtggagaatatcaagatgtccttataattgatgccaaaactttggctgttgttcacagttttagatcatctcagtttcctgactggatcaactgcatgtgcattgttcactccatgagaattcaagattctctcttggtggtatcagtagctggtgagctcaaagtatgggatctttcctcatctatcaacagcattcaggaaaagcaagatgtctatgaaaaagaatccaagtttcttgagtccttgaactgccagacaattcgattttgcacatatactgagagacttctattggtggtattttctaaatgttggaaggtttatgattattgtgatttttcccttctgctgactgaagttagtagaaatgggcagttctttgctggtggagaagtgattgctgctcacagaatcctcatctggacagaagatggtcacagttacatctatcagctgctgaacagtgggctttcaaaaagcatataccctgctgatggaagagtgcttaaagagaccatttatcctcatttactgtgctctacttctgtgcaggaaaataagagccgtccctttgttatgggctacatgaatgaaaggaaagagcctttttacaaggtacttttctctggagaagtctcaggaagaattactttgtggcacatccctgatgttcctgtatccaagtttgatggttctcctagagagataccagtaactgccacctggactcttcaagataattttgataagcatgatactatgtcacaaagtattattgactatttctctgggcttaaagatggggcaggaactgctgtagtcacttcatcagagtatattccaagtcttgataaactaatatgtggctgtgaagatgggacaattatcattacccaggctttgaatgctgccaaagcaagacttctggaaggtggttctttagtaaaagattctccccctcataaagttcttaaaggccaccaccaaagtgtcacttcattactctatccacatggtctctcttcgaaattagaccaaagttggatgttgtctggggacctggactcatgtgtgatcttgtgggatatctttactgaagaaattttgcataaattctttttggaagctggtccagtaacaagtcttttgatgtcaccagagaagtttaaactaaggggtgagcagataatttgctgtgtgtgcggtgaccattccgtggctctccttcaccttgagggaaagagttgcctcctgcatgcccggaagcacctttttcctgtgaggatgataaaatggcacccggttgagaattttttaattgttggatgtgcagatgactcagtttatatctgggaaattgaaacaggcactttggaaagacatgagacaggagaaagagcacgaattattcttaattgttgtgatgattcacagcttgtgaagtctgtacttcccattgcctcagagacacttaagcacaaaagtatagaacagagatcctccagcccctaccagcttgggccattaccttgccctggtctgcaggtggagtcttcatgtaaggttactgatgccaaattttgcccaagaccttttaatgtcttgcctgtgaagacaaaatggagtaacgttggctttcatattcttctatttgatctggaaaaccttgttgaacttttgctaccaactccactcagtgatgttgactcttccagttcattctatggtggtgaggtcctgagaagagccaagagcacagtggagaagaagacactgacactgagaaaaagtaaaactgcctgtggtcctctttcagcagaggcactagccaagcctattactgaaagcctggcccaaggagataataccatcaaattctcagaagaaaatgatggcattaaaaggcagaagaaaatgaagatctccaaaaaaatgcagcctaagccatcaagaaaagtagatgccagtctcacaatagacacagcaaaattgtttctgtcttgccttttgccatggggagtggataaagatttagattatctttgcattaagcacctcaatattttaaagcttcagggtcctatttctttgggaatttctttgaatgaagataatttctcactgatgttgccaggttgggatttatgcaatagtggaatgataaaagactattcaggagtaaatttattttccaggaaagttttggacttgtcagataaatacacagccactcttccaaatcaggttggaattccaagaggattggaaaataattgtgattctttgcgagagtcagatactatagtttatttgttgagcagactatttttagttaataaattagttaacatgcctttagaattggcatgtagagttggcagttctttcagaatggaaagtatacataataagatgagaggtgctgggaatgacattttaaatatgtcaagcttctacagttgcttacgaaatggtaagaatgaatcccatgtacctgaggctgacctttcacttttgaagctaatttcctgttggagagaccagtctgtgcaggtaactgaagcaatacaagctgttctcttggcggaagttcaacaacacatgaagagtttgggaaagatacccgtcaatagtcaaccagtgtccatggcagagaatggtaactgtgagatgaagcagatgctgccaaagctggaatggacagaagaactagagttacagtgtgttagaaacactttgcctctgcaaactccagtcagcccggtcaagcatgacagcaactcaaactcggcaaacttccaagacgtggaggacatgcctgacagatgtgccttggaagagtctgagagtccaggtgagccaaggcatcattcatggatagcaaaggtctgcccctgcaaggtgtcttaaatggaatctcatcagtaggagctgaatttggacaaattaagaaatccaaaagatgccatttgtttattactgtataaaagcattgttgttattggtcaagttattaggctgtagtggatttgctaatactttagccaacatgtattaaagtgattttaatacatgctgattacaatgcaatacatactgattgaaaatattcatattcatctaattttagaaaaatattgcctagatcattctctattcctgtttcttactttttctgttaatatttccaacagggaatgccagtccacagacacaaatttaatactgctttaaattttctcctatccttttagtccctgaattatataataaacaatgttaaaaccaatgtagtacacaatacttacttacaaatttaatactgcttcaaggtatttaatctaaaattttaccaactttgatttgtctggttaggatattttgttttagtggatatgctttaattcggatcaattactgcagtaaatctcatccctaagcatgaaatgttgtcaacaaatacccagttccatttagttatcaattagcccaaataagagatacaaagtataacagtgaccaaccttgtactgttgagttaatttgaacttctaatgacattgaggctaatgtctttagctcaaggttgatcttgttggccatatagatgtgaactagggaaggggaatcaacttacagcatatcacaattgatccttattaagtataaactcttgtaggtcttttcccagaaagaagcttgactagcaggaattctaaaactgaaatatatcaaacagcataaataggaatagacataaagtgctcttctattaaagcctttggtgatctatttactatgatttatattgtacagttcctcgatttacagaaaatcatcaaaattattaatctacatatcttatgtatataaatattgcctaatccatagaaaaaaggatataaagtattaaatatgtgatatatagctatatctatctatctatgtatctaatagggaagtccaagtcacttcaattgaagaaacatatctctgagcataggagcagcctcaggtcctatggtgggatgcagtggacaggagagggggaaattagaaaagagaactatataattgaaaaagggatataaagcattaaatatatgatatatagctatatctatgtatgtatctaacagagaagttcaagtcacttcaattaaagaaacatttttgagcatgggaccagcctcaggtcttatgctgggatgcagtagacaggagatggggaaattagaaaagagaactgtgtaattgaaatgacgtgggctgcacccttaaggaacttataattaatgatgatctgaataaacataccaggataaagatgtcaaatgagtgtgactcccttaaagtagattaaagtgtgcattctttgtttcctaaaatatgattttactgcttgaaattacatttgagttgaagtttagaaactaacatagcattaatatgaataatcatggaaaattattatcctttgaaaactgattgataaatatattccccctcctttagaaacagtcaaaagccacttcaaacaagtttcaaaataaaggaaggtagcaagttaggcgatggattatattttcttgcttgttgtataccagttgtcaaggacattataaggactcccaaaagcattttgaaggatggcaatatcaaataagtgtatgtcctctcaaatgaggcatttttaattgttaaaatctatttggacgctcaggttatgatatgtttatgaaaaataagcttcattatttttatagctacatcctattattcccttttagaaacaagaataacaataggttttaatagttgccatacttagcatttatcagttctaatgaaaccaatattgaatctctgataaatattttctgatgttactagctatgggaaattagaactggcacaaccctgacattactaagtggaaatgttaggatttttcggcatcgcatgttagaatctctaaaatttaaacattcctgttaaatgactaaggtttgcttttatcaatatgaattctgaaggccaatatcataccattaactatgaaagcttttaattcctaaaaatagttttagagatattcaagcaatgctctcctaatatccatacgcaagtgtgtttatgacacaaattcactagtctgtttaaaaatgaattctttatattgactggtgttccacatatttcagtaatttctgttatgagaggacttgaaatagcaaattgccacacagttaactggatagaccacgtacgtggtgatcataaccacttggtactacacccagaaactcaaaattgtctttctcctgatgagatatgggtgtccttttgtacgtctaggcctaggtaaccagtggagtgattatattagcaaatgtgtttgtatccggagtcttcctgtcattgtaataaaaaatttatttaaaaatttt

SEQ ID NO: 34394 - DNA, 2572 bp, Homo sapiens
  source 1..2572: mol_type = unassigned DNA
cagatgtggcatcaggagtgaacaaagccgctcatctcgcagtatccctacctatgctcctgggaggagtctaccccagatacgctctgaccttcggcaagttacttatgttctccaagactcattttcttcatgtttggaatagtgataataatgcatattgatattatgaggaccgcatgaagcagtgaacgtaatctaagcagcacagtgtctacaacttaacatatagtcagattcgcccaaaatgaggacttccctgcaggcagtggcactctggggacagaaggcccctccccacagcatcactgccatcatgatcactgatgaccagcgaacgattgtgactggaagtcaagagggtcagctctgtctctggaatctctcacatgaactaaagatttcagcgaaagaactcctatttggtcattcagcttcggtaacatgtttggcaagagcaagggacttctctaaacagccctacattgttagtgctgctgaaaatggggagatgtgtgtttggaatgtcaccaatggacagtgcatggagaaggctacacttccttacaggcacactgcaatctgttattaccactgctcattccggatgacaggagaaggctggcttctttgttgtggagaatatcaagatgtccttataattgatgccaaaactttggctgttgttcacagttttagatcatctcagtttcctgactggatcaactgcatgtgcattgttcactccatgagaattcaagaagattctctcttggtggtatcagtagctggtgagctcaaagtatgggatctttcctcatctatcaacagcattcaggaaaagcaagatgtctatgaaaaagaatccaagtttcttgagtccttgaactgccagacaattcgattttgcacatatactgagagacttctattggtggtattttctaaatgttggaaggtttatgattattgtgatttttcccttctgctgactgaagttagtagaaatgggcagttctttgctggtggagaagtgattgctgctcacagaatcctcatctggacagaagatggtcacagttacatctatcagctgctgaacagtgggctttcaaaaagcatataccctgctgatggaagagtgcttaaagagaccatttatcctcatttactgtgctctacttctgtgcaggaaaataaggaacagagccgtccctttgttatgggctacatgaatgaaaggaaagagcctttttacaaggtacttttctctggagaagtctcaggaagaattactttgtggcacatccctgatgttcctgtatccaagtttgatggttctcctagagagataccagtaactgccacctggactcttcaagataattttgataagcatgatactatgtcacaaagtattattgactatttctctgggcttaaagatggggcaggaactgctgtagtcacttcatcagagtatattccaagtcttgataaactaatatgtggctgtgaagatgggacaattatcattacccaggctttgaatgctgccaaagcaagacttctggaaggtggttctttagtaaaagattctccccctcataaagttcttaaaggccaccaccaaagtgtcacttcattactctatccacatggtctctcttcgaaattagaccaaagttggatgttgtctggggacctggactcatgtgtgatcttgtgggatatctttactgaagaaattttgcataaattctttttggaagctggtccagtaacaagtcttttgatgtcaccagagaagtttaaactaaggggtgagcagataatttgctgtgtgtgcggtgaccattccgtggctctccttcaccttgagggaaagagttgcctcctgcatgcccggaagcacctttttcctgtgaggatgataaaatggcacccggttgagaattttttaattgttggatgtgcagatgactcagtttatatctgggaaattgaaacaggcactttggaaagacatgagacaggagaaagagcacgaattattcttaattgttgtgatgattcacagcttgtgaagtctgtacttcccattgcctcagagacacttaagcacaaaagtatagaacagagatcctccagcccctaccagcttgggccattaccttgccctggtctgcaggtggagtcttcatgtaaggttactgatgccaaattttgcccaagaccttttaatgtcttgcctgtgaagacaaaatggagtaacgttggctttcatattcttctatttgatctggaaaaccttgttgaacttttgctaccaactccactcagtgatgttgactcttccagttcattctatggtggtgaggtcctgagaagagccaagagcacagtggagaagaagacactgacactgagaaaaagtaaaactgcctgtggtcctctttcagcagaggcactagccaagcctattactgaaagcctggcccaaggagataataccatcaaattctcagaagaaaatgatggcattaaaaggcagaagaaaatgaagatctcc

SEQ ID NO: 34395 - DNA, 2576 bp, Homo sapiens
  source 1..2576: mol_type = unassigned DNA
agtcaagtaacgctgagagcctatcgcatgagggcgacagccggaaagcaggatggagccatagaagcaattctcgcgagaagtagagttgcggttccctcgggagaggggcggaggctcagaggtgcaccacgtggggtttgctgccggagcggagtctccggccggcgtccagtttgagtctaggttggagttggaaccgtggagatgcggaaggaaaccccaccccccctagtgcccccggcggcccgggagtggaatcttcccccaaatgcgcccgcctgcatggaacggcagttggaggctgcgcggtaccggtccgatggggcgcttctcctcggggcctccagcctgagtgggcgctgctgggccggctccctctggctttttaaggacccctgtgccgcccccaacgaaggcttctgctccgccggagtccaaacggaggctggagtggctgacctcacttgggttggggagagaggtattctagtggcctccgattcaggtgctgttgaattgtgggaactagatgagaatgagacacttattgtcagcaagttctgcaagtatgagcatgatgacattgtgtctacagtcagtgtcttgagctctggcacacaagctgtcagtggtagcaaagacatctgcatcaaggtttgggaccttgctcagcaggtggtactgagttcataccgagctcatgctgctcaggtcacttgtgttgctgcctctcctcacaaggactctgtgtttctttcatgcagcgaggacaatagaattttactctgggatacccgctgtcccaagccagcatcacagattggctgcagtgcgcctggctaccttcctacctcgctggcttggcatcctcagcaaagtgaagtctttgtctttggtgatgagaatgggacagtctcccttgtggacaccaagagtacaagctgtgtcctgagctcagctgtacactcccagtgtgtcactgggctggtgttctccccacacagtgttcccttcctggcctctctcagtgaagactgctcacttgctgtgctggactcaagcctttctgagttgtttagaagccaagcccacagagactttgtgagagatgcgacttggtccccgctcaatcactccctgcttaccacagtgggctgggaccatcaggtcgtccaccacgttgtgcccacagaacctctcccagcccctggacctgcaagtgttactgagtagattggatttaagacaaaaagcaagtcccccatgagtgtccacttctttgccctgccctctcagcttgtgagacaacacaggagccttctatagtatgttgatatgctagatctgtgccgttaataggcatcgtctctcagcctgagggaggctggattctgggttcctgtagtcacagggaggaaaagctttcttaaaaatggacatgtatgtgcgtgtgagtgtgtgtgtagatttatagtttttggtagtggcaggaataaaaaaaatccatcctacatcttccctaagcactgcctctctctcaccccccaaaacaagttgacgaaagggttttatgtagctgtctatgaggaattggccgtgtctgggtgggttatgggatgtgggcatccctgggttcttggaagcagctcttatgctactcatagagatgggattgactttatttttttatagtgcttaattcaccattatgagaaatgcttccagtcacaaaaatgcagcccagctcactctgaggaagaagcaggacttggtacggttttacacaactccttaccattaaactgaatcagaaatccattttctggctgaataaaaagtttggcttgcctgtgtaatgcccactcccttccccctggctccctagtgatgggacatatatgagagagaagtgtttttctatcatagacaccataggggaaagtttggggatgaaggagagcttaaaggtgtttcaattaagttagaaaactgacacaggctgttgagaattctttgccacttttcccaccccaaaacagcatggggcctgacatcttctgccctggtcccctttctcttgatgtggaaagtctgaatgcagtatttatagacttctaaggttttaaaatccagtatcaagaagaaaatcagaaatactggttggtgaaataaagagtttaggcattgttggcctgtcttttttgaagcatgtgtgttatgtgtagttagatatatttcacttatgtgagtcatcatggtgttggtcttgtagcccattatttttcctgtgcttccccagcttcccaaagtagctagttagaacttaaggtaaatatttattcttgggttggtggagtggatattgccagttaggagtcatggatcaattactgattatattgaaagtaaatataatcaattatgtacttttgagctttgcaggttcaatttaggtaaaaatcacattatgaaactgggaaagtctgaaggaatatgggcaaaatatttctcagtaaagcttccatgcttcacccttgacatgattacccttgagtaaaacatgggaatttgta

SEQ ID NO: 34396 - DNA, 976 bp, Homo sapiens
  source 1..976: mol_type = unassigned DNA
gtgcaccacgtggggtttgctgccggagcggagtctccggccggcgtccagtttgagtctaggttggagttggaaccgtggagatgcggaaggaaaccccaccccccctagtgcccccggcggcccgggagtggaatcttcccccaaatgcgcccgcctgcatggaacggcagttggaggctgcgcggtaccggtccgatggggcgcttctcctcggggcctccagcctgagtgggcgctgctgggccggctccctctggctttttaaggacccctgtgccgcccccaacgaaggcttctgctccgccggagtccaaacggaggctggagtggctgacctcacttgggttggggagagaggtattctagtggcctccgattcagctcatgctgctcaggtcacttgtgttgctgcctctcctcacaaggactctgtgtttctttcatgcagcgaggacaatagaattttactctgggatacccgctgtcccaagccagcatcacagattggctgcagtgcgcctggctaccttcctacctcgctggcttggcatcctcagcaaagtgaagtctttgtctttggtgatgagaatgggacagtctcccttgtggacaccaagagtacaagctgtgtcctgagctcagctgtacactcccagtgtgtcactgggctggtgttctccccacacagtgttcccttcctggcctctctcagtgaagactgctcacttgctgtgctggactcaagcctttctgagttgtttagaagccaagcccacagagactttgtgagagatgcgacttggtccccgctcaatcactccctgcttaccacagtgggctgggaccatcaggtcgtccaccacgttgtgcccacagaacctctcccagcccctggacctgcaagtgttactgagtagattggatttaagacaaaaagcaagtcccccatgagtgtccacttctttgccctgcc

SEQ ID NO: 34397 - DNA, 877 bp, Homo sapiens
  source 1..877: mol_type = unassigned DNA
cctgtgccgcccccaacgaaggcttctgctccgccggagtccaaacggaggctggagtggctgacctcacttgggttggggagagaggtattctagtggcctccgattcaggtgctgttgaattgtgggaactagatgagaatgagacacttattgtcagcaagttctgcaagtatgagcatgatgacattgtgtctacagtcagtgtcttgagctctggcacacaagctgtcagtggtagcaaagacatctgcatcaaggtttgggaccttgctcagcaggtggtactgagttcataccgagctcatgctgctcaggtcacttgtgttgctgcctctcctcacaaggactctgtgtttctttcatgcagcgaggacaatagaattttactctgggatacccgctgtcccaagccagcatcacagattggctgcagtgcgcctggctaccttcctacctcgctggcttggcatcctcagcaaagtgaagtctttgtctttggtgatgagaatgggacagtctcccttgtggacaccaagagtacaagctgtgtcctgagctcagctgtacactcccagtgtgtcactgggctggtgttctccccacacaggctggacctttcacaaccctctcctccatctgatagtgttcccttcctggcctctctcagtgaagactgctcacttgctgtgctggactcaagcctttctgagttgtttagaagccaagcccacagagactttgtgagagatgcgacttggtccccgctcaatcactccctgcttaccacagtgggctgggaccatcaggtcgtccaccacgttgtgcccacagaacctctcccagcccctggacctgcaagtgttactgagtagat

SEQ ID NO: 34398 - DNA, 4293 bp, Homo sapiens
  source 1..4293: mol_type = unassigned DNA
ttctgcctgtcgccccaaaatggcggacacaatgagccggcgacgcgccggttgtccgtgaggtggctgtgaggacgaacggtcggcgaggctccacagtccaggcagaagaccctcgaccaagcaggaagaagaggaggaggcggcccaactgttggccgacttcccgctagccgccggcgcggcgcccgccccgcctgggttggcccctcggcagcccgcccgctcgccgccgggccccgccccggccctgcgccgccgctgccttccccagccgccgccatgaagctgaccgacagcgtgttgcggagcttccgcgtcgctaaggtgttccgcgaaaactcggacaagattaactgcttcgatttcagccccaacggcgagacggtcatctcgagtagcgacgacgactccatcgtgctctatgactgccaggagggcaaaccaaagagaaccctgtacagtaagaaatatggtgtggacctcatcagatacactcatgcagcaaacacagttgtttacagctctaacaaaatagacgatactattcgttacttgtccttgcatgacaacaaatacatcagatactttcctggacatagcaaaagggtggtggccttgtccatgtcacctgtggatgacactttcatttctgggtctcttgataagaccattcgactctgggatctccggtctcctaactgccagggcctcatgcatctgcaggggaagccagtttgttcttttgatccagaagggttaattttcgctgcaggtgtcaactctgaaatggtcaagctttatgaccttcgttcttttgataaggggccatttgctacctttaagatgcagtatgatcgaacttgtgagtggacaggacttaaattcagcaatgatggcaagctcatcctcatttccaccaacggcagcttcattcgtctgattgatgcattcaaaggagtggtgatgcacacatttgggggttatgccaacagcaaagctgtcacactggaggcttcatttactccagactctcagtttattatgattggttcagaggatggcaagatccatgtctggaatggagagagcggtataaaagtagctgtgttggatggtaaacacacaggcccgattacctgtttgcaattcaaccccaagttcatgacttttgccagtgcgtgttccaacatggccttttggttgcccaccattgatgactgaccctgttgctgcttggctatttctgtatagtgagggcggccagcaggaagaaactcagagggaactgagataatagtgggattggatcatttgactgggctggagaacatccttttacatggccttcccatggatgtgctgtacatctgctcaaaagaaaataattactttgatgagcgtcttcaaaaggactcttggtgcaacagactcaattggaactcagcttttctaactgtcactgcaccaagctctgctggaggagtgaccagactcacgatttggtatagtggggctctcaagcatcttcaatttgaatgtacatgctgctgaggagccggtgaagtcatcagttccgcacatcccttctaccctccaactgcatgggaagccaaagtcctggttttgaaatgcttgggcagctcagccgcttgccctcaccctgcatgtcttgttactgggtctccctgtgtacttgtggcattatccacaaccatcatgtttcttaggtgccaaacatttacagaaacattttcatatatcttggggtcagagaaagggacagatacagaaggaccttgcttgcaggaagccatgcagttagtttctgcagttagtcgtgtgaggctaggtggttgggcaggcctcgggctgtaggtgttgggtgggaaaaagacccaagggcctgaaagggagggaaaggggagggtagcgggagggtagcaggtgagttcctagggctggaaggtttagcagcagcctggtgcagtgccctgtcatcaagacaaacccacggtcctcctgggtgcctaccaagcttggtttgtacaaaagcaaggtgggagtctatttttgtacatgagatacatcacacttacctgtgggccagtattgtgaagtgagtctgagttgtttacactgatgccttccctgcccaccacaaattgtgtacatagtcttcagatgataccacccctttccccagctcccaaccaagagctggttctaggcctgtgttatatgtcatatttagcgtttttatatatgacctttgatttctgttgtttgtattttagcacagtgtatgcaccttcatttaaatacatctgtgtgcatacagatacgcatatatgtgtgtgcgtatgcatatatctctcatctgtagtttccaagagttcagctgaagcagatggagtcctgcagcccaggagacaccctgcatccctgctaatagtgtttgccacaagtattagtgagtcttccttattaatattttcatttcagaagactgaagcaaagctgatagtgtttgctgtttctttggcagctaagtgagggtcttgggatgacttgctgtgttcctcaagctgcactttggggccatctctgcagtattagccccctttttgcttggtggtactctgtctgtgcctgtgtgtgtgtgtgatagtcactcttgcatggcttccatgtctggtttgtggcatttggggataaggtgctgaagccagagcatttgcagtttgtttgaggcctcgttgccaatgatagatcactcctgttgacctggtatgtctgcttgcttgctgcttttccttgctttctcttggaagaggaaaggactctggtcaggcccaggctgagtgagatgagctgcagctggctcatggccttcttagagcagagagaggagtatgtcattttactaagttcctaaacaaacatttatgcaggcaacactccttgcagatccagaaactgaggcacaatagggttatgacttgctcaagaatatgtagctgctagggggtaaatcaaggcatcacaatttctgttcagcgggcaggaataggctgtgaattgctagcactttttttttttaagcaattactttttgacttgttcctctgaaagtgcaagaggcgtacacctttcccaaatgtagactagaatctgcaggatgccacccactgtatagttctgctttcccagagaggaagaacttttagaaaccaaatgatcttaattgttattgcccacccctggcttttccgggtagaaaattcacagtaggaatgattgttaagagagagtgcttggaaccatgggttaacaggaaaggctacctaacttcacatatctgcaaccagagcagccaccaagcattacttagcagcaggaaaatgattgtatttgagttcctgtgtgtccaaaactgagcaccatgttctttgaaaacatgccacctcaaggctgggcgcggtggctcacacctgtaatcccagcactttgggaggccgaggcgggcggatcaccggaggtcgggagtttgagaccagcctgaccaacatggagaaaccccatctctactaaaaatacaaaattagccgggcgtggtggcatgcgcctataatctcagctacttgggaggctgaggcaggagaattgcttgaacccaggaggcggaggttgcggtgagttgagatcgtgccattgcactccggcctgggcaacaacagcaaaactccgtctcaaaaaaaaaaaaaaaaaaatgccacctcacagtctctatcgttgggccctgtggttgcaaagctgcctcctgaattaagaaggaaagggaaaagatatagctggaagcgagtggaagagatgctgagggctggggctgcacagacgtgctcagcagggctacaggtgctcaagccctattggggatgggtggggagtggggcagcggcgtttgccaccttaagaattggggccaaagccactgatgtttatttgacagtgacactgcactgggtacttaaagaaattatttcccgttgtaattataattactgcttattaaggaaaatatgggaattttagaaagaatcaagtttgccacccaaatgctaccactgttaatcttttggtgttaaatgttccccctagacatttctgtgcatagatttttggtgtgtttacatagtcgttattctgtatatacaattttatgtcccttttgtacttaacgtataaacattttttccatgttacagtcttaaacagaattttatggctgca

SEQ ID NO: 34399 - DNA, 1847 bp, Homo sapiens
  source 1..1847: mol_type = unassigned DNA
ccccggaaggagtcgcgagagaggcggcccgcgctgacggtgtccctggggctctgcgctcgtccggccggccccggcctcgccgccccgcgcagtacccagcccggccccgccgacccgcctctactgccggctccgcgcccttccccgagggctggatgatgggctgtttcgccctgcaaacggtggacaccgagctgaccgcggactcggtggagtggtgcccgctgcaaggctgcaggcacctgctggcgtgcgggacctaccagctgcggcggccggaggaccggcctgccggcccccagaacaagggtggaatggaagttaaggagcctcaggtccgtttaggccgtctcttcctgtacagtttcaatgacaacaactctattcaccctctggtcgaggtccaaagaaaagatacttctgcaatcctggacatgaaatggtgtcacatcccggtggctggacatgccctcttgggcttggcagatgccagtggatccatacaactgctccgcctggtggaatctgagaagagccacgtgctggagccattgtccagccttgccctggaggagcagtgtctggctttgtccctagattggtccactgggaaaactggaagggccggggaccagcccttgaagatcatcagcagtgactccacagggcagctccacctcctgatggtgaatgagacgaggcccaggctgcagaaagtggcctcatggcaggcacatcaattcgaggcctggattgctgctttcaattactggcatccagaaattgtgtattcagggggcgacgatggccttctgaggggctgggacaccagggtacccggcaaatttctcttcaccagcaaaagacacaccatgggtgtgtgcagcatccagagcagccctcatcgggagcacatcctggccacgggaagctatgatgaacacatcctactgtgggacacacgaaacatgaagcagccgttggcagatacgcctgtgcagggtggggtatggagaatcaagtggcaccctttccaccaccacctgctcctggccgcctgcatgcacagtggctttaagatcctcaactgccaaaaggcaatggaggagaggcaggaggcgacggtcctgacatctcacacattgcccgactcgctggtgtatggagccgactggtcctggctgctcttccgttctctgcagcgggccccctcgtggtcctttcctagcaacctaggaaccaagacggcagacctgaagggtgcaagcgagttgccaacaccctgtcatgaatgcagagaggataacgatggggagggccatgccagaccccagagtggaatgaagccactcacagagggcatgaggaagaatggcacctggctgcaggctacagcagccaccacacgtgactgtggcgtgaacccagaagaagcagactcagccttcagcctcctggccacctgctccttctatgaccatgcgctccacctctgggagtgggaggggaactgagcttgaaatcatgaagccccttcccacaaggaaaccaggagggagactgcgagtgagtgcccgggaccacctcatcagagatgcttactgcagccctgcaggtgcctgtgcactgatggaatccacagtgtagtcagaaaagctgttgacttctcttaaatcagcttccctgctgggcccctgaaagtggactgggtgattctgtctggcagagagtggggaaaagacgcggtttccagcttgcagatttgttaagtttctcaggcagattttgactttcagcctttcatacttgtttaagcaactatttgtattaaatgaagttttttg

SEQ ID NO: 34400 - DNA, 2626 bp, Homo sapiens
  source 1..2626: mol_type = unassigned DNA
ggggcagaatacggaaagcgggagggacaaattgccaatgtttggagtctggtttccaggttgccgtttttgggggctctgggtgtggcggttgccgtagctgaaattggctgcaccatgtcggccttcgagaagcctcagatcatcgcccatatccagaagggcttcaactacacggtgtttgactgtaagtgggtgccctgcagcgccaaatttgtgaccatgggcaacttcgcacggggcaccggcgtcattcagctgtacgagatccagcacggggacctgaagctgcttcgggagattgaaaaggccaaacctattaaatgtggaacatttggtgcaacatctttacagcagagatatttagctactggagattttggtggaaaccttcatatatggaatttagaagctccagagatgccagtatattctgtaaagggccataaagaaattataaatgccatagatggcataggtggactaggaattggagaaggagcacctgaaattgtgactggcagccgagatggaactgtgaaggtgtgggacccaaggcaaaaagatgatcctgttgctaatatggaacctgtacaaggagaaaacaagagagactgttggactgtggcatttggcaatgcttataatcaagaagaacgtgttgtttgtgctggctatgacaatggggatatcaaactatttgatctcagaaatatggcattacggtgggagacaaacatcaaaaatggggtgtgtagcttggagtttgacagaaaagacataagtatgaataagttagtagccacatctctggaaggaaagttccatgtttttgacatgagaacacagcatccaaccaaaggttttgcctctgtttcagaaaaggctcataaatctactgtgtggcaggtccgacacctgccgcagaacagggagctctttctgacagctggaggcgccggcggccttcacctctggaagtatgaataccctattcagcggtcaaagaaagattctgagggaatagaaatgggagtcgcaggttctgtaagccttctgcagaatgttacgttgtccacccagcccatttcaagtttggattggagtccagataaaaggggtctctgcgtctgtagttcatttgaccaaacggtgagagtactgatcgttacaaagctcaataaaatttgacttcaagactttggacttgaggctgggcacggtggctcactcctgtaatcccagcactttgggaggccgaggcgggtggatcagaaggtcaggagatcgagaccatcctggctaacatggtgaaaccccgtctctactaaaaatataaaaaaaaatttgctgggtgtcatggcgggcatctgtagtcctagctacttgggaggctgaggcaggagaatggcgtgaacccgggaggcggaggttgcagtgagccgagattgtgccactgcactccagcctgggcaactgagcaagactgtctcaaaaaaaaaaaaaaaaaaaaagactttggacttgaaaccttccagaggaacactcacacaatttaagataggttctggagtcctctgaccctcattgaacaaagctggatttggctgatgataaaagaccccagccacaagcctctgggccagcctccagcctctctcggggcttgtttgctgacttgctgctgcacgtgggtatcagaagcaccaagtaaactatctccagggccagttcttttctctcccttccatttctaagtcaatagttgtctataattaaacatatttcagatttgttctgtgtccctgaagttccatattttatctttatgcttgtgttatgttttagtgtctataatgttgtggtgggaatcatttcatttggtttaaaagagtttgccttggaaaaactgaattaaccttcataaatacattttgagagatttcagtgtgagtaattttctggacataatattattgtataaaatatcaaaatggtgggccaggcgtggtagctcacgcctgtaattccagcactttgggaggctgaggcgggtgaatcacgaggtcaggaattcgagaccagcctggccaacatggtcaaaacccgtctctactaaaaatacaaaaaattagctgggcttagtggcgggcgcctgtaatcacagctacttgggaggctgaggcaggagaatcacttgaacccaggaggtggagattgcagtgagctgagattgcgccactgcactccagccctggcgacagagtgagactccgtctcaaaaaaaaaaaaaacaaatatatatatatatatctctctctctcaaaacggcacggttggtctagatttgggtagctattttctgcaatttaattcataaaacaaaatgctttgattttaaagagctcttttttacttaaaatacaggaactgaattggtgagacttttggtttttgactgtggtaagtgatggtgaaatgtacaagattgtaggggttttgtagtcttatttttggtcatactttaaaaatgcattttatgaataaacttctgtttttgagatctacagaagctttgattctgttaccttaacagtagtaataaagttaacattgtcacatcatt

SEQ ID NO: 34401 - DNA, 1517 bp, Homo sapiens
  source 1..1517: mol_type = unassigned DNA
ctgggtgtggcggttgccgtagctgaaattggctgcaccatgtcggccttcgagaagcctcagatcatcgcccatatccagaagggcttcaactacacggtgtttgactgtaagtgggtgccctgcagcgccaaatttgtgaccatgggcaacttcgcacggggcaccggcgtcattcagctgtacgagatccagcacggggacctgaagctgcttcgggagattgaaaaggccaaacctattaaatgtggaacatttggtgcaacatctttacagcagagatatttagctactggagattttggtggaaaccttcatatatggaatttagaagctccagagatgccagtatattctgtaaagggccataaagaaattataaatgccatagatggcataggtggactaggaattggagaaggagcacctgaaattgtgactggcagccgagatggaactgtgaaggtgtgggacccaaggcaaaaagatgatcctgttgctaatatggaacctgtacaaggagaaaacaagagagactgttggactgtggcatttggcaatgcttataatcaagaagaacgtgttgtttgtgctggctatgacaatggggatatcaaactatttgatctcagaaatatggcattacggtgggagacaaacatcaaaaatggggtgtgtagcttggagtttgacagaaaagacataagtatgaataagttagtagccacatctctggaaggaaagttccatgtttttgacatgagaacacagcatccaaccaaaggttttgcctctgtttcagaaaaggctcataaatctactgtgtggcaggtccgacacctgccgcagaacagggagctctttctgacagctggaggcgccggcggccttcacctctggaagtagtaagtctgccagtgcacactgctccttttaaagttacctgtgggtgtaaagtaggattagattgaacttttttttcttttttttcctgctttgacttagttcattttgatatgatttaaaatttcatggtgttacataacttgttttctaagcattttgtatgaatatactttacacttagtagagtgtacactaatcttcttttgatacattttagtatatcattttagttgtgtcttctaagtatgaaaaagttggcccaagacttttatcagatactatcttgaagtgattagaacactcactgcctctaaaagatggggaaagggttccttgcctaaatttagataacatcattgtgatagaccccaacagagcctgaggctgctgattggtctccaggaaagatcttatcactgaatttgctttctgcatatctaggcagggtgagttacaatgaaagcttttactatgcacaccactttctgaatcccaagggcgctaacatcacagatactagatcatttaaaaggtctgatatcattgctcagggttggcctgtgaaaaggaaacaaaacaaaacaaaacaaaaattaaaggtctgataaaaa

SEQ ID NO: 34402 - DNA, 4196 bp, Homo sapiens
  source 1..4196: mol_type = unassigned DNA
agcgagacttccagtccgaggtcctgctttctgctatggaactattccacatgacaagtggaggtgatgcagcgatgttcagagacggcaaagagcctcagccaagtgcagaagctgctgctgccccttctcttgccaacatctcctgcttcacccagaagctggtggagaagctgtacagtgggatgttctcggcagaccccaggcatatcctcctcttcatcctggagcacatcatggtggtcattgagactgcctcttctcaaagggacactgtcctcagcactttatacagcagtttaaataaagtcattctttattgcctatccaagccccagcagtccctctccgaatgcctcggccttctcagcatcctgggctttctgcaggagcactgggatgttgtctttgccacctacaattccaacatcagcttcctcctgtgtctcatgcattgccttttgctactcaatgagagaagttacccagaaggatttggattggagcccaagcctagaatgtctacttatcatcaagtcttcctttccccaaatgaagacgtgaaagaaaaaagagaagacttaccaagtttgagtgatgtccaacacaacatccagaagacagtgcagactctctggcagcagctggtggcacaaaggcagcagaccctggaggatgccttcaagatcgatctctctgtgaaacctggagagagggaagtgaagattgaagaggtcacaccgctctgggaggagacgatgctcaaggcctggcagcattacttagcatctgagaagaagtcactggcaagtcgttcaaatgttgcacaccacagcaaagtcactttgtggagtggaagcctgtcctcagccatgaagctgatgcccgggcggcaggccaaggaccctgagtgcaagacagaggattttgtgtcatgtatagagaactacagaagaagaggacaagagctatatgcatctttatacaaagaccatgtgcaaaggcgaaaatgtggcaacatcaaggcagccaacgcctgggccaggatccaggagcagctttttggggagctgggcttgtggagccagggggaagaaaccaagccctgttccccatgggaactcgactggagagaaggaccagctcgaatgaggaaacgcatcaaacgcttgtctcctttggaggccctgagctcaggaaggcacaaggaaagccaagacaaaaatgatcatatttctcaaacaaatgctgaaaaccaagatgaactgacactgagggaggctgagggcgagccggacgaggtgggggtggactgcacccagctgaccttcttcccagccttacacgaaagtctgcactcagaagacttcttggaactgtgtcgggaaagacaagttattttacaagagcttcttgataaagaaaaggtgacgcagaagttctccctggtgattgtgcagggccacctggtgtcagaaggggtcctgctttttggccaccaacacttctacatctgcgagaacttcacactgtctcccacgggtgatgtctactgtacccgtcactgcttatccaacatcagcgatccgttcattttcaacctgtgcagcaaagacaggtccactgaccattactcgtgccagtgccacagctacgctgacatgcgggagctacggcaggctcgcttcctcctgcaggacatcgccctggagatcttcttccacaatggatattccaagtttcttgtcttctacaacaatgatcggagtaaggcctttaaaagcttctgctctttccaacccagcctgaaggggaaagccacctcggaggacaccctcagtctaaggagataccccggctctgacaggatcatgctgcagaagtggcagaaaagggacatcagcaattttgagtatctcatgtacctcaacaccgcggctgggagaacctgcaatgactacatgcagtacccagtgttcccctgggtcctcgcagactacacctcagagacattgaacttggcaaatccgaagattttccgggatctttcaaagcccatgggggctcagaccaaggaaaggaagctgaaatttatccagaggtttaaagaagttgagaaaactgaaggagacatgactgtccagtgccactactacacccactactcctcggccatcatcgtggcctcctacctggtccggatgccacccttcacccaggccttctgcgctctgcagggcggaagcttcgacgtggcagacagaatgttccacagtgtgaagagcacgtgggagtcggcctccagagagaacatgagtgacgtcagggagctgaccccagagttcttctacctgcctgagttcttaaccaactgcaacggggtagagttcggctgcatgcaggacgggactgtgctaggagacgtgcagctccctccctgggctgatggggaccctcggaaattcatcagcctgcacagaaaggccctggaaagtgactttgtcagtgccaacctccaccattggatagaccttatttttgggtacaagcagcaggggccagccgcagtggatgctgttaatatcttccacccctacttctacggtgacagaatggacctcagcagcatcactgaccccctcatcaaaagcaccatcctggggtttgtcagcaactttggacaggtgcccaaacagctctttaccaaacctcacccagccaggactgcagcagggaagcctctgcctggaaaggatgtctccacccccgtgagcctgcctggccacccacagccctttttctacagcctgcagtcgctgaggccctcccaggtcacggtcaaagatatgtacctcttttctctaggctcagagtcccccaaaggggccattggccacattgtctctactgagaagaccattctggctgtagagaggaacaaagtgctgctgcctcctctctggaacaggaccttcagctggggctttgatgacttcagctgctgcttggggagctacggctccgacaaggtcctgatgacattcgagaacctggctgcctggggccgctgtctgtgcgccgtgtgcccatccccaacaacgattgtcacctctgggaccagcactgtggtgtgtgtgtgggagctcagcatgaccaaaggccgcccgaggggcttgcgcctccggcaggccttgtatggacacacacaggctgtcacgtgcctggcagcgtcagtcaccttcagcctcctggtgagcggctcccaggactgcacctgtatcctgtgggatctggaccacctcacccacgtgacccgcctgcccgcccatcgggaaggcatctcagccatcaccatcagtgacgtctcaggcaccattgtctcctgtgcgggagcacacttgtccctgtggaatgtcaatggacagcccctggccagcatcaccacagcctggggcccagaaggagccataacctgctgctgcctgatggagggcccagcatgggacacaagccagatcatcatcaccgggagtcaagacggcatggtccgggtttggaagactgaggatgtgaagatgtctgttcctggacggccagcaggagaggagcccccggctcagcctccaagcccaagaggccacaagtgggagaagaacctggccttgagtcgagagctggacgttagcattgctttgacagggaagcccagcaaaaccagccccgcagtgactgctctggccgtgtccagaaaccacaccaaactcctggttggtgatgagagggggagaatattctgctggtctgcagatgggtaggaagagagaggcagcagaggctctggcacaacagtgccaggctgagggtggcagaggtgactggggcctgagctctgcctacagaagaaacccccagggcctccttccccacagttctcaaggaagggcctctggcaatcacagctctgcagcccaaccctctccatggccgatgggacttctatgaaaaggatgagcacacacactcggagggctgagcagcacgctggaaactgtgacttggtgatgcccagctgcacacgaaattacacatgactcaccttattaagggctattgcactgaaaaaaaaaaagatgggtcgcttactggaaattattgtattgtctttattttattaaagcaactatgttttaaatgca

SEQ ID NO: 34403 - DNA, 6996 bp, Homo sapiens
  source 1..6996: mol_type = unassigned DNA
gaagctcgcttcccaggccattgaaccggatgtgctaagacagtttctaggtcttggaattccctcatctctgtcggccacaacaaaaatccttgattcatctcacacacacagaggcaaccctgggtgctcagggtcacagactgcacagggcttggctgaggggccctggccagctgccccagatgctgggctgcaccctggagtcacacaggccccgcagcccttgggggaatcccaggattcaactactgctcttcagacggcgctgagcctcatctccatgacctccccacgcaacctgcagcctcagagggcagccctggccccatcgtttgtggaatttgacatgtccgtggaaggttatggctgtttgtttattccaaccctgtccacagttatgggaaccagcactgagtactctgtctctggaggaattgggacaggtgccaccagaccgttccctcctcctggaggtctgaccttctcctgctggttcctgatcagccggcatggagctgccactgagggccacccgctgcgcttcctgacgttggtgcgccacctggccaggactgagcaaccctttgtttgcttctccgtcagcctctgcccagacgacctctccttggttgtttctacagaagagaaggagtttcagcctctggatgtcatggaacctgaggatgactccgagccttctgcaggatgccagcttcaggtcaggtgtggccagctcctggcttgtggtcagtggcatcacttggctgtggttgtcactaaggaaatgaaaaggcattgtacagtttccacctgtctggatggacaggtcattggctctgccaagatgttatacatccaggctctaccagggcctttcctttctatggatccatccgcatttgtggatgtttatggatatattgctactcctcgagtctggaaacaaaagtcttcattaatctggcgtcttggccccacatacctctttgaagaagccatttcaatggaaactctggaagttattaacaaacttggcccaagatattgtggtaacttccaagctgtgcatgtccaaggggaggacctggacagtgaagccacgccctttgttgcagaagaaagagtttcttttggacttcacatagccagctcctctatcaccagtgtagcggacatcagaaatgcttacaatgaggtggacagccgcctgatcgccaaagagatgaacatttcatcccgtgacaatgccatgcccgtgttcttgctgaggaattgtgctggccacctgtcagggtctctgcggaccattggagctgttgctgtgggtcaattaggggtgagggtattccactccagccctgctgccagcagcctggacttcattggcgggcctgccatcctcctgggcctcatctccttagcgacagatgaccataccatgtatgcggctgtgaaagttctgcactcggtcctgaccagtaatgccatgtgtgacttcctgatgcaacacatctgtgggtaccagataatggcgtttctcctgaggaagaaggcctctctcctgaaccatcgaatttttcagctgatcctctcagtggctggcactgtggagctgggcttcaggtcatctgctatcaccaacactggtgtcttccagcacatcctctgcaatttcgagctctggatgaatactgcagacaatctggagctcagcctcttttcccatcttttggaaatccttcaatcaccaagggaaggacccaggaatgctgaagctgcccaccaggcacagcttatacccaagctcatcttcctattcaatgagccgagcctcatcccctccaagatctccaccatcattggcatcctggcctgtcagctgaggggccacttcagcacccaggacttgctcaggattgggctgtttgttgtgtacaccctcaagccttcgtcggtgaatgagaggcagatctgcatggacggagccctggacccttccctgcctgctggaagccaaacatctggaaagacaatctggctcagaaaccagttgctggagatgctgctcagtgtaatatcttccccccagcttcatctgtcctctgagtcaaaggaagagatgtttctgaaactggggcctgactggttcctgctgctcctgcagggccacctgcatgccagcaccactgtgctggcattgaagctgctgctgtactttctggcaagcccctccctccgcacacggtttagagatggcctgtgtgcaggatcctgggtggaacgcagcactgagggcgtggatattgtaatggacaacctgaagagccagtcaccactgcctgagcaaagcccatgcctgcttcctgggttccgtgtcttgaatgactttctggcccaccacgtccacattccagaggtctacctcatcgtctccaccttcttcctgcagacaccactcacagagctgatggacgggcccaaagacagccttgatgccatgcttcagtggctcctgcagaggcaccaccaggaagaagtcctccaggctgggctgtgcacagaaggtgccttgctcctcctggaaatgctgaaggccaccatgagccagcccctggcaggttctgaggatggtgcctgggcacagaccttcccggccagcgtgctgcagttcctcagcctcgtccaccgcacctacccccaggacccagcgtggcgagccccggagttcctccagaccttggccatagccgccttccccctgggagcccaaaagggggttggggctgagtccacccggaacaccagcagtcctgaggccgcagctgaaggcgacagcacagtggagggtctccaggctcccaccaaggcacatcccgcccggaggaagctgagggagttcacgcagctcctcttgagggagctcctgcttggagcctccagccccaagcagtggctgcccctggaggtgctcctggaggcttctccagaccacgccaccagccaacagaagcgagacttccagtccgaggtcctgctttctgctatggaactattccacatgacaagtggaggtgatgcagcgatgttcagagacggcaaagagcctcagccaagtgcagaagctgctgctgccccttctcttgccaacatctcctgcttcacccagaagctggtggagaagctgtacagtgggatgttctcggcagaccccaggcatatcctcctcttcatcctggagcacatcatggtggtcattgagactgcctcttctcaaagggacactgtcctcagcactttatacagcagtttaaataaagtcattctttattgcctatccaagccccagcagtccctctccgaatgcctcggccttctcagcatcctgggctttctgcaggagcactgggatgttgtctttgccacctacaattccaacatcagcttcctcctgtgtctcatgcattgccttttgctactcaatgagagaagttacccagaaggatttggattggagcccaagcctagaatgtctacttatcatcaagtcttcctttccccaaatgaagacgtgaaagaaaaaagagaagacttaccaagtttgagtgatgtccaacacaacatccagaagacagtgcagactctctggcagcagctggtggcacaaaggcagcagaccctggaggatgccttcaagatcgatctctctgtgaaacctggagagagggaagtgaagattgaagaggtcacaccgctctgggaggagacgatgctcaaggcctggcagcattacttagcatctgagaagaagtcactggcaagtcgttcaaatgttgcacaccacagcaaagtcactttgtggagtggaagcctgtcctcagccatgaagctgatgcccgggcggcaggccaaggaccctgagtgcaagacagaggattttgtgtcatgtatagagaactacagaagaagaggacaagagctatatgcatctttatacaaagaccatgtgcaaaggcgaaaatgtggcaacatcaaggcagccaacgcctgggccaggatccaggagcagctttttggggagctgggcttgtggagccagggggaagaaaccaagccctgttccccatgggaactcgactggagagaaggaccagctcgaatgaggaaacgcatcaaacgcttgtctcctttggaggccctgagctcaggaaggcacaaggaaagccaagacaaaaatgatcatatttctcaaacaaatgctgaaaaccaagatgaactgacactgagggaggctgagggcgagccggacgaggtgggggtggactgcacccagctgaccttcttcccagccttacacgaaagtctgcactcagaagacttcttggaactgtgtcgggaaagacaagttattttacaagagcttcttgataaagaaaaggtgacgcagaagttctccctggtgattgtgcagggccacctggtgtcagaaggggtcctgctttttggccaccaacacttctacatctgcgagaacttcacactgtctcccacgggtgatgtctactgtacccgtcactgcttatccaacatcagcgatccgttcattttcaacctgtgcagcaaagacaggtccactgaccattactcgtgccagtgccacagctacgctgacatgcgggagctacggcaggctcgcttcctcctgcaggacatcgccctggagatcttcttccacaatggatattccaagtttcttgtcttctacaacaatgatcggagtaaggcctttaaaagcttctgctctttccaacccagcctgaaggggaaagccacctcggaggacaccctcagtctaaggagataccccggctctgacaggatcatgctgcagaagtggcagaaaagggacatcagcaattttgagtatctcatgtacctcaacaccgcggctgggagaacctgcaatgactacatgcagtacccagtgttcccctgggtcctcgcagactacacctcagagacattgaacttggcaaatccgaagattttccgggatctttcaaagcccatgggggctcagaccaaggaaaggaagctgaaatttatccagaggtttaaagaagttgagaaaactgaaggagacatgactgtccagtgccactactacacccactactcctcggccatcatcgtggcctcctacctggtccggatgccacccttcacccaggccttctgcgctctgcagggcggaagcttcgacgtggcagacagaatgttccacagtgtgaagagcacgtgggagtcggcctccagagagaacatgagtgacgtcagggagctgaccccagagttcttctacctgcctgagttcttaaccaactgcaacggggtagagttcggctgcatgcaggacgggactgtgctaggagacgtgcagctccctccctgggctgatggggaccctcggaaattcatcagcctgcacagaaaggccctggaaagtgactttgtcagtgccaacctccaccattggatagaccttatttttgggtacaagcagcaggggccagccgcagtggatgctgttaatatcttccacccctacttctacggtgacagaatggacctcagcagcatcactgaccccctcatcaaaagcaccatcctggggtttgtcagcaactttggacaggtgcccaaacagctctttaccaaacctcacccagccaggactgcagcagggaagcctctgcctggaaaggatgtctccacccccgtgagcctgcctggccacccacagccctttttctacagcctgcagtcgctgaggccctcccaggtcacggtcaaagatatgtacctcttttctctaggctcagagtcccccaaaggggccattggccacattgtctctactgagaagaccattctggctgtagagaggaacaaagtgctgctgcctcctctctggaacaggaccttcagctggggctttgatgacttcagctgctgcttggggagctacggctccgacaaggtcctgatgacattcgagaacctggctgcctggggccgctgtctgtgcgccgtgtgcccatccccaacaacgattgtcacctctgggaccagcactgtggtgtgtgtgtgggagctcagcatgaccaaaggccgcccgaggggcttgcgcctccggcaggccttgtatggacacacacaggctgtcacgtgcctggcagcgtcagtcaccttcagcctcctggtgagcggctcccaggactgcacctgtatcctgtgggatctggaccacctcacccacgtgacccgcctgcccgcccatcgggaaggcatctcagccatcaccatcagtgacgtctcaggcaccattgtctcctgtgcgggagcacacttgtccctgtggaatgtcaatggacagcccctggccagcatcaccacagcctggggcccagaaggagccataacctgctgctgcctgatggagggcccagcatgggacacaagccagatcatcatcaccgggagtcaagacggcatggtccgggtttggaagactgaggatgtgaagatgtctgttcctggtctgcagatgggtaggaagagagaggcagcagaggctctggcacaacagtgccaggctgagggtggcagaggtgactggggcctgagctctgcctacagaagaaacccccagggcctccttccccacagttctcaaggaagggcctctggcaatcacagctctgcagcccaaccctctccatggccgatgggacttctatgaaaaggatgagcacacacactcggagggctgagcagcacgctggaaactgtgacttggtgatgcccagctgcacacgaaattacacatgactcaccttattaagggctattgcactgaaaaaaaaaaagatgggtcgcttactggaaattattgtattgtctttattttattaaagcaactatgttttaaatgca

SEQ ID NO: 34404 - DNA, 9962 bp, Homo sapiens
  source 1..9962: mol_type = unassigned DNA
ctgaattcagatctgctttgccacggcatggaggcagaagatctttcaaaggctgaagacagaaatgaagacccaggttccaaaaatgaagggcagcttgctgctgtgcagcctgatgtcccacatggagggcagtcctccagccccacagctctctgggacatgctggaaaggaagtttctggaataccagcagttgactcacaagagccccattgagcgtcagaagagcctgttgagtcttctccccctattcctaaaggcctgggaacactccgtggggatcatctgctttcccagtctccaaaggctggctgaagacgtgtctgaccagcttgcccagcaactccagaaggcccttgtggggaagcctgcggagcaagctcggttggcagctggacagttgctgtggtggaagggggacgtggatcaggatggctacttgctcctgaagtcagtgtacgtgctcacggggacagactcggagacgctgggcagggttgctgagtctgggcttccagccctgctcctacagtgcctttacctcttctttgtctttcctctggacaaagatgagcttcttgagagtgatcttcaagttcaaaagatgttcgtgcagatgttgctcaatatttgcagtgactctcagggcctggagggactcctctcaggaagtgagctgcagtctctgctgattgccacgacctgccttcgggagcacagctgctgcttctggaaggaacccaccttctgcgtgctaagggcaatctccaaggcccagaacctcagcatcatccagtacctgcaggccacagactgtgtcaggctctccctccagaacctctccaggctcacggacactctccctgcccctgaagtgagcgaggctgtaagcctgatcttgggattcgtgaaggactcctaccccgtctcctcggctctgttcctggagtttgagaattcagagggctatcctctgctgctcaaagtgttacttcggtatgatgggctgacccagagcgaagtggacccgcatctggaggagctccttgggctggtggtgtggctgacaacctgtgggaggtcagagctgaaggtgtttgacagcatcacttaccctcagcttgaaggcttcaagttccatcatgaggcatctggggtgactgttaagaatcttcaggccttccaggtcctacagaatgttttccacaaagccagtgactctgtcctctgcatacaagtcttgtcagtcatcaggaccatgtgggcctggaatgctcgaaacttcttcctgctggagtggaccctgcagcccatctcgcagtttgtagagatcatgcccctgaagccggccccagtgcaggaacacttcttccagcttctagaggccctggtgttcgagctgcactacgtgcctcatgagatcctgcgaaaggtacagcatctgatcaaggagagccctgggccatcctgcaccctcatggccctgcagagcatcctcagcatcgctggtggggaccccctcttcaccgacatcttccgggactcagggctcctgggcctgctactggcacagcttcggaagcaagccaagatcatgaggaagtcaggaaacaaagtgtccactcctggtgttcaggatccagaaagagaactcacctgtgtgatgctgaggattgtagtcacacttctgaaaggctcggtgaggaatgcagttgtcctgaaggaccacggcatggtgcccttcatcaagatcttcctggatgacgagtgctaccgggaggcctcgctcagcatcttggagcagctctcagccatcaacgccgaggagtacatgagcatcattgtgggtgctctatgctcatccactcaaggggagctgcagctgaaactggatctcctgaagtctctgctccggatcctggtgacccccaagggtcgtgctgccttcagagtctccagcgggttcaacgggctgctgtctctgctctctgacctggaaggctccctccaggagcccccgctgcaggcatggggagcagtatcccccagacagaccctggagctggttttgtacactctctgtgctgtgtccgcagcgctgcactgggaccctgtcaatggctacttcttcaggaggaatgggctctttgagaagctggccgaggacctctgcctgctgggctgttttggagccctggaggaagagggcaacctgctgcgctcttgggtggacacaaaggccaggccatttgcagatttgctgggcactgccttttcctccagcggctcactcccaccccggatacagagctgcctccagatccttggctttctggacagcatggccagcggcaccctccacttgcgtggggacctgaaggagtccctgaggaccaagcaggggccggttgtggatgttcagaagggagaaactggcagtgacccccaacgcaacttcaagcagtggccagacctggaggagaggatggatgagggagatgctgcaatcatgcatcccggggtcgtgtgcatcatggtgaggctgctgcctcggttgtaccatgaagatcacccacagctttccgaggagatccagtgctccctggccagtcatatccagtccctggtgaagtcggagaagaaccgccaggtcatgtgcgaagcaggcttgcttgggaccctcatggcctcctgccacagggccctggtcaccagtggcagccccctccactcacgcctcatcaggatctttgagaagctcgcttcccaggccattgaaccggatgtgctaagacagtttctaggtcttggaattccctcatctctgtcggccacaacaaaaatccttgattcatctcacacacacagaggcaaccctgggtgctcagggtcacagactgcacagggcttggctgaggggccctggccagctgccccagatgctgggctgcaccctggagtcacacaggccccgcagcccttgggggaatcccaggattcaactactgctcttcagacggcgctgagcctcatctccatgacctccccacgcaacctgcagcctcagagggcagccctggccccatcgtttgtggaatttgacatgtccgtggaaggttatggctgtttgtttattccaaccctgtccacagttatgggaaccagcactgagtactctgtctctggaggaattgggacaggtgccaccagaccgttccctcctcctggaggtctgaccttctcctgctggttcctgatcagccggcatggagctgccactgagggccacccgctgcgcttcctgacgttggtgcgccacctggccaggactgagcaaccctttgtttgcttctccgtcagcctctgcccagacgacctctccttggttgtttctacagaagagaaggagtttcagcctctggatgtcatggaacctgaggatgactccgagccttctgcaggatgccagcttcaggtcaggtgtggccagctcctggcttgtggtcagtggcatcacttggctgtggttgtcactaaggaaatgaaaaggcattgtacagtttccacctgtctggatggacaggtcattggctctgccaagatgttatacatccaggctctaccagggcctttcctttctatggatccatccgcatttgtggatgtttatggatatattgctactcctcgagtctggaaacaaaagtcttcattaatctggcgtcttggccccacatacctctttgaagaagccatttcaatggaaactctggaagttattaacaaacttggcccaagatattgtggtaacttccaagctgtgcatgtccaaggggaggacctggacagtgaagccacgccctttgttgcagaagaaagagtttcttttggacttcacatagccagctcctctatcaccagtgtagcggacatcagaaatgcttacaatgaggtggacagccgcctgatcgccaaagagatgaacatttcatcccgtgacaatgccatgcccgtgttcttgctgaggaattgtgctggccacctgtcagggtctctgcggaccattggagctgttgctgtgggtcaattaggggtgagggtattccactccagccctgctgccagcagcctggacttcattggcgggcctgccatcctcctgggcctcatctccttagcgacagatgaccataccatgtatgcggctgtgaaagttctgcactcggtcctgaccagtaatgccatgtgtgacttcctgatgcaacacatctgtgggtaccagataatggcgtttctcctgaggaagaaggcctctctcctgaaccatcgaatttttcagctgatcctctcagtggctggcactgtggagctgggcttcaggtcatctgctatcaccaacactggtgtcttccagcacatcctctgcaatttcgagctctggatgaatactgcagacaatctggagctcagcctcttttcccatcttttggaaatccttcaatcaccaagggaaggacccaggaatgctgaagctgcccaccaggcacagcttatacccaagctcatcttcctattcaatgagccgagcctcatcccctccaagatctccaccatcattggcatcctggcctgtcagctgaggggccacttcagcacccaggacttgctcaggattgggctgtttgttgtgtacaccctcaagccttcgtcggtgaatgagaggcagatctgcatggacggagccctggacccttccctgcctgctggaagccaaacatctggaaagacaatctggctcagaaaccagttgctggagatgctgctcagtgtaatatcttccccccagcttcatctgtcctctgagtcaaaggaagagatgtttctgaaactggggcctgactggttcctgctgctcctgcagggccacctgcatgccagcaccactgtgctggcattgaagctgctgctgtactttctggcaagcccctccctccgcacacggtttagagatggcctgtgtgcaggatcctgggtggaacgcagcactgagggcgtggatattgtaatggacaacctgaagagccagtcaccactgcctgagcaaagcccatgcctgcttcctgggttccgtgtcttgaatgactttctggcccaccacgtccacattccagaggtctacctcatcgtctccaccttcttcctgcagacaccactcacagagctgatggacgggcccaaagacagccttgatgccatgcttcagtggctcctgcagaggcaccaccaggaagaagtcctccaggctgggctgtgcacagaaggtgccttgctcctcctggaaatgctgaaggccaccatgagccagcccctggcaggttctgaggatggtgcctgggcacagaccttcccggccagcgtgctgcagttcctcagcctcgtccaccgcacctacccccaggacccagcgtggcgagccccggagttcctccagaccttggccatagccgccttccccctgggagcccaaaagggggttggggctgagtccacccggaacaccagcagtcctgaggccgcagctgaaggcgacagcacagtggagggtctccaggctcccaccaaggcacatcccgcccggaggaagctgagggagttcacgcagctcctcttgagggagctcctgcttggagcctccagccccaagcagtggctgcccctggaggtgctcctggaggcttctccagaccacgccaccagccaacagaagcgagacttccagtccgaggtcctgctttctgctatggaactattccacatgacaagtggaggtgatgcagcgatgttcagagacggcaaagagcctcagccaagtgcagaagctgctgctgccccttctcttgccaacatctcctgcttcacccagaagctggtggagaagctgtacagtgggatgttctcggcagaccccaggcatatcctcctcttcatcctggagcacatcatggtggtcattgagactgcctcttctcaaagggacactgtcctcagcactttatacagcagtttaaataaagtcattctttattgcctatccaagccccagcagtccctctccgaatgcctcggccttctcagcatcctgggctttctgcaggagcactgggatgttgtctttgccacctacaattccaacatcagcttcctcctgtgtctcatgcattgccttttgctactcaatgagagaagttacccagaaggatttggattggagcccaagcctagaatgtctacttatcatcaagtcttcctttccccaaatgaagacgtgaaagaaaaaagagaagacttaccaagtttgagtgatgtccaacacaacatccagaagacagtgcagactctctggcagcagctggtggcacaaaggcagcagaccctggaggatgccttcaagatcgatctctctgtgaaacctggagagagggaagtgaagattgaagaggtcacaccgctctgggaggagacgatgctcaaggcctggcagcattacttagcatctgagaagaagtcactggcaagtcgttcaaatgttgcacaccacagcaaagtcactttgtggagtggaagcctgtcctcagccatgaagctgatgcccgggcggcaggccaaggaccctgagtgcaagacagaggattttgtgtcatgtatagagaactacagaagaagaggacaagagctatatgcatctttatacaaagaccatgtgcaaaggcgaaaatgtggcaacatcaaggcagccaacgcctgggccaggatccaggagcagctttttggggagctgggcttgtggagccagggggaagaaaccaagccctgttccccatgggaactcgactggagagaaggaccagctcgaatgaggaaacgcatcaaacgcttgtctcctttggaggccctgagctcaggaaggcacaaggaaagccaagacaaaaatgatcatatttctcaaacaaatgctgaaaaccaagatgaactgacactgagggaggctgagggcgagccggacgaggtgggggtggactgcacccagctgaccttcttcccagccttacacgaaagtctgcactcagaagacttcttggaactgtgtcgggaaagacaagttattttacaagagcttcttgataaagaaaaggtgacgcagaagttctccctggtgattgtgcagggccacctggtgtcagaaggggtcctgctttttggccaccaacacttctacatctgcgagaacttcacactgtctcccacgggtgatgtctactgtacccgtcactgcttatccaacatcagcgatccgttcattttcaacctgtgcagcaaagacaggtccactgaccattactcgtgccagtgccacagctacgctgacatgcgggagctacggcaggctcgcttcctcctgcaggacatcgccctggagatcttcttccacaatggatattccaagtttcttgtcttctacaacaatgatcggagtaaggcctttaaaagcttctgctctttccaacccagcctgaaggggaaagccacctcggaggacaccctcagtctaaggagataccccggctctgacaggatcatgctgcagaagtggcagaaaagggacatcagcaattttgagtatctcatgtacctcaacaccgcggctgggagaacctgcaatgactacatgcagtacccagtgttcccctgggtcctcgcagactacacctcagagacattgaacttggcaaatccgaagattttccgggatctttcaaagcccatgggggctcagaccaaggaaaggaagctgaaatttatccagaggtttaaagaagttgagaaaactgaaggagacatgactgtccagtgccactactacacccactactcctcggccatcatcgtggcctcctacctggtccggatgccacccttcacccaggccttctgcgctctgcagggcggaagcttcgacgtggcagacagaatgttccacagtgtgaagagcacgtgggagtcggcctccagagagaacatgagtgacgtcagggagctgaccccagagttcttctacctgcctgagttcttaaccaactgcaacggggtagagttcggctgcatgcaggacgggactgtgctaggagacgtgcagctccctccctgggctgatggggaccctcggaaattcatcagcctgcacagaaaggccctggaaagtgactttgtcagtgccaacctccaccattggatagaccttatttttgggtacaagcagcaggggccagccgcagtggatgctgttaatatcttccacccctacttctacggtgacagaatggacctcagcagcatcactgaccccctcatcaaaagcaccatcctggggtttgtcagcaactttggacaggtgcccaaacagctctttaccaaacctcacccagccaggactgcagcagggaagcctctgcctggaaaggatgtctccacccccgtgagcctgcctggccacccacagccctttttctacagcctgcagtcgctgaggccctcccaggtcacggtcaaagatatgtacctcttttctctaggctcagagtcccccaaaggggccattggccacattgtctctactgagaagaccattctggctgtagagaggaacaaagtgctgctgcctcctctctggaacaggaccttcagctggggctttgatgacttcagctgctgcttggggagctacggctccgacaaggtcctgatgacattcgagaacctggctgcctggggccgctgtctgtgcgccgtgtgcccatccccaacaacgattgtcacctctgggaccagcactgtggtgtgtgtgtgggagctcagcatgaccaaaggccgcccgaggggcttgcgcctccggcaggccttgtatggacacacacaggctgtcacgtgcctggcagcgtcagtcaccttcagcctcctggtgagcggctcccaggactgcacctgtatcctgtgggatctggaccacctcacccacgtgacccgcctgcccgcccatcgggaaggcatctcagccatcaccatcagtgacgtctcaggcaccattgtctcctgtgcgggagcacacttgtccctgtggaatgtcaatggacagcccctggccagcatcaccacagcctggggcccagaaggagccataacctgctgctgcctgatggagggcccagcatgggacacaagccagatcatcatcaccgggagtcaagacggcatggtccgggtttggaagactgaggatgtgaagatgtctgttcctggacggccagcaggagaggagcccccggctcagcctccaagcccaagaggccacaagtgggagaagaacctggccttgagtcgagagctggacgttagcattgctttgacagggaagcccagcaaaaccagccccgcagtgactgctctggccgtgtccagaaaccacaccaaactcctggttggtgatgagagggggagaatattctgctggtctgcagatgggtaggaagagagaggcagcagaggctctggcacaacagtgccaggctgagggtggcagaggtgactggggcctgagctctgcctacagaagaaacccccagggcctccttccccacagttctcaaggaagggcctctggcaatcacagctctgcagcccaaccctctccatggccgatgggacttctatgaaaaggatgagcacacacactcggagggctgagcagcacgctggaaactgtgacttggtgatgcccagctgcacacgaaattacacatgactcaccttattaagggctattgcactgaaaaaaaaaaagatgggtcgcttactggaaattattgtattgtctttattttattaaagcaactatgttttaaatgc

SEQ ID NO: 34405 - DNA, 2193 bp, Homo sapiens
  source 1..2193: mol_type = unassigned DNA
gtgaaacggcgctgaggactgacgatgtggggccgggtcctcttcccccgagcctgaggggctgcagctggggatagggggcccatgccttctgatgtctacaggcgctgacggccacccctccagatctgctttgccacggcatggaggcagaagatctttcaaaggctgaagacagaaatgaagacccaggttccaaaaatgaagggcagcttgctgctgtgcagcctgatgtcccacatggagggcagtcctccagccccacagctctctgggacatgctggaaaggaagtttctggaataccagcagttgactcacaagagccccattgagcgtcagaagagcctgttgagtcttctccccctattcctaaaggcctgggaacactccgtggggatcatctgctttcccagtctccaaaggctggctgaagacgtgtctgaccagcttgcccagcaactccagaaggcccttgtggggaagcctgcggagcaagctcggttggcagctggacagttgctgtggtggaagggggacgtggatcaggatggctacttgctcctgaagtcagtgtacgtgctcacggggacagactcggagacgctgggcagggttgctgagtctgggcttccagccctgctcctacagtgcctttacctcttctttgtctttcctctggacaaagatgagcttcttgagagtgatcttcaagttcaaaagatgttcgtgcagatgttgctcaatatttgcagtgactctcagggcctggagggactcctctcaggaagtgagctgcagtctctgctgattgccacgacctgccttcgggagcacagctgctgcttctggaaggaacccaccttctgcgtgctaagggcaatctccaaggcccagaacctcagcatcatccagtacctgcaggccacagactgtgtcaggctctccctccagaacctctccaggctcacggacactctccctgcccctgaagtgagcgaggctgtaagcctgatcttgggattcgtgaaggactcctaccccgtctcctcggctctgttcctggagtttgagaattcagagggctatcctctgctgctcaaagtgttacttcggtatgatgggctgacccagagcgaagtggacccgcatctggaggagctccttgggctggtggtgtggctgacaacctgtgggaggtcagagctgaaggtgtttgacagcatcacttaccctcagcttgaaggcttcaagttccatcatgaggcatctggggtgactgttaagaatcttcaggccttccaggtcctacagaatgttttccacaaagccagtgactctgtcctctgcatacaagtcttgtcagtcatcaggaccatgtgggcctggaatgctcgaaacttcttcctgctggagtggaccctgcagcccatctcgcagtttgtagagatcatgcccctgaagccggccccagtgcaggaacacttcttccagcttctagaggccctggtgttcgagctgcactacgtgcctcatgagatcctgcgaaaggtacagcatctgatcaaggagagccctgggccatcctgcaccctcatggccctgcagagcatcctcagcatcgctggtggggaccccctcttcaccgacatcttccgggactcagggctcctgggcctgctactggcacagcttcggaagcaagccaagatcatgaggaagtcaggaaacaaagtgtccactcctggtgttcaggatccagaaagagaactcacctgtgtgatgctgaggattgtagtcacacttctgaaaggctcggtgaggaatgcagttgtcctgaaggaccacggcatggtgcccttcatcaagatcttcctggatgacgagtgctaccgggaggcctcgctcagcatcttggagcagctctcagccatcaacgccgaggagtacatgagcatcattgtgggtgctctatgctcatccactcaaggggagctgcagctgaaactggatctcctgaaggtgatttcaagtcctcctttgagattggcttccctgtggatatgcaccaagcgatccacatttgctcaggcatttgtattcatgtaattcagttagccactgtatgtggcaggcagtaccctgtattaggtagcgtcaggtgctgtaacaaataaatcccatatcctcagta

SEQ ID NO: 34406 - DNA, 2609 bp, Homo sapiens
  source 1..2609: mol_type = unassigned DNA
agatgacactgtggtttgggctgaagaatgtgttgcctgcgcaaattggctctggatgaatactgcagacaatctggagctcagcctcttttcccatcttttggaaatccttcaatcaccaagggaaggacccaggaatgctgaagctgcccaccaggcacagcttatacccaagctcatcttcctattcaatgagccgagcctcatcccctccaagatctccaccatcattggcatcctggcctgtcagctgaggggccacttcagcacccaggacttgctcaggattgggctgtttgttgtgtacaccctcaagccttcgtcggtgaatgagaggcagatctgcatggacggagccctggacccttccctgcctgctggaagccaaacatctggaaagacaatctggctcagaaaccagttgctggagatgctgctcagtgtaatatcttccccccagcttcatctgtcctctgagtcaaaggaagagatgtttctgaaactggggcctgactggttcctgctgctcctgcagggccacctgcatgccagcaccactgtgctggcattgaagctgctgctgtactttctggcaagcccctccctccgcacacggtttagagatggcctgtgtgcaggatcctgggtggaacgcagcactgagggcgtggatattgtaatggacaacctgaagagccagtcaccactgcctgagcaaagcccatgcctgcttcctgggttccgtgtcttgaatgactttctggcccaccacgtccacattccagaggtctacctcatcgtctccaccttcttcctgcagacaccactcacagagctgatggacgggcccaaagacagccttgatgccatgcttcagtggctcctgcagaggcaccaccaggaagaagtcctccaggctgggctgtgcacagaaggtgccttgctcctcctggaaatgctgaaggccaccatgagccagcccctggcaggttctgaggatggtgcctgggcacagaccttcccggccagcgtgctgcagttcctcagcctcgtccaccgcacctacccccaggacccagcgtggcgagccccggagttcctccagaccttggccatagccgccttccccctgggagcccaaaagggggttggggctgagtccacccggaacaccagcagtcctgaggccgcagctgaaggcgacagcacagtggagggtctccaggctcccaccaaggcacatcccgcccggaggaagctgagggagttcacgcagctcctcttgagggagctcctgcttggagcctccagccccaagcagtggctgcccctggaggtgctcctggaggcttctccagaccacgccaccagccaacagaagcgagacttccagtccgaggtcctgctttctgctatggaactattccacatgacaagtggaggtgatgcagcgatgttcagagacggcaaagagcctcagccaagtgcagaagctgctgctgccccttctcttgccaacatctcctgcttcacccagaagctggtggagaagctgtacagtgggatgttctcggcagaccccaggcatatcctcctcttcatcctggagcacatcatggtgatctcagccccattacaagctagagacttttcctgacaagcctccaggaaacctttgctcaaaccctccctgtgatggggaaccccctaaaattcaagttgtcccacccagggggatgtctgtgattcttggaaagaactttctgttatcaagctgggatctacctccagcaactcctgccagcagtcctggttatgccctctgcagcagaattaggaggaccactctccttcctcttcacatctcatagagagtgaaattggctcccagcacccttctgactgcagagtcacccacagacctcaggactgggcctcttcacagtttctagagccatcttcacttgtctgatgagcaggtccaagcaaacctggaaagacttgaattcaaaggcttcttcaggaacaactccaagagaggagaaatagcccttgtcagctctgtgagggttaaaatcagattcctggcaagttgtgttgtaaatggaaagaagctgctgagctccctatggctaaagcatggactcccagctaatatcccaaacataggtgccagtgggggccaccgtgctttcagggggaccaggcctgagggctcggctccccacatatccaccagcctcctctcttgcttgctgtctgtgatgcctgcccctcttaacctctgtttgagacccatctgaggagcaggagaggaacatgataaagaaatgaatcccaaaccccaacaggtttaaacagaccttcacttcatgagtagaaacattgcgttacctgtgaaattctaagggagtagcctataacaaattcattttctatcggactgaaaaactttgtgcatactctttgtattatggattcttttcatggaagccaaacagatgtttggagatgtatggaccagtccatgctaaggctacaaatcagggtcttctacttctccctctaagtttcttttgaattaaaatcttctggactccgtctccagt

SEQ ID NO: 34407 - DNA, 8253 bp, Homo sapiens
  source 1..8253: mol_type = unassigned DNA
ctgaattcagatctgctttgccacggcatggaggcagaagatctttcaaaggctgaagacagaaatgaagacccaggttccaaaaatgaagggcagcttgctgctgtgcagcctgatgtcccacatggagggcagtcctccagccccacagctctctgggacatgctggaaaggaagtttctggaataccagcagttgactcacaagagccccattgagcgtcagaagagcctgttgagtcttctccccctattcctaaaggcctgggaacactccgtggggatcatctgctttcccagtctccaaaggctggctgaagacgtgtctgaccagcttgcccagcaactccagaaggcccttgtggggaagcctgcggagcaagctcggttggcagctggacagttgctgtggtggaagggggacgtggatcaggatggctacttgctcctgaagtcagtgtacgtgctcacggggacagactcggagacgctgggcagggttgctgagtctgggcttccagccctgctcctacagtgcctttacctcttctttgtctttcctctggacaaagatgagcttcttgagagtgatcttcaagttcaaaagatgttcgtgcagatgttgctcaatatttgcagtgactctcagggcctggagggactcctctcaggaagtgagctgcagtctctgctgattgccacgacctgccttcgggagcacagctgctgcttctggaaggaacccaccttctgcgtgctaagggcaatctccaaggcccagaacctcagcatcatccagtacctgcaggccacagactgtgtcaggctctccctccagaacctctccaggctcacggacactctccctgcccctgaagtgagcgaggctgtaagcctgatcttgggattcgtgaaggactcctaccccgtctcctcggctctgttcctggagtttgagaattcagagggctatcctctgctgctcaaagtgttacttcggtatgatgggctgacccagagcgaagtggacccgcatctggaggagctccttgggctggtggtgtggctgacaacctgtgggaggtcagagctgaaggtgtttgacagcatcacttaccctcagcttgaaggcttcaagttccatcatgaggcatctggggtgactgttaagaatcttcaggccttccaggtcctacagaatgttttccacaaagccagtgactctgtcctctgcatacaagtcttgtcagtcatcaggaccatgtgggcctggaatgctcgaaacttcttcctgctggagtggaccctgcagcccatctcgcagtttgtagagatcatgcccctgaagccggccccagtgcaggaacacttcttccagcttctagaggccctggtgttcgagctgcactacgtgcctcatgagatcctgcgaaaggtacagcatctgatcaaggagagccctgggccatcctgcaccctcatggccctgcagagcatcctcagcatcgctggtggggaccccctcttcaccgacatcttccgggactcagggctcctgggcctgctactggcacagcttcggaagcaagccaagatcatgaggaagtcaggaaacaaagtgtccactcctggtgttcaggatccagaaagagaactcacctgtgtgatgctgaggattgtagtcacacttctgaaaggctcggtgaggaatgcagttgtcctgaaggaccacggcatggtgcccttcatcaagatcttcctggatgacgagtgctaccgggaggcctcgctcagcatcttggagcagctctcagccatcaacgccgaggagtacatgagcatcattgtgggtgctctatgctcatccactcaaggggagctgcagctgaaactggatctcctgaagtctctgctccggatcctggtgacccccaagggtcgtgctgccttcagagtctccagcgggttcaacgggctgctgtctctgctctctgacctggaaggctccctccaggagcccccgctgcaggcatggggagcagtatcccccagacagaccctggagctggttttgtacactctctgtgctgtgtccgcagcgctgcactgggaccctgtcaatggctacttcttcaggaggaatgggctctttgagaagctggccgaggacctctgcctgctgggctgttttggagccctggaggaagagggcaacctgctgcgctcttgggtggacacaaaggccaggccatttgcagatttgctgggcactgccttttcctccagcggctcactcccaccccggatacagagctgcctccagatccttggctttctggacagcatggccagcggcaccctccacttgcgtggggacctgaaggagtccctgaggaccaagcaggggccggttgtggatgttcagaagggagaaactggcagtgacccccaacgcaacttcaagcagtggccagacctggaggagaggatggatgagggagatgctgcaatcatgcatcccggggtcgtgtgcatcatggtgaggctgctgcctcggttgtaccatgaagatcacccacagctttccgaggagatccagtgctccctggccagtcatatccagtccctggtgaagtcggagaagaaccgccaggtcatgtgcgaagcaggcttgcttgggaccctcatggcctcctgccacagggccctggtcaccagtggcagccccctccactcacgcctcatcaggatctttgagaagctcgcttcccaggccattgaaccggatgtgctaagacagtttctaggtcttggaattccctcatctctgtcggccacaacaaaaatccttgattcatctcacacacacagaggcaaccctgggtgctcagggtcacagactgcacagggcttggctgaggggccctggccagctgccccagatgctgggctgcaccctggagtcacacaggccccgcagcccttgggggaatcccaggattcaactactgctcttcagacggcgctgagcctcatctccatgacctccccacacatctggaagccaaacatctggaaagacaatctggctcagaaaccagttgctggagatgctgctcagtgtaatatcttccccccagcttcatctgtcctctgagtcaaaggaagagatgtttctgaaactggggcctgactggttcctgctgctcctgcagggccacctgcatgccagcaccactgtgctggcattgaagctgctgctgtactttctggcaagcccctccctccgcacacggtttagagatggcctgtgtgcaggatcctgggtggaacgcagcactgagggcgtggatattgtaatggacaacctgaagagccagtcaccactgcctgagcaaagcccatgcctgcttcctgggttccgtgtcttgaatgactttctggcccaccacgtccacattccagaggtctacctcatcgtctccaccttcttcctgcagacaccactcacagagctgatggacgggcccaaagacagccttgatgccatgcttcagtggctcctgcagaggcaccaccaggaagaagtcctccaggctgggctgtgcacagaaggtgccttgctcctcctggaaatgctgaaggccaccatgagccagcccctggcaggttctgaggatggtgcctgggcacagaccttcccggccagcgtgctgcagttcctcagcctcgtccaccgcacctacccccaggacccagcgtggcgagccccggagttcctccagaccttggccatagccgccttccccctgggagcccaaaagggggttggggctgagtccacccggaacaccagcagtcctgaggccgcagctgaaggcgacagcacagtggagggtctccaggctcccaccaaggcacatcccgcccggaggaagctgagggagttcacgcagctcctcttgagggagctcctgcttggagcctccagccccaagcagtggctgcccctggaggtgctcctggaggcttctccagaccacgccaccagccaacagaagcgagacttccagtccgaggtcctgctttctgctatggaactattccacatgacaagtggaggtgatgcagcgatgttcagagacggcaaagagcctcagccaagtgcagaagctgctgctgccccttctcttgccaacatctcctgcttcacccagaagctggtggagaagctgtacagtgggatgttctcggcagaccccaggcatatcctcctcttcatcctggagcacatcatggtggtcattgagactgcctcttctcaaagggacactgtcctcagcactttatacagcagtttaaataaagtcattctttattgcctatccaagccccagcagtccctctccgaatgcctcggccttctcagcatcctgggctttctgcaggagcactgggatgttgtctttgccacctacaattccaacatcagcttcctcctgtgtctcatgcattgccttttgctactcaatgagagaagttacccagaaggatttggattggagcccaagcctagaatgtctacttatcatcaagtcttcctttccccaaatgaagacgtgaaagaaaaaagagaagacttaccaagtttgagtgatgtccaacacaacatccagaagacagtgcagactctctggcagcagctggtggcacaaaggcagcagaccctggaggatgccttcaagatcgatctctctgtgaaacctggagagagggaagtgaagattgaagaggtcacaccgctctgggaggagacgatgctcaaggcctggcagcattacttagcatctgagaagaagtcactggcaagtcgttcaaatgttgcacaccacagcaaagtcactttgtggagtggaagcctgtcctcagccatgaagctgatgcccgggcggcaggccaaggaccctgagtgcaagacagaggattttgtgtcatgtatagagaactacagaagaagaggacaagagctatatgcatctttatacaaagaccatgtgcaaaggcgaaaatgtggcaacatcaaggcagccaacgcctgggccaggatccaggagcagctttttggggagctgggcttgtggagccagggggaagaaaccaagccctgttccccatgggaactcgactggagagaaggaccagctcgaatgaggaaacgcatcaaacgcttgtctcctttggaggccctgagctcaggaaggcacaaggaaagccaagacaaaaatgatcatatttctcaaacaaatgctgaaaaccaagatgaactgacactgagggaggctgagggcgagccggacgaggtgggggtggactgcacccagctgaccttcttcccagccttacacgaaagtctgcactcagaagacttcttggaactgtgtcgggaaagacaagttattttacaagagcttcttgataaagaaaaggtgacgcagaagttctccctggtgattgtgcagggccacctggtgtcagaaggggtcctgctttttggccaccaacacttctacatctgcgagaacttcacactgtctcccacgggtgatgtctactgtacccgtcactgcttatccaacatcagcgatccgttcattttcaacctgtgcagcaaagacaggtccactgaccattactcgtgccagtgccacagctacgctgacatgcgggagctacggcaggctcgcttcctcctgcaggacatcgccctggagatcttcttccacaatggatattccaagtttcttgtcttctacaacaatgatcggagtaaggcctttaaaagcttctgctctttccaacccagcctgaaggggaaagccacctcggaggacaccctcagtctaaggagataccccggctctgacaggatcatgctgcagaagtggcagaaaagggacatcagcaattttgagtatctcatgtacctcaacaccgcggctgggagaacctgcaatgactacatgcagtacccagtgttcccctgggtcctcgcagactacacctcagagacattgaacttggcaaatccgaagattttccgggatctttcaaagcccatgggggctcagaccaaggaaaggaagctgaaatttatccagaggtttaaagaagttgagaaaactgaaggagacatgactgtccagtgccactactacacccactactcctcggccatcatcgtggcctcctacctggtccggatgccacccttcacccaggccttctgcgctctgcagggcggaagcttcgacgtggcagacagaatgttccacagtgtgaagagcacgtgggagtcggcctccagagagaacatgagtgacgtcagggagctgaccccagagttcttctacctgcctgagttcttaaccaactgcaacggggtagagttcggctgcatgcaggacgggactgtgctaggagacgtgcagctccctccctgggctgatggggaccctcggaaattcatcagcctgcacagaaaggccctggaaagtgactttgtcagtgccaacctccaccattggatagaccttatttttgggtacaagcagcaggggccagccgcagtggatgctgttaatatcttccacccctacttctacggtgacagaatggacctcagcagcatcactgaccccctcatcaaaagcaccatcctggggtttgtcagcaactttggacaggtgcccaaacagctctttaccaaacctcacccagccaggactgcagcagggaagcctctgcctggaaaggatgtctccacccccgtgagcctgcctggccacccacagccctttttctacagcctgcagtcgctgaggccctcccaggtcacggtcaaagatatgtacctcttttctctaggctcagagtcccccaaaggggccattggccacattgtctctactgagaagaccattctggctgtagagaggaacaaagtgctgctgcctcctctctggaacaggaccttcagctggggctttgatgacttcagctgctgcttggggagctacggctccgacaaggtcctgatgacattcgagaacctggctgcctggggccgctgtctgtgcgccgtgtgcccatccccaacaacgattgtcacctctgggaccagcactgtggtgtgtgtgtgggagctcagcatgaccaaaggccgcccgaggggcttgcgcctccggcaggccttgtatggacacacacaggctgtcacgtgcctggcagcgtcagtcaccttcagcctcctggtgagcggctcccaggactgcacctgtatcctgtgggatctggaccacctcacccacgtgacccgcctgcccgcccatcgggaaggcatctcagccatcaccatcagtgacgtctcaggcaccattgtctcctgtgcgggagcacacttgtccctgtggaatgtcaatggacagcccctggccagcatcaccacagcctggggcccagaaggagccataacctgctgctgcctgatggagggcccagcatgggacacaagccagatcatcatcaccgggagtcaagacggcatggtccgggtttggaagactgaggatgtgaagatgtctgttcctggacggccagcaggagaggagcccccggctcagcctccaagcccaagaggccacaagtgggagaagaacctggccttgagtcgagagctggacgttagcattgctttgacagggaagcccagcaaaaccagccccgcagtgactgctctggccgtgtccagaaaccacaccaaactcctggttggtgatgagagggggagaatattctgctggtctgcagatgggtaggaagagagaggcagcagaggctctggcacaacagtgccaggctgagggtggcagaggtgactggggcctgagctctgcctacagaagaaacccccagggcctccttccccacagttctcaaggaagggcctctggcaatcacagctctgcagcccaaccctctccatggccgatgggacttctatgaaaaggatgagcacacacactcggagggctgagcagcacgctggaaactgtgacttggtgatgcccagctgcacacgaaattacacatgactcaccttattaagggctattgcactgaaaaaaaaaaagatgggtcgcttactggaaattattgtattgtctttattttattaaagcaactatgttttaaatgc

SEQ ID NO: 34408 - DNA, 9558 bp, Homo sapiens
  source 1..9558: mol_type = unassigned DNA
ctgaattcagatctgctttgccacggcatggaggcagaagatctttcaaaggctgaagacagaaatgaagacccaggttccaaaaatgaagggcagcttgctgctgtgcagcctgatgtcccacatggagggcagtcctccagccccacagctctctgggacatgctggaaaggaagtttctggaataccagcagttgactcacaagagccccattgagcgtcagaagagcctgttgagtcttctccccctattcctaaaggcctgggaacactccgtggggatcatctgctttcccagtctccaaaggctggctgaagacgtgtctgaccagcttgcccagcaactccagaaggcccttgtggggaagcctgcggagcaagctcggttggcagctggacagttgctgtggtggaagggggacgtggatcaggatggctacttgctcctgaagtcagtgtacgtgctcacggggacagactcggagacgctgggcagggttgctgagtctgggcttccagccctgctcctacagtgcctttacctcttctttgtctttcctctggacaaagatgagcttcttgagagtgatcttcaagttcaaaagatgttcgtgcagatgttgctcaatatttgcagtgactctcagggcctggagggactcctctcaggaagtgagctgcagtctctgctgattgccacgacctgccttcgggagcacagctgctgcttctggaaggaacccaccttctgcgtgctaagggcaatctccaaggcccagaacctcagcatcatccagtacctgcaggccacagactgtgtcaggctctccctccagaacctctccaggctcacggacactctccctgcccctgaagtgagcgaggctgtaagcctgatcttgggattcgtgaaggactcctaccccgtctcctcggctctgttcctggagtttgagaattcagagggctatcctctgctgctcaaagtgttacttcggtatgatgggctgacccagagcgaagtggacccgcatctggaggagctccttgggctggtggtgtggctgacaacctgtgggaggtcagagctgaaggtgtttgacagcatcacttaccctcagcttgaaggcttcaagttccatcatgaggcatctggggtgactgttaagaatcttcaggccttccaggtcctacagaatgttttccacaaagccagtgactctgtcctctgcatacaagtcttgtcagtcatcaggaccatgtgggcctggaatgctcgaaacttcttcctgctggagtggaccctgcagcccatctcgcagtttgtagagatcatgcccctgaagccggccccagtgcaggaacacttcttccagcttctagaggccctggtgttcgagctgcactacgtgcctcatgagatcctgcgaaaggtacagcatctgatcaaggagagccctgggccatcctgcaccctcatggccctgcagagcatcctcagcatcgctggtggggaccccctcttcaccgacatcttccgggactcagggctcctgggcctgctactggcacagcttcggaagcaagccaagatcatgaggaagtcaggaaacaaagtgtccactcctggtgttcaggatccagaaagagaactcacctgtgtgatgctgaggattgtagtcacacttctgaaaggctcggtgaggaatgcagttgtcctgaaggaccacggcatggtgcccttcatcaagatcttcctggatgacgagtgctaccgggaggcctcgctcagcatcttggagcagctctcagccatcaacgccgaggagtacatgagcatcattgtgggtgctctatgctcatccactcaaggggagctgcagctgaaactggatctcctgaagtctctgctccggatcctggtgacccccaagggtcgtgctgccttcagagtctccagcgggttcaacgggctgctgtctctgctctctgacctggaaggctccctccaggagcccccgctgcaggcatggggagcagtatcccccagacagaccctggagctggttttgtacactctctgtgctgtgtccgcagcgctgcactgggaccctgtcaatggctacttcttcaggaggaatgggctctttgagaagctggccgaggacctctgcctgctgggctgttttggagccctggaggaagagggcaacctgctgcgctcttgggtggacacaaaggccaggccatttgcagatttgctgggcactgccttttcctccagcggctcactcccaccccggatacagagctgcctccagatccttggctttctggacagcatggccagcggcaccctccacttgcgtggggacctgaaggagtccctgaggaccaagcaggggccggttgtggatgttcagaagggagaaactggcagtgacccccaacgcaacttcaagcagtggccagacctggaggagaggatggatgagggagatgctgcaatcatgcatcccggggtcgtgtgcatcatggtgaggctgctgcctcggttgtaccatgaagatcacccacagctttccgaggagatccagtgctccctggccagtcatatccagtccctggtgaagtcggagaagaaccgccaggtcatgtgcgaagcaggcttgcttgggaccctcatggcctcctgccacagggccctggtcaccagtggcagccccctccactcacgcctcatcaggatctttgagaagctcgcttcccaggccattgaaccggatgtgctaagacagtttctaggtcttggaattccctcatctctgtcggccacaacaaaaatccttgattcatctcacacacacagaggcaaccctgggtgctcagggtcacagactgcacagggcttggctgaggggccctggccagctgccccagatgctgggctgcaccctggagtcacacaggccccgcagcccttgggggaatcccaggattcaactactgctcttcagacggcgctgagcctcatctccatgacctccccacgcaacctgcagcctcagagggcagccctggccccatcgtttgtggaatttgacatgtccgtggaaggttatggctgtttgtttattccaaccctgtccacagttatgggaaccagcactgagtactctgtctctggaggaattgggacaggtgccaccagaccgttccctcctcctggaggtctgaccttctcctgctggttcctgatcagccggcatggagctgccactgagggccacccgctgcgcttcctgacgttggtgcgccacctggccaggactgagcaaccctttgtttgcttctccgtcagcctctgcccagacgacctctccttggttgtttctacagaagagaaggagtttcagcctctggatgtcatggaacctgaggatgactccgagccttctgcaggatgccagcttcaggtcaggtgtggccagctcctggcttgtggtcagtggcatcacttggctgtggttgtcactaaggaaatgaaaaggcattgtacagtttccacctgtctggatggacaggtcattggctctgccaagatgttatacatccaggctctaccagggcctttcctttctatggatccatccgcatttgtggatgtttatggatatattgctactcctcgagtctggaaacaaaagtcttcattaatctggcgtcttggccccacatacctctttgaagaagccatttcaatggaaactctggaagttattaacaaacttggcccaagatattgtggtaacttccaagctgtgcatgtccaaggggaggacctggacagtgaagccacgccctttgttgcagaagaaagagtttcttttggacttcacatagccagctcctctatcaccagtgtagcggacatcagaaatgcttacaatgaggtggacagccgcctgatcgccaaagagatgaacatttcatcccgtgacaatgccatgcccgtgttcttgctgaggaattgtgctggccacctgtcagggtctctgcggaccattggagctgttgctgtgggtcaattaggggtgagggtattccactccagccctgctgccagcagcctggacttcattggcgggcctgccatcctcctgggcctcatctccttagcgacagatgaccataccatgtatgcggctgtgaaagttctgcactcggtcctgaccagtaatgccatgtgtgacttcctgatgcaacacatctgtgggtaccagataatggcgtttctcctgaggaagaaggcctctctcctgaaccatcgaatttttcagctgatcctctcagtggctggcactgtggagctgggcttcaggtcatctgctatcaccaacactggtgtcttccagcacatcctctgcaatttcgagctctggatgaatactgcagacaatctggagctcagcctcttttcccatcttttggaaatccttcaatcaccaagggaaggacccaggaatgctgaagctgcccaccaggcacagcttatacccaagctcatcttcctattcaatgagccgagcctcatcccctccaagatctccaccatcattggcatcctggcctgtcagctgaggggccacttcagcacccaggacttgctcaggattgggctgtttgttgtgtacaccctcaagccttcgtcggtgaatgagaggcagatctgcatggacggagccctggacccttccctgcctgctggaagccaaacatctggaaagacaatctggctcagaaaccagttgctggagatgctgctcagtgtaatatcttccccccagcttcatctgtcctctgagtcaaaggaagagatgtttctgaaactggggcctgactggttcctgctgctcctgcagggccacctgcatgccagcaccactgtgctggcattgaagctgctgctgtactttctggcaagcccctccctccgcacacggtttagagatggcctgtgtgcaggatcctgggtggaacgcagcactgagggcgtggatattgtaatggacaacctgaagagccagtcaccactgcctgagcaaagcccatgcctgcttcctgggttccgtgtcttgaatgactttctggcccaccacgtccacattccagaggtctacctcatcgtctccaccttcttcctgcagacaccactcacagagctgatggacgggcccaaagacagccttgatgccatgcttcagtggctcctgcagaggcaccaccaggaagaagtcctccaggctgggctgtgcacagaaggtgccttgctcctcctggaaatgctgaaggccaccatgagccagcccctggcaggttctgaggatggtgcctgggcacagaccttcccggccagcgtgctgcagttcctcagcctcgtccaccgcacctacccccaggacccagcgtggcgagccccggagttcctccagaccttggccatagccgccttccccctgggagcccaaaagggggttggggctgagtccacccggaacaccagcagtcctgaggccgcagctgaaggcgacagcacagtggagggtctccaggctcccaccaaggcacatcccgcccggaggaagctgagggagttcacgcagctcctcttgagggagctcctgcttggagcctccagccccaagcagtggctgcccctggaggtgctcctggaggcttctccagaccacgccaccagccaacagaagcgagacttccagtccgaggtcctgctttctgctatggaactattccacatgacaagtggaggtgatgcagcgatgttcagagacggcaaagagcctcagccaagtgcagaagctgctgctgccccttctcttgccaacatctcctgcttcacccagaagctggtggagaagctgtacagtgggatgttctcggcagaccccaggcatatcctcctcttcatcctggagcacatcatggtggtcattgagactgcctcttctcaaagggacactgtcctcagcactttatacagcagtttaaataaagtcattctttattgcctatccaagccccagcagtccctctccgaatgcctcggccttctcagcatcctgggctttctgcaggagcactgggatgttgtctttgccacctacaattccaacatcagcttcctcctgtgtctcatgcattgccttttgctactcaatgagagaagttacccagaaggatttggattggagcccaagcctagaatgtctacttatcatcaagtcttcctttccccaaatgaagacgtgaaagaaaaaagagaagacttaccaagtttgagtgatgtccaacacaacatccagaagacagtgcagactctctggcagcagctggtggcacaaaggcagcagaccctggaggatgccttcaagatcgatctctctgtgaaacctggagagagggaagtgaagattgaagaggtcacaccgctctgggaggagacgatgctcaaggcctggcagcattacttagcatctgagaagaagtcactggcaagtcgttcaaatgttgcacaccacagcaaagtcactttgtggagtggaagcctgtcctcagccatgaagctgatgcccgggcggcaggccaaggaccctgagtgcaagacagaggattttgtgtcatgtatagagaactacagaagaagaggacaagagctatatgcatctttatacaaagaccatgtgcaaaggcgaaaatgtggcaacatcaaggcagccaacgcctgggccaggatccaggagcagctttttggggagctgggcttgtggagccagggggaagaaaccaagccctgttccccatgggaactcgactggagagaaggaccagctcgaatgaggaaacgcatcaaacgcttgtctcctttggaggccctgagctcaggaaggcacaaggaaagccaagacaaaaatgatcatatttctcaaacaaatgctgaaaaccaagatgaactgacactgagggaggctgagggcgagccggacgaggtgggggtggactgcacccagctgaccttcttcccagccttacacgaaagtctgcactcagaagacttcttggaactgtgtcgggaaagacaagttattttacaagagcttcttgataaagaaaaggtgacgcagaagttctccctggtgattgtgcagggccacctggtgtcagaaggggtcctgctttttggccaccaacacttctacatctgcgagaacttcacactgtctcccacgggtgatgtctactgtacccgtcactgcttatccaacatcagcgatccgttcattttcaacctgtgcagcaaagacaggtccactgaccattactcgtgccagtgccacagctacgctgacatgcgggagctacggcaggctcgcttcctcctgcaggacatcgccctggagatcttcttccacaatggatattccaagtttcttgtcttctacaacaatgatcggagtaaggcctttaaaagcttctgctctttccaacccagcctgaaggggaaagccacctcggaggacaccctcagtctaaggagataccccggctctgacaggatcatgctgcagaagtggcagaaaagggacatcagcaattttgagtatctcatgtacctcaacaccgcggctgggagaacctgcaatgactacatgcagtacccagtgttcccctgggtcctcgcagactacacctcagagacattgaacttggcaaatccgaagattttccgggatctttcaaagcccatgggggctcagaccaaggaaaggaagctgaaatttatccagaggtttaaagaagttgagaaaactgaaggagacatgactgtccagtgccactactacacccactactcctcggccatcatcgtggcctcctacctggtccggatgccacccttcacccaggccttctgcgctctgcagggcggaagcttcgacgtggcagacagaatgttccacagtgtgaagagcacgtgggagtcggcctccagagagaacatgagtgacgtcagggagctgaccccagagttcttctacctgcctgagttcttaaccaactgcaacggggtagagttcggctgcatgcaggacgggactgtgctaggagacgtgcagctccctccctgggctgatggggaccctcggaaattcatcagcctgcacagaaaggccctggaaagtgactttgtcagtgccaacctccaccattggatagaccttatttttgggtacaagcagcaggggccagccgcagtggatgctgttaatatcttccacccctacttctacggtgacagaatggacctcagcagcatcactgaccccctcatcaaaagcaccatcctggggtttgtcagcaactttggacaggtgcccaaacagctctttaccaaacctcacccagccaggactgcagcagggaagcctctgcctggaaaggatgtctccacccccgtgagcctgcctggccacccacagccctttttctacagcctgcagtcgctgaggccctcccaggtcacggtcaaagatatgtacctcttttctctaggctcagagtcccccaaaggggccattggccacattgtctctactgagaagaccattctggctgtagagaggaacaaagtgctgctgcctcctctctggaacaggaccttcagctggggctttgatgacttcagctgctgcttggggagctacggctccgacaaggtcctgatgacattcgagaacctggctgcctggggccgctgtctgtgcgccgtgtgcccatccccaacaacgattgtcacctctgggaccagcactgtggtgtgtgtgtgggagctcagcatgaccaaaggccgcccgaggggcttgcgcctccggcaggccttgtatggacacacacaggctgtcacgtgcctggcagcgtcagtcaccttcagcctcctggtgagcggctcccaggactgcacctgtatcctgtgggatctggaccacctcacccacgtgacccgcctgcccgcccatcgggaaggcatctcagccatcaccatcagtgacgtctcaggcaccattgtctcctgtgcgggagcacacttgtccctgtggaatgtcaatggacagcccctggccagcatcaccacagcctggggcccagaaggagccataacctgctgctgcctgatggagggcccagcatgggacacaagccagatcatcatcaccgggagtcaagacggcatggtccgggtttggaagactgaggatgtgaagatgtctgttcctggtctgcagatgggtaggaagagagaggcagcagaggctctggcacaacagtgccaggctgagggtggcagaggtgactggggcctgagctctgcctacagaagaaacccccagggcctccttccccacagttctcaaggaagggcctctggcaatcacagctctgcagcccaaccctctccatggccgatgggacttctatga

SEQ ID NO: 34409 - DNA, 3415 bp, Homo sapiens
  source 1..3415: mol_type = unassigned DNA
ctgaattcagatctgctttgccacggcatggaggcagaagatctttcaaaggctgaagacagaaatgaagacccaggttccaaaaatgaagggcagcttgctgctgtgcagcctgatgtcccacatggagggcagtcctccagccccacagctctctgggacatgctggaaaggaagtttctggaataccagcagttgactcacaagagccccattgagcgtcagaagagcctgttgagtcttctccccctattcctaaaggcctgggaacactccgtggggatcatctgctttcccagtctccaaaggctggctgaagacgtgtctgaccagcttgcccagcaactccagaaggcccttgtggggaagcctgcggagcaagctcggttggcagctggacagttgctgtggtggaagggggacgtggatcaggatggctacttgctcctgaagtcagtgtacgtgctcacggggacagactcggagacgctgggcagggttgctgagtctgggcttccagccctgctcctacagtgcctttacctcttctttgtctttcctctggacaaagatgagcttcttgagagtgatcttcaagttcaaaagatgttcgtgcagatgttgctcaatatttgcagtgactctcagggcctggagggactcctctcaggaagtgagctgcagtctctgctgattgccacgacctgccttcgggagcacagctgctgcttctggaaggaacccaccttctgcgtgctaagggcaatctccaaggcccagaacctcagcatcatccagtacctgcaggccacagactgtgtcaggctctccctccagaacctctccaggctcacggacactctccctgcccctgaagtgagcgaggctgtaagcctgatcttgggattcgtgaaggactcctaccccgtctcctcggctctgttcctggagtttgagaattcagagggctatcctctgctgctcaaagtgttacttcggtatgatgggctgacccagagcgaagtggacccgcatctggaggagctccttgggctggtggtgtggctgacaacctgtgggaggtcagagctgaaggtgtttgacagcatcacttaccctcagcttgaaggcttcaagttccatcatgaggcatctggggtgactgttaagaatcttcaggccttccaggtcctacagaatgttttccacaaagccagtgactctgtcctctgcatacaagtcttgtcagtcatcaggaccatgtgggcctggaatgctcgaaacttcttcctgctggagtggaccctgcagcccatctcgcagtttgtagagatcatgcccctgaagccggccccagtgcaggaacacttcttccagcttctagaggccctggtgttcgagctgcactacgtgcctcatgagatcctgcgaaaggtacagcatctgatcaaggagagccctgggccatcctgcaccctcatggccctgcagagcatcctcagcatcgctggtggggaccccctcttcaccgacatcttccgggactcagggctcctgggcctgctactggcacagcttcggaagcaagccaagatcatgaggaagtcaggaaacaaagtgtccactcctggtgttcaggatccagaaagagaactcacctgtgtgatgctgaggattgtagtcacacttctgaaaggctcggtgaggaatgcagttgtcctgaaggaccacggcatggtgcccttcatcaagatcttcctggatgacgagtgctaccgggaggcctcgctcagcatcttggagcagctctcagccatcaacgccgaggagtacatgagcatcattgtgggtgctctatgctcatccactcaaggggagctgcagctgaaactggatctcctgaagtctctgctccggatcctggtgacccccaagggtcgtgctgccttcagagtctccagcgggttcaacgggctgctgtctctgctctctgacctggaaggctccctccaggagcccccgctgcaggcatggggagcagtatcccccagacagaccctggagctggttttgtacactctctgtgctgtgtccgcagcgctgcactgggaccctgtcaatggctacttcttcaggaggaatgggctctttgagaagctggccgaggacctctgcctgctgggctgttttggagccctggaggaagagggcaacctgctgcgctcttgggtggacacaaaggccaggccatttgcagatttgctgggcactgccttttcctccagcggctcactcccaccccggatacagagctgcctccagatccttggctttctggacagcatggccagcggcaccctccacttgcgtggggacctgaaggagtccctgaggaccaagcaggggccggttgtggatgttcagaagggagaaactggcagtgacccccaacgcaacttcaagcagtggccagacctggaggagaggatggatgagggagatgctgcaatcatgcatcccggggtcgtgtgcatcatggtgaggctgctgcctcggttgtaccatgaagatcacccacagctttccgaggagatccagtgctccctggccagtcatatccagtccctggtgaagtcggagaagaaccgccaggtcatgtgcgaagcaggcttgcttgggaccctcatggcctcctgccacagggccctggtcaccagtggcagccccctccactcacgcctcatcaggatctttgagaagctcgcttcccaggccattgaaccggatgtgctaagacagtttctaggtcttggaattccctcatctctgtcggccacaacaaaaatccttgattcatctcacacacacagaggcaaccctgggtgctcagggtcacagactgcacagggcttggctgaggggccctggccagctgccccagatgctgggctgcaccctggagtcacacaggccccgcagcccttgggggaatcccaggattcaactactgctcttcagacggcgctgagcctcatctccatgacctcccctgtagctggaagccaaacatctggaaagacaatctggctcagaaaccagttgctggagatgctgctcagtgtaatatcttccccccagcttcatctgtcctctgagtaagtagctccaggaagagcaatttggcaggaggttacctcatacagggtgtggcattaaaccttttcttaatgaaaagtttagcatctctgagtctgttttctgcaatgtatttcctgcactagtcagaaagaaaattatattctctctacccaatgaaccagaccttgccctaagatattctgatgcaaatgttaagtggacatgagtaactagaaacagatttggtataattacaataaactccttttgtcaccat

SEQ ID NO: 34410 - DNA, 2117 bp, Homo sapiens
  source 1..2117: mol_type = unassigned DNA
attcctctgtcctcactcccctgtcaacttctaaaacagagtagcaagagcagcaggctgtggcaggccaactccacatgctcatggctctggagggctcagcacaggtccttttcaaggagataccccggctctgacaggatcatgctgcagaagtggcagaaaagggacatcagcaattttgagtatctcatgtacctcaacaccgcggctgggagaacctgcaatgactacatgcagtacccagtgttcccctgggtcctcgcagactacacctcagagacattgaacttggcaaatccgaagattttccgggatctttcaaagcccatgggggctcagaccaaggaaaggaagctgaaatttatccagaggtttaaagaagttgagaaaactgaaggagacatgactgtccagtgccactactacacccactactcctcggccatcatcgtggcctcctacctggtccggatgccacccttcacccaggccttctgcgctctgcagggcggaagcttcgacgtggcagacagaatgttccacagtgtgaagagcacgtgggagtcggcctccagagagaacatgagtgacgtcagggagctgaccccagagttcttctacctgcctgagttcttaaccaactgcaacggggtagagttcggctgcatgcaggacgggactgtgctaggagacgtgcagctccctccctgggctgatggggaccctcggaaattcatcagcctgcacagaaaggccctggaaagtgactttgtcagtgccaacctccaccattggatagaccttatttttgggtacaagcagcaggggccagccgcagtggatgctgttaatatcttccacccctacttctacggtgacagaatggacctcagcagcatcactgaccccctcatcaaaagcaccatcctggggtttgtcagcaactttggacaggtgcccaaacagctctttaccaaacctcacccagccaggactgcagcagggaagcctctgcctggaaaggatgtctccacccccgtgagcctgcctggccacccacagccctttttctacagcctgcagtcgctgaggccctcccaggtcacggtcaaagatatgtacctcttttctctaggctcagagtcccccaaaggggccattggccacattgtctctactgagaagaccattctggctgtagagaggaacaaagtgctgctgcctcctctctggaacaggaccttcagctggggctttgatgacttcagctgctgcttggggagctacggctccgacaaggtcctgatgacattcgagaacctggctgcctggggccgctgtctgtgcgccgtgtgcccatccccaacaacgattgtcacctctgggaccagcactgtggtgtgtgtgtgggagctcagcatgaccaaaggccgcccgaggggcttgcgcctccggcaggccttgtatggacacacacaggctgtcacgtgcctggcagcgtcagtcaccttcagcctcctggtgagcggctcccaggactgcacctgtatcctgtgggatctggaccacctcacccacgtgacccgcctgcccgcccatcgggaaggcatctcagccatcaccatcagtgacgtctcaggcaccattgtctcctgtgcgggagcacacttgtccctgtggaatgtcaatggacagcccctggccagcatcaccacagcctggggcccagaaggagccataacctgctgctgcctgatggagggcccagcatgggacacaagccagatcatcatcaccgggagtcaagacggcatggtccgggtttggaagactgaggatgtgaagatgtctgttcctggacggccagcaggagaggagcccccggctcagcctccaaccctctccatggccgatgggacttctatgaaaaggatgagcacacacactcggagggctgagcagcacgctggaaactgtgacttggtgatgcccagctgcacacgaaattacacatgactcaccttattaagggctattgcactgaaaaaaaaaaagatgggtcgcttactggaaattattgtattgtctttattttattaaagcaactatgtttt

SEQ ID NO: 34411 - DNA, 3061 bp, Homo sapiens
  source 1..3061: mol_type = unassigned DNA
aatttcttttcaatattagcttattcccaaattggctaatgggtatttttaaagccatgctaaattaaaggaattcaattttctcactagtatttggtaacacatgggagactatgtgtcatatccagaagagttctgtacatgaactgcatttaattgctccgagagtcactggagctttctttaatcagaatggaaatcaggataagctgaggtcttatagattggtggtacttaaggcagaaaattaacaccgtgttttgtagctgttagttggtagagggaaattcaggctaccgtcgcgaaacctgcaggttaagttattttctcctccctgcttctgtaggttcacagcgttcccttctgatagagctttttgtctgtgttgtaaagctctttggctgagatggatgacaaagatattgacaaagaactaaggcagaaattaaacttttcctattgtgaggagactgagattgaagggcagaagaaagtagaagaaagcagggaggcttcgagccaaaccccagagaagggtgaagtgcaggattcagaggcaaagggtacaccaccttggactccccttagcaacgtgcatgagctcgacacatcttcggaaaaagacaaagaaagtccagatcagattttgaggactccagtgtcacaccctctcaaatgtcctgagacaccagcccaaccagacagcaggagcaagctgctgcccagtgacagcccctctactcccaaaaccatgctgagccggttggtgatttctccaacagggaagcttccttccagaggccctaagcatttgaagctcacacctgctcccctcaaggatgagatgacctcattggctctggtcaatattaatcccttcactccagagtcctataaaaaattatttcttcaatctggtggcaagaggaaaataagaggagatcttgaggaagctggtccagaggaaggcaagggagggctgcctgccaagagatgtgttttacgagaaaccaacatggcttcccgctatgaaaaagaattcttggaggttgaaaaaattggggttggcgaatttggtacagtctacaagtgcattaagaggctggatggatgtgtttatgcaataaagcgctctatgaaaacttttacagaattatcaaatgagaattcggctttgcatgaagtttatgctcacgcagtgcttgggcatcacccccatgtggtacgttactattcctcatgggcagaagatgaccacatgatcattcagaatgaatactgcaatggtgggagtttgcaagctgctatatctgaaaacactaagtctggcaatcattttgaagagccaaaactcaaggacatccttctacagatttcccttggccttaattacatccacaactctagcatggtacacctggacatcaaacctagtaatatattcatttgtcacaagatgcaaagtgaatcctctggagtcatagaagaagttgaaaatgaagctgattggtttctctctgccaatgtgatgtataaaattggtgacctgggccacgcaacatcaataaacaaacccaaagtggaagaaggagatagtcgcttcctggctaatgagattttgcaagaggattaccggcaccttcccaaagcagacatatttgccttgggattaacaattgcagtggctgcaggagcagagtcattgcccaccaatggtgctgcatggcaccatatccgcaagggtaactttccggacgttcctcaggagctctcagaaagcttttccagtctgctcaagaacatgatccaacctgatgccgaacagagaccttctgcagcagctctggccagaaatacagttctccggccttccctgggaaaaacagaagagctccaacagcagctgaatttggaaaagttcaagactgccacactggaaagggaactgagagaagcccagcaggcccagtcaccccagggatatacccatcatggtgacactggggtctctgggacccacacaggatcaagaagcacaaaacgcctggtgggaggaaagagtgcaaggtcttcaagctttacctcaggagagcgtgagcctctgcattaaaggaagaaaaggaaaacagcccttggtttggcctatggattacgaggttgctgttgctgattccccaccaaagatcccagggactcgttgtacatagaaaggaatagaatttagtttagagttgaagtcacagcttacagaaaatgtgcctggatttccacagcgcttcccaggttatatgatgctgttcctaagagagaattcccagcttctttgaggaagtgggtctcctaatgtataccctttctgatattgtatttattaaataaatggtttcaccattatgtgaggtgggtaaaagttagactgcatgcaacttggacatctctgagctggttgttaacttgcagaacaaaaatgctgtggggagaggcttcagggaaaacttgatgtgcctgtggttgttctccatctatttgccctgcctctcttgctgttctggttggtttgatattctgggtctcaccaatttctcttgatttttgtgagaatttggctttgtttcctgttttttaaaatcatattttatctaaatcctttttctgtacacatttttaaaggaagagaatactgtatttttaaataaaggtttttatcttgtccaaagcctaattacaggtaaaatatcctttgtaaaatgtaactaacaaagaatgagaaatttatgtcggagaacattttatgaataaaagggtaagagaattgagtgggtcagtagtaacaggtcttggtggcaagtctcagcttcacagttccaacagttaatgatggtcaggatctgctagaaaattatgttggtcataaaggtatttgataagctctgtttgtgtcatcttagtgaatgcaacctgttaatgataatggctttttcgctgcttgattttcttcttttcctcatttttaaaagctaattaagtttttttaattgaataaaccctaatactattcttt

SEQ ID NO: 34412 - DNA, 1557 bp, Homo sapiens
  source 1..1557: mol_type = unassigned DNA
caaatgatgtgcgagatgtcataaaacaagctcaaaatgaaaagagctttttcaaaaggaaaaccatcctttttattgatgagattcatcggttcaataaatctcagcaggacactttccttcctcacgtggaatgtgggacgatcactctgattggggcaaccactgaaaacccttccttccaggtcaacgctgctcttctgagccgctgtcgagtgattgttcttgagaagcttccagtagaggcaatggtgactattttaatgcgagcgatcaactccctgggaatccacgtcctagactctagccgtcccactgaccctctgagccacagcagcaacagcagctcagagcccgccatgttcatagaggataaagcagtagacaccctggcttacctcagtgacggtgacgcccgagctgggttgaacggactgcagctggcggtgctggctaggttaagctctaggaagatgttctgtaagaagagtgggcaatcctattctcccagtagagttctgatcacagagaatgacgtgaaggagggcctacagcgatcccacattttatatgaccgggcaggtgaggagcattacaactgcatctccgccctgcacaagtccatgcggggctcagaccagaacgcctccctctactggctggctcgcatgctcgagggaggagaggacccactctacgtggcacggaggcttgtcaggtttgccagcgaggacataggtctggcagacccgtctgcgttaacacaagcggttgctgcctaccaaggctgtcattttataggcatgcctgaatgtgaggtgcttctggcccagtgtgtggtctactttgccagagccccaaagtccattgaggtgtacagcgcctacaacaacgtcaaagcctgcctgaggaaccaccaggggccactgccccccgtgcccctgcacctgaggaacgcgcccactaggctgatgaaggatttgggctatggcaaaggctacaagtacaaccccatgtacagcgagcctgtggatcaggagtacctgcctgaagagttgaggggggtagatttcttcaagcagaggaggtgctgactcctcagggcacgacagcagaaggatgttgcttttttaagggagggccagaaagaaagttagtggattgcaaagttggttgcctggtggaagttagaacagaccaacattttgtgccagaaatttaagagttccataggtggaggcgcagttctttcgaataaatgtgtaactttgaaattgtgttcatttgcactcggtgcagcggttatgcttatgaaaatacctggcagctttgtgcaatgaattaatgttataaggaattatctattttgtcatagtatttaagtcataatgtcatttcagaattcagttctgtaggattttcttttctttaaaaaatgtatattctgggtagttttaattggtaaaaaaatgtaattgtgatttaatactgcatagtgttttgggtattttttttatatgcaaaggtcttacgagccaataaaactatttcaaagta

SEQ ID NO: 34413 - DNA, 2980 bp, Homo sapiens
  source 1..2980: mol_type = unassigned DNA
gcggccgccgccgcggcggggagcgcgtctccgcgcagctgggacgaggcggaggcgcaggaggaggaggaggccgtgggcgacggcgatggcgacggggacgcggacgcggacggcgaggacgacccggggcactgggacgcggacgctgccgaagccgccaccgccttcggggccagtggcgggggccgcccgcacccccgggcgctggctgccgaggagatccgacagatgctacagggcaagccgctggccgacacgatgcgtcctgacacgctgcaggattacttcgggcagagcaaggccgtgggccaggataccctgctgcgctcgctcctggagaccaacgaaatcccctcgcttatcctgtgggggccgccgggctgcggcaagaccactctggctcacatcatagccagcaacagcaagaaacatagcataaggtttgtgacattatctgcaacaaatgccaagacaaatgatgtgcgagatgtcataaaacaagctcaaaatgaaaagagctttttcaaaaggaaaaccatcctttttattgatgagattcatcggttcaataaatctcagcaggacactttccttcctcacgtggaatgtgggacgatcactctgattggggcaaccactgaaaacccttccttccaggtcaacgctgctcttctgagccgctgtcgagtgattgttcttgagaagcttccagtagaggcaatggtgactattttaatgcgagcgatcaactccctgggaatccacgtcctagactctagccgtcccactgaccctctgagccacagcagcaacagcagctcagagcccgccatgttcatagaggataaagcagtagacaccctggcttacctcagtgacggtgacgcccgagctgggttgaacggactgcagctggcggtgctggctaggttaagctctaggaagatgttctgtaagaagagtgggcaatcctattctcccagtagagttctgatcacagagaatgacgtgaaggagggcctacagcgatcccacattttatatgaccgggcaggtgaggagcattacaactgcatctccgccctgcacaagtccatgcggggctcagaccagaacgcctccctctactggctggctcgcatgctcgagggaggagaggacccactctacgtggcacggaggcttgtcaggtttgccagcgaggacataggtctggcagacccgtctgcgttaacacaagcggttgctgcctaccaaggctgtcattttataggcatgcctgaatgtgaggtgcttctggcccagtgtgtggtctactttgccagagccccaaagtccattgaggtgtacagcgcctacaacaacgtcaaagcctgcctgaggaaccaccaggggccactgccccccgtgcccctgcacctgaggaacgcgcccactaggctgatgaaggatttgggctatggcaaaggctacaagtacaaccccatgtacagcgagcctgtggatcaggagtacctgcctgaagagttgaggggggtagatttcttcaagcagaggaggtgctgactcctcagggcacgacagcagaaggatgttgcttttttaagggagggccagaaagaaagttagtggattgcaaagttggttgcctggtggaagttagaacagaccaacattttgtgccagaaatttaagagttccataggtggaggcgcagttctttcgaataaatgtgtaactttgaaattgtgttcatttgcactcggtgcagcggttatgcttatgaaaatacctggcagctttgtgcaatgaattaatgttataaggaattatctattttgtcatagtatttaagtcataatgtcatttcagaattcagttctgtaggattttcttttctttaaaaaatgtatattctgggtagttttaattggtaaaaaaatgtaattgtgatttaatactgcatagtgttttgggtattttttttatatgcaaaggtcttacgagccaataaaactatttcaaagtactcttcgattctgtcatggttttcctgcctggatgctaggtaccagcgttgtcaccattgcatttggtgggtggatactgggaaggagaaatcaccccagatgggaagagtggggagcttaagttaagaagtcagtgttatcttgttgaaagttaactctgatctctttaaaggaatacataaaggaattctttaaatggcttgtggaagactccagtagtcccatgcccattttttcccacttgtcctggtttcttcttgcagctccatatttctaaacagtcgtttttcttttactttatgtgtgtcctgaacacaaaatacgccactccttctgctcagttaagagttatttgtccctactgctacttcctctccctctccttagttgcatgtcgtgcatatgcccacaaggatggccccttcaggtagtcggttctcctcctgctgttgcgtgatccctcctggggtcctcctgccatgtctggaaggctgccggctgttggcctgggacgtcctctgcctttattctgagtgagatgcccattttctggatgctccatcccgccttactggtttattccgctatttcagtgcaacccatcctctagtagttttatcaggctggagggactgtatgttgcagaggcttggcccgactggcctccctccttctgtctggagtggttgcactgcagtgtgcagttgccatccccagaatctcccttcatcatcaccctggagctttcctctgcttctccctgcaccccatctgatgacaggactgactgctttctggcacaggtggcatgtaccctctagtagctttatggagcaggggtgtgtggaggaaaagtatttttagacctcaggagactcaaaatgcttttattgtaccttcagacgtgtctgagggtttggctagtaataaattgtaggtaagaaatt

SEQ ID NO: 34414 - DNA, 2595 bp, Homo sapiens
  source 1..2595: mol_type = unassigned DNA
gaggcgctgccagcggccggccgagggcgggcggacgcgggagctgcggacgtgaggcatgagcggcgccctcctccggcccgcgagcgtcctgctggttccccgagcgagggtctcgcggcgcggggcctagcggagggcatcgaaggcctccgcgtgcgcacgggttgctgcggccgcgccgggcgccggggagggcggcggccgccatggaggtgagcgggccggaagacgaccccttcctttcgcagctgcaccaggtgcagtgccccgtgtgccagcagatgatgcccgccgcgcacatcaactcgcacctggaccgctgtctgctgctccacccggcggggcacgcggagcccgcggccgggtcgcaccgcgccggggagcgggccaaggggccctcgccgcccggcgccaagaggcggcggctgtcggagagctcggcgctgaagcagccagccaccccgacggcagccgagagcagcgagggcgagggtgaggagggcgacgacggcggcgagaccgagagccgcgagagctacgacgcgccgcccacacccagcggcgcccgccttatccccgacttcccggtggcccgctccagcagccccgggaggaaggggtcggggaagaggccggcggccgccgccgcggcggggagcgcgtctccgcgcagctgggacgaggcggaggcgcaggaggaggaggaggccgtgggcgacggcgatggcgacggggacgcggacgcggacggcgaggacgacccggggcactgggacgcggacgctgccgaagccgccaccgccttcggggccagtggcgggggccgcccgcacccccgggcgctggctgccgaggagatccgacagatgctacagggcaagccgctggccgacacgatgcgtcctgacacgctgcaggattacttcgggcagagcaaggccgtgggccaggataccctgctgcgctcgctcctggagaccaacgaaatcccctcgcttatcctgtgggggccgccgggctgcggcaagaccactctggctcacatcatagccagcaacagcaagaaacatagcataaggtttgtgacattatctgcaacaaatgccaagacaaatgatgtgcgagatgtcataaaacaagctcaaaatgaaaagagctttttcaaaaggaaaaccatcctttttattgatgagattcatcggttcaataaatctcagcaggtcaacgctgctcttctgagccgctgtcgagtgattgttcttgagaagcttccagtagaggcaatggtgactattttaatgcgagcgatcaactccctgggaatccacgtcctagactctagccgtcccactgaccctctgagccacagcagcaacagcagctcagagcccgccatgttcatagaggataaagcagtagacaccctggcttacctcagtgacggtgacgcccgagctgggttgaacggactgcagctggcggtgctggctaggttaagctctaggaagatgttctgtaagaagagtgggcaatcctattctcccagtagagttctgatcacagagaatgacgtgaaggagggcctacagcgatcccacattttatatgaccgggcaggtgaggagcattacaactgcatctccgccctgcacaagtccatgcggggctcagaccagaacgcctccctctactggctggctcgcatgctcgagggaggagaggacccactctacgtggcacggaggcttgtcaggtttgccagcgaggacataggtctggcagacccgtctgcgttaacacaagcggttgctgcctaccaaggctgtcattttataggcatgcctgaatgtgaggtgcttctggcccagtgtgtggtctactttgccagagccccaaagtccattgaggtgtacagcgcctacaacaacgtcaaagcctgcctgaggaaccaccaggggccactgccccccgtgcccctgcacctgaggaacgcgcccactaggctgatgaaggatttgggctatggcaaaggctacaagtacaaccccatgtacagcgagcctgtggatcaggagtacctgcctgaagagttgaggggggtagatttcttcaagcagaggaggtgctgactcctcagggcacgacagcagaaggatgttgcttttttaagggagggccagaaagaaagttagtggattgcaaagttggttgcctggtggaagttagaacagaccaacattttgtgccagaaatttaagagttccataggtggaggcgcagttctttcgaataaatgtgtaactttgaaattgtgttcatttgcactcggtgcagcggttatgcttatgaaaatacctggcagctttgtgcaatgaattaatgttataaggaattatctattttgtcatagtatttaagtcataatgtcatttcagaattcagttctgtaggattttcttttctttaaaaaatgtatattctgggtagttttaattggtaaaaaaatgtaattgtgatttaatactgcatagtgttttgggtattttttttatatgcaaaggtcttacgagccaataaaactatttcaaagta

SEQ ID NO: 34415 - DNA, 2670 bp, Homo sapiens
  source 1..2670: mol_type = unassigned DNA
gaggcgctgccagcggccggccgagggcgggcggacgcgggagctgcggacgtgaggcatgagcggcgccctcctccggcccgcgagcgtcctgctggttccccgagcgagggtctcgcggcgcggggcctagcggagggcatcgaaggcctccgcgtgcgcacgggttgctgcggccgcgccgggcgccggggagggcggcggccgccatggaggtgagcgggccggaagacgaccccttcctttcgcagctgcaccaggtgcagtgccccgtgtgccagcagatgatgcccgccgcgcacatcaactcgcacctggaccgctgtctgctgctccacccggcggggcacgcggagcccgcggccgggtcgcaccgcgccggggagcgggccaaggggccctcgccgcccggcgccaagaggcggcggctgtcggagagctcggcgctgaagcagccagccaccccgacggcagccgagagcagcgagggcgagggtgaggagggcgacgacggcggcgagaccgagagccgcgagagctacgacgcgccgcccacacccagcggcgcccgccttatccccgacttcccggtggcccgctccagcagccccgggaggaaggggtcggggaagaggccggcggccgccgccgcggcggggagcgcgtctccgcgcagctgggacgaggcggaggcgcaggaggaggaggaggccgtgggcgacggcgatggcgacggggacgcggacgcggacggcgaggacgacccggggcactgggacgcggacgctgccgaagccgccaccgccttcggggccagtggcgggggccgcccgcacccccgggcgctggctgccgaggagatccgacagatgctacagggcaagccgctggccgacacgatgcgtcctgacacgctgcaggattacttcgggcagagcaaggccgtgggccaggataccctgctgcgctcgctcctggagaccaacgaaatcccctcgcttatcctgtgggggccgccgggctgcggcaagaccactctggctcacatcatagccagcaacagcaagaaacatagcataaggtttgtgacattatctgcaacaaatgccaagacaaatgatgtgcgagatgtcataaaacaagctcaaaatgaaaagagctttttcaaaaggaaaaccatcctttttattgatgagattcatcggttcaataaatctcagcaggacactttccttcctcacgtggaatgtgggacgatcactctgattggggcaaccactgaaaacccttccttccaggtcaacgctgctcttctgagccgctgtcgagtgattgttcttgagaagcttccagtagaggcaatggtgactattttaatgcgagcgatcaactccctgggaatccacgtcctagactctagccgtcccactgaccctctgagccacagcagcaacagcagctcagagcccgccatgttcatagaggataaagcagtagacaccctggcttacctcagtgacggtgacgcccgagctgggttgaacggactgcagctggcggtgctggctaggttaagctctaggaagatgttctgtaagaagagtgggcaatcctattctcccagtagagttctgatcacagagaatgacgtgaaggagggcctacagcgatcccacattttatatgaccgggcaggtgaggagcattacaactgcatctccgccctgcacaagtccatgcggggctcagaccagaacgcctccctctactggctggctcgcatgctcgagggaggagaggacccactctacgtggcacggaggcttgtcaggtttgccagcgaggacataggtctggcagacccgtctgcgttaacacaagcggttgctgcctaccaaggctgtcattttataggcatgcctgaatgtgaggtgcttctggcccagtgtgtggtctactttgccagagccccaaagtccattgaggtgtacagcgcctacaacaacgtcaaagcctgcctgaggaaccaccaggggccactgccccccgtgcccctgcacctgaggaacgcgcccactaggctgatgaaggatttgggctatggcaaaggctacaagtacaaccccatgtacagcgagcctgtggatcaggagtacctgcctgaagagttgaggggggtagatttcttcaagcagaggaggtgctgactcctcagggcacgacagcagaaggatgttgcttttttaagggagggccagaaagaaagttagtggattgcaaagttggttgcctggtggaagttagaacagaccaacattttgtgccagaaatttaagagttccataggtggaggcgcagttctttcgaataaatgtgtaactttgaaattgtgttcatttgcactcggtgcagcggttatgcttatgaaaatacctggcagctttgtgcaatgaattaatgttataaggaattatctattttgtcatagtatttaagtcataatgtcatttcagaattcagttctgtaggattttcttttctttaaaaaatgtatattctgggtagttttaattggtaaaaaaatgtaattgtgatttaatactgcatagtgttttgggtattttttttatatgcaaaggtcttacgagccaataaaactatttcaaagta

SEQ ID NO: 34416 - DNA, 5215 bp, Homo sapiens
  source 1..5215: mol_type = unassigned DNA
ggagctgatgtgtactgtgtgcgccggggaggcgccggcttgtactcggcagcgcgggaataaagtttgctgatttggtgtctagcctggatgcctgggttgcaggccctgcttgtggtggcgctccacagtcatccggctgaagaagacctgttggactggatcttctcgggttttctttcagatattgttttgtatttacccatgaagacattgttttttggactctgcaaataggacatttcaaagatgagtgaaaaaaaattggaaacaactgcacagcagcggaaatgtcctgaatggatgaatgtgcagaataaaagatgtgctgtagaagaaagaaaggcatgtgttcggaagagtgtttttgaagatgacctccccttcttagaattcactggatccattgtgtatagttacgatgctagtgattgctctttcctgtcagaagatattagcatgagtctatcagatggggatgtggtgggatttgacatggagtggccaccattatacaatagagggaaacttggcaaagttgcactaattcagttgtgtgtttctgagagcaaatgttacttgttccacgtttcttccatgtcagtttttccccagggattaaaaatgttgcttgaaaataaagcagttaaaaaggcaggtgtaggaattgaaggagatcagtggaaacttctacgtgactttgatatcaaattgaagaattttgtggagttgacagatgttgccaataaaaagctgaaatgcacagagacctggagccttaacagtctggttaaacacctcttaggtaaacagctcctgaaagacaagtctatccgctgtagcaattggagtaaatttcctctcactgaggaccagaaactgtatgcagccactgatgcttatgctggttttattatttaccgaaatttagagattttggatgatactgtgcaaaggtttgctataaataaagaggaagaaatcctacttagcgacatgaacaaacagttgacttcaatctctgaggaagtgatggatctggctaagcatcttcctcatgctttcagtaaattggaaaacccacggagggtttctatcttactaaaggatatttcagaaaatctatattcactgaggaggatgataattgggtctactaacattgagactgaactgaggcccagcaataatttaaacttattatcctttgaagattcaactactgggggagtacaacagaaacaaattagagaacatgaagttttaattcacgttgaagatgaaacatgggacccaacacttgatcatttagctaaacatgatggagaagatgtacttggaaataaagtggaacgaaaagaagatggatttgaagatggagtagaagacaacaaattgaaagagaatatggaaagagcttgtttgatgtcgttagatattacagaacatgaactccaaattttggaacagcagtctcaggaagaatatcttagtgatattgcttataaatctactgagcatttatctcccaatgataatgaaaacgatacgtcctatgtaattgagagtgatgaagatttagaaatggagatgcttaagcatttatctcccaatgataatgaaaacgatacgtcctatgtaattgagagtgatgaagatttagaaatggagatgcttaagtctttagaaaacctcaatagtggcacggtagaaccaactcattctaaatgcttaaaaatggaaagaaatctgggtcttcctactaaagaagaagaagaagatgatgaaaatgaagctaatgaaggggaagaagatgatgataaggactttttgtggccagcacccaatgaagagcaagttacttgcctcaagatgtactttggccattccagttttaaaccagttcagtggaaagtgattcattcagtattagaagaaagaagagataatgttgctgtcatggcaactggatatggaaagagtttgtgcttccagtatccacctgtttatgtaggcaagattggccttgttatctctccccttatttctctgatggaagaccaagtgctacagcttaaaatgtccaacatcccagcttgcttccttggatcagcacagtcagaaaatgttctaacagatattaaattaggtaaataccggattgtatacgtaactccagaatactgttcaggtaacatgggcctgctccagcaacttgaggctgatattggtatcacgctcattgctgtggatgaggctcactgtatttctgagtgggggcatgattttagggattcattcaggaagttgggctccctaaagacagcactgccaatggttccaatcgttgcacttactgctactgcaagttcttcaatccgggaagacattgtacgttgcttaaatctgagaaatcctcagatcacctgtactggttttgatcgaccaaacctgtatttagaagttaggcgaaaaacagggaatatccttcaggatctgcagccatttcttgtcaaaacaagttcccactgggaatttgaaggtccaacaatcatctactgtccttctagaaaaatgacacaacaagttacaggtgaacttaggaaactgaatctatcctgtggaacataccatgcgggcatgagttttagcacaaggaaagacattcatcataggtttgtaagagatgaaattcagtgtgtcatagctaccatagcttttggaatgggcattaataaagctgacattcgccaagtcattcattacggtgctcctaaggacatggaatcatattatcaggagattggtagagctggtcgtgatggacttcaaagttcttgtcacgtcctctgggctcctgcagacattaacttaaataggcaccttcttactgagatacgtaatgagaagtttcgattatacaaattaaagatgatggcaaagatggaaaaatatcttcattctagcagatgtaggagacaaatcatcttgtctcattttgaggacaaacaagtacaaaaagcctccttgggaattatgggaactgaaaaatgctgtgataattgcaggtccagattggatcattgctattccatggatgactcagaggatacatcctgggactttggtccacaagcatttaagcttttgtctgctgtggacatcttaggcgaaaaatttggaattgggcttccaattttatttctccgaggatctaattctcagcgtcttgccgatcaatatcgcaggcacagtttatttggcactggcaaggatcaaacagagagttggtggaaggctttttcccgtcagctgatcactgagggattcttggtagaagtttctcggtataacaaatttatgaagatttgcgcccttacgaaaaagggtagaaattggcttcataaagctaatacagaatctcagagcctcatccttcaagctaatgaagaattgtgtccaaagaagttgcttctgcctagttcgaaaactgtatcttcgggcaccaaagagcattgttataatcaagtaccagttgaattaagtacagagaagaagtctaacttggagaagttatattcttataaaccatgtgataagatttcttctgggagtaacatttctaaaaaaagtatcatggtacagtcaccagaaaaagcttacagttcctcacagcctgttatttcggcacaagagcaggagactcagattgtgttatatggcaaattggtagaagctaggcagaaacatgccaataaaatggatgttcccccagctattctggcaacaaacaagatactggtggatatggccaaaatgagaccaactacggttgaaaacgtaaaaaggattgatggtgtttctgaaggcaaagctgccatgttggcccctctgttggaagtcatcaaacatttctgccaaacaaatagtgttcagacagacctcttttcaagtacaaaacctcaagaagaacagaagacgagtctggtagcaaaaaataaaatatgcacactttcacagtctatggccatcacatactctttattccaagaaaagaagatgcctttgaagagcatagctgagagcaggattctgcctctcatgacaattggcatgcacttatcccaagcggtgaaagctggctgcccccttgatttggagcgagcaggcctgactccagaggttcagaagattattgctgatgttatccgaaaccctcccgtcaactcagatatgagtaaaattagcctaatcagaatgttagttcctgaaaacattgacacgtaccttatccacatggcaattgagatccttaaacatggtcctgacagcggacttcaaccttcatgtgatgtcaacaaaaggagatgttttcccggttctgaagagatctgttcaagttctaagagaagcaaggaagaagtaggcatcaatactgagacttcatctgcagagagaaagagacgattacctgtgtggtttgccaaaggaagtgataccagcaagaaattaatggacaaaacgaaaaggggaggtctttttagttaagctggcaattaccagaacaattatgtttcttgctgtattataagaggatagctatattttatttctgaagagtaaggagtagtattttggcttaaaaatcattctaattacaaagttcactgtttattgaagaactggcatcttaaatcagccttccgcaattcatgtagtttctgggtcttctgggagcctacgtgagtacatcacctaacagaatattaaattagacttcctgtaagattgctttaagaaactgttactgtcctgttttctaatctctttattaaaacagtgtatttggaaaatgttatgtgctctgatttgatatagataacagattagtagttacatggtaattatgtgatataaaatattcatatattatcaaaattctgttttgtaaatgtaagaaagcatagttattttacaaattgtttttactgtcttttgaagaagttcttaaatacgttgttaaatggtattagttgaccagggcagtgaaaatgaaaccgcattttgggtgccattaaatagggaaaaaacatgtaaaaaatgtaaaatggagaccaattgcactaggcaagtgtatattttgtattttatatacaatttctattatttttcaagtaataaaacaatgtttttcatactgaatattatatatata

SEQ ID NO: 34417 - DNA, 941 bp, Homo sapiens
  source 1..941: mol_type = unassigned DNA
gccccgagtcctgttgcccacacgcccgaggcgcgctggattggcggagcatggcccaggaggagggtgggagcctgcccgaggtgcgggcgcgggtcagggccgcgcatggcatccccgacctggcccaaaagctccatttctatgaccgctgggctccggactacgaccaggatgtggccaccctgctgtaccgtgcgccccgcctcgcagtggactgcctcacacaagcccttccaggcccgccccacagtgccctgatcctggacgtggcctgtggcacaggcctagtggctgccgagctgcgggctccaggcttcctccagctgcatggggtggatgggagcccagggatgctggaacaggcccaggcccccggcctctatcagcgcctcagcctctgcaccctgggccaggagcctctgcccagcccggaagggaccttcgacgcggtgctgatagtcggtgccctcagtgacggccaggtgccctgcaatgcgatacctgagctacatgtcaccaagccaggtgggctggtgtgtctgaccaccaggaccaactcgtccaaccttcaatacaaggaggctctggaggccaccctggacaggctggagcaggctgggatgtgggaaggcctggtggcctggcctgtggaccgcctgtggaccgctgggagctggctacctccgagctggaggtggtatccggcatctctgccaaggatggcttcatctccggcattgtctacctgtaccgaaagtggaaggcgacccaggttgaggaagtgagatccagcccccagcccccagctggcccctgactccatgtggccttagctgggcccatctgctgggcctcctctgcctcccctgtaaaatgggacctccgaaccaaccctgcccctcagaaatgccctgcctattaaatgagctcccagaaaa

SEQ ID NO: 34418 - DNA, 854 bp, Homo sapiens
  source 1..854: mol_type = unassigned DNA
gcttctcccagctggagtaggtgggggaggccagacatggaggcccttcctccagtcagatccagccttttggggatcctgttgcaggttacgaggctctcagtgctgttggttcagaaccgagatcacctctataatttcctgctcctcaagatcaacctcttcaaccactgggtgtcagggctggcccaggaggcccgggggtcctgtaactggcaggcccacctacccctgggagctgcagcctgccccctgggccaggctctctgggctgggctggctctgatacaggtccccgtatggctggtgctacagggacccaggctgatgtgggctggcatgtggggcagcaccaagggcctgggcctggccttgctcagtgcctgggagcagctgggcctgtctgtggccatctggacagatctgtttttgtcatgtctgcacggcctgatgttggtggccttgctcttggtggtagtgacctggagggtgtgtcagaagtcccactgcttccgactgggcaggcagctcagtaaggccttgcaagtgaactgcgtggtaaggaagctcctggtacagctgagacgtctgtattggtgggtggagactatgactgccctcacctcctggcacctggcctatctcatcacctggaccacctgcctggcctcccacctgctgcaggctgcctttgagcacacgacccagctggccgaggcccaggaggttgaaccccaggaggtctcagggtcttccttgctgccctcactgtctgcgtcctcggactcagagtctggaacagttttgccagagcaagaaactcccagagaataaatgtatccccatctgcctct

SEQ ID NO: 34419 - DNA, 1622 bp, Homo sapiens
  source 1..1622: mol_type = unassigned DNA
ggccggcggcagagctgtccggctgcgcggtggcccggggggcccgggcggcagggcaagcagcgcggcctcggcctatgcgaccggtggcgccggcgcggcttctgcctggagaggattcaagatgaccaacgaagaacctcttcccaagaaggttcgattgagtgaaacagacttcaaagttatggcaagagatgagttaattctaagatggaaacaatatgaagcatatgtacaagctttggagggcaagtacacagatcttaactctaatgatgtaactggcctaagagagtctgaagaaaaactaaagcaacaacagcaggagtctgcacgcagggaaaacatccttgtaatgcgactagcaaccaaggaacaagagatgcaagagtgtactactcaaatccagtacctcaagcaagtccagcagccgagcgttgcccaactgagatcaacaatggtagacccagcgatcaacttgtttttcctaaaaatgaaaggtgaactggaacagactaaagacaaactggaacaagcccaaaatgaactgagtgcctggaagtttacgcctgataggtaaacaaatcatactccccagtcaagacttccctgacagtcccactacgagaaagctgtggtgggacagccaagtactcgtttccacaccaagactcagactttttgagccaaaaaaaagccacattcttacactgtccagcttgtaatggttaatgtaaaacttaccagatgaaccttgtgtttcagcttttttcttttccccttccccttgcttcagaggcctgatggcgtcggactattccgaagaagtggccacctccgaaaaattccccttctagaacatgtagacacttgagaaatgtttctgtttgaagaaaatagagggagaaacagaagtcttaagtctgtggcacactgtgtcttcagacagtttgaaggaatgaaaacctagagattttaaatcatgaattgaacatgtaaaattccagtaaaatgtaaaaacggaatatgcatcgctcttaaccttgagcatagtgacttagagacactgtgtatcagttttgccaataagactgtggacttcatgattgttgttgaacttctgggtcaaaactcaaatgaggtgaattttgcctttaaagggtttatttgctgagaaccaactttcaatagtcatgagagaatcaaataatagatgtccgtacaagtagcgcatatatttaaccatttagtttggggctctatattacttgcttgagccttaatcaatgtggttttattcaatggtttgttctttgaatggttgcaaaaactgtagataatcttactgaggactgtacaaacatgaaggtgtggtatcaaacttcaggttgaaactgtttgaagcattataaacattcatttcacaactagattgtataaggatattagctgtgatgagactcactgcattattttttttagtgaattttatgaaatccccgttccattcaacaggcacatgtttaaaagagctttgtcgttggtgttaatgggggaatgtgttccttcattgtatttgggccttttgtattgcactcttgatattaaattaaatgtgcctt

SEQ ID NO: 34420 - DNA, 3656 bp, Homo sapiens
  source 1..3656: mol_type = unassigned DNA
ttactttgtttccttttttatttacttttttggctatgtaaaactaaaagttcaaagacagagaaatcttgtctccaccccccactctttataggcaactaaaaatgttaagtttccaggatatccttccaattcctccccgaaaataagcatatacacataaatattcatattaaatataaatatatatttttatgtatttaagtaaatacataaaagcatatatgcttatttttgcttttgaatacagtgaatacttactacacttaaatatttaagtgaatacttaatacaacctgagactcattccaaagcaacacacgattatttcctgaatctttttaatggttgcattgtgttctactgtatggatgcaccattcccaatcagttccctattaacggatatttgggttatccctaacttttgctatgacaaatagcactgcaataaccttgtatacctattgtttccatgtgtggagctgcaccttcagaataaggttagggttagaagtataactgcaaggtataagaataaacacaagtaattttgtactccgtggaacttgaaccatttttccactcccaccaggaaaggtaatttcaacgtgtatttccattgtaagtgaggtggagcgactttctatgtttaaagaccattacggtattttttctgagaatcatctgttcatgtccttccccattttctcctttggcttttgcactttttgttttcaatttttgagagctcttgtgatacgagttgcaaagattttctccagaccgatctgattcactggaaatatactacgaccatctggaatgtactttaatcttatcctaataaatcaccttactacaagacactcctttggggatgaacaggtttgataaagccggctaaggacagaccaatcaaaagaattacgtgctcttctagtaagtgtttagagactgtttcacgttctccaggtaacaccgccattactcggcggtccagatggcagtcttacttcagggagtctactccacttgcaggacctctttgattgagttcactaaacctcacagggccgccttccccgtgttccagttagcaaggggccctcaacgccgcggacacagcgcaacctccgacgccagagaacaatagctcctcgatgcgtctccagagatgtcaaggaggaacgaacccagcggccaggagactgcgcctcacgactgatgagagggaaggcatcggtttctaagttctcaaaacttacaggtgagcttctgctaagagtaaacgcccgcggctcgccgcccacggcctctctcttgaggtggcacctggtcctccgacacgcggaagcatcacggatgagcgtcacgaacacagagcggccaatcacgcgccgccttcgcccagatccctccgcacgaggcagccccgcagccgcaggtggccccggcgagtacttccaccttcccttcccgtgatgccctggggctgacctccgacctcgctggcccgcccctcccctcggccgcttcccttactgagcttgctgagctccggggcccgcggagctcgcgccaggctcctgggaaaggacggggagtgttaccggggagcagctgctccattgtgcctcgaggccccgatcgggctaggccgacggcctccctcccttcacctttcctctcctggcggggttcggcggcgggcgagtgactgcggccacgcctgaaaggcgactctcctgattcaagatgaccaacgaagaacctcttcccaagaaggttcgattgagtgaaacagacttcaaagttatggcaagagatgagttaattctaagatggaaacaatatgaagcatatgtacaagctttggagggcaagtacacagatcttaactctaatgatgtaactggcctaagagagtctgaagaaaaactaaagcaacaacagcaggagtctgcacgcagggaaaacatccttgtaatgcgactagcaaccaaggaacaagagatgcaagagtgtactactcaaatccagtacctcaagcaagtccagcagccgagcgttgcccaactgagatcaacaatggtagacccagcgatcaacttgtttttcctaaaaatgaaaggtgaactggaacagactaaagacaaactggaacaagcccaaaatgaactgagtgcctggaagtttacgcctgatagccaaacagggaaaaagttaatggcgaagtgtcgaatgcttatccaggagaatcaagagcttggaaggcagctgtcccagggacgtattgcacaacttgaagcagagttggctttacagaagaaatacagtgaggagcttaaaagcagtcaggatgaactgaatgacttcatcatccagcttgatgaagaagtagagggtatgcagagtaccattctagttctgcagcagcagctgaaggagacacgccagcagttggctcagtaccagcagcagcagtctcaggcctctgccccaagtaccagcaggactacagcttctgaacctgtagaacagtcagaggccacaagtaaagactgcagtcgtctgacaaacggaccaagtaatggtagctcctcccgccagaggacgtctgggtctggatttcacagggagggcaacacaaccgaagatgactttccttcttctccagggaatggtaataagtcctccaacagctcagaggagagaactggcagaggaggtagtggttacgtaaatcaactcagtgcggggtatgaaagtgtagactctcccacgggcagtgaaaactctctcacacaccaatcaaatgacacagactccagtcatgaccctcaagaggagaaagcagtgagtgggaaaggtaatcgaactgtgggttcccgccacgttcagaatggcttggactcaagtgtaaatgtacagggttcagttttgtaatattttttcagcaaatttttatacagtgtcatttaatttgggagaggatactgtccagaaaattaatgcatacttttgtcacaatttgcctttttgtgggtgtacgttttggtttttttttgttgttttttttctttgttttttttttcttttctttttttttttttttttttttttttgcttcaatacttctgccgctttggaaattgtaacagttaattactttgaatgttgctaaaaggacattttgtgtagggtcaagttatttttatatgagttaatgtgaaattgtaaatggaaatttttccttaaaatacaacacaatgatgtctgtataaatctgtctgtttagaatctgtgctgtgtaagggcattcgtactcatgctgttactgtacttatgcaccattcagacttgttagagtagatgtgggtttatgactgccaagtttgcccagtacagtagttttttatcactaaaagttggactcattgatggagtcctgtagtagtttcagtgttagatacagttttttccaccatacatctgtgcattttctctttaggtgactgtttaagaaatttgtgtgcatagttactcagtttttatgaactgttgtatcctgttaatgcatattgctctgtgactccagtatatcttacctgtactgaccaaacctaaataaagatttttattgtaactccttaa

SEQ ID NO: 34421 - DNA, 2907 bp, Homo sapiens
  source 1..2907: mol_type = unassigned DNA
agcagagcggacggggcgcgcgggaggcgcgcagagctttcgggctgcaggcgctcgctgcgcctggggaattgggctgtgggcgaggcggtccgggctggcctttatcgctcgctgggcccatcgtttgaaactttatcagcgagtctcgccactcgtcgcagacgcgagcggggggcgggggcgcggcgaggcgccggcggccgtgacgaggcgctcccggagctgagcgcttctgctctgggcacgcatggcgcccgcacacggagtctgacctgatgcagacgcaagggggttaatatgaacgcccctctcggtggaatctggctctggctccctctgctcttgacctggctcacccccgaggtcaactcttcatggtggtacatgagagctacaggtggctcctccagggtgatgtgcgataatgtgccaggcctggtgagcagccagcggcagctgtgtcaccgacatccagatgtgatgcgtgccattagccagggcgtggccgagtggacagcagaatgccagcaccagttccgccagcaccgctggaattgcaacaccctggacagggatcacagcctttttggcagggtcctactccgaagtagtcgggaatctgcctttgtttatgccatctcctcagctggagttgtatttgccatcaccagggcctgtagccaaggagaagtaaaatcctgttcctgtgatccaaagaagatgggaagcgccaaggacagcaaaggcatttttgattggggtggctgcagtgataacattgactatgggatcaaatttgcccgcgcatttgtggatgcaaaggaaaggaaaggaaaggatgccagagccctgatgaatcttcacaacaacagagctggcaggaaggctgtaaagcggttcttgaaacaagagtgcaagtgccacggggtgagcggctcatgtactctcaggacatgctggctggccatggccgacttcaggaaaacgggcgattatctctggaggaagtacaatggggccatccaggtggtcatgaaccaggatggcacaggtttcactgtggctaacgagaggtttaagaagccaacgaaaaatgacctcgtgtattttgagaattctccagactactgtatcagggaccgagaggcaggctccctgggtacagcaggccgtgtgtgcaacctgacttcccggggcatggacagctgtgaagtcatgtgctgtgggagaggctacgacacctcccatgtcacccggatgaccaagtgtgggtgtaagttccactggtgctgcgccgtgcgctgtcaggactgcctggaagctctggatgtgcacacatgcaaggcccccaagaacgctgactggacaaccgctacatgaccccagcaggcgtcaccatccaccttcccttctacaaggactccattggatctgcaagaacactggacctttgggttctttctggggggatatttcctaaggcatgtggcctttatctcaacggaagccccctcttcctccctgggggccccaggatgggggggccacacgctgcacctaaagcctaccctattctatccatctcctggtgttctgcagtcatctcccctcctggcgagttctctttggaaatagcatgacaggctgttcagccgggagggtggtgggcccagaccactgtctccacccaccttgacgtttcttctttctagagcagttggccaagcagaaaaaaaagtgtctcaaaggagctttctcaatgtcttcccacaaatggtcccaattaagaaattccatacttctctcagatgggaacagtaaagaaagcagaatcaactgcccctgacttaactttaacttttgaaaagaccaagacttttgtctgatcaagtggttttacagctaccacccttaggggtaattggtaattacctggagaagaatggctttcaatacccttttaagtttaaaatgtgtatttttcaaggcatttattgccatattaaaatctgatgtaacaaggtggggacgtgtgtcctttggtactatggtgtgttgtatctttgtaagagcaaaagcctcagaaagggattgctttgcattactgtccccttgatataaaaaatctttagggaatgagagttccttctcacttagaatccgaagggaattaaaaagaagatgaatggtctggcaatattctgtaactattgggtgaatatggtggaaaataatttagtggatggaatatcagaagtatatctgtacagatcaagaaaaaaagggagaataaaattcctatctcatattatgcatgtgacccatggaatctcataactgaaagacttgaaggatgaaaattttggggatacaagattggtgaactaaaatgctgacagagaggtttccagagctaactcgtgcctggggcggccttacaataagcagatgcctgaaagaagtcggccacgtccgccgtctgctaatgcccatcacccttcaagcccagtttaaagacctgtcatatttaattgtatttatttgatgcttacaagatgatgtgatactgtagcctaaagcaaatgacacatagcattgcttataaagttggtaaccctgctatattatattgcaaacaaatcgtaacttggagactatgtttaagggactcaactgtaattatgggagcatcagtatgcaaatagtggttggcttctgccatcagccaaaagatgacattcagggaaaatggagaggctgcctgcaccgtttttttatgttaaatgaaagaaaggtgaaatagctacttctcgtcttcttgaaaaatttggttcttattctgtatatgacttccttacagtgctacattaacaggatatttcattacatgcatctggtatcaaa

SEQ ID NO: 34422 - DNA, 1185 bp, Homo sapiens
  source 1..1185: mol_type = unassigned DNA
caactgcagcacagagcgggcaaagccaggcaggccatggggctctgggcgctgttgcctggctgggtttctgctacgctgctgctggcgctggccgctctgcccgcagccctggctgccaacagcagtggccgatggtggggtattgtgaacgtagcctcctccacgaacctgcttacagactccaagagtctgcaactggtactcgagcccagtctgcagctgttgagccgcaaacagcggcgtctgatacgccaaaatccggggatcctgcacagcgtgagtggggggctgcagagtgccgtgcgcgagtgcaagtggcagttccggaatcgccgctggaactgtcccactgctccagggccccacctcttcggcaagatcgtcaaccgaggctgtcgagaaacggcgtttatcttcgctatcacctccgccggggtcacccattcggtggcgcgctcctgctcagaaggttccatcgaatcctgcacgtgtgactaccggcggcgcggccccgggggccccgactggcactgggggggctgcagcgacaacattgacttcggccgcctcttcggccgggagttcgtggactccggggagaaggggcgggacctgcgcttcctcatgaaccttcacaacaacgaggcaggccgtacgaccgtattctccgagatgcgccaggagtgcaagtgccacgggatgtccggctcatgcacggtgcgcacgtgctggatgcggctgcccacgctgcgcgccgtgggcgatgtgctgcgcgaccgcttcgacggcgcctcgcgcgtcctgtacggcaaccgcggcagcaaccgcgcttcgcgggcggagctgctgcgcctggagccggaagacccggcccacaaaccgccctccccccacgacctcgtctacttcgagaaatcgcccaacttctgcacgtacagcggacgcctgggcacagcaggcacggcagggcgcgcctgtaacagctcgtcgcccgcgctggacggctgcgagctgctctgctgcggcaggggccaccgcacgcgcacgcagcgcgtcaccgagcgctgcaactgcaccttccactggtgctgccacgtcagctgccgcaactgcacgcacacgcgcgtactgcacgagtgtctgtgaggcgctgcgcggactcgcccccaggaacgctctcct

SEQ ID NO: 34423 - DNA, 588 bp, Homo sapiens
  source 1..588: mol_type = unassigned DNA
tggcactgggggggctgcagcgacaacattgacttcggccgcctcttcggccgggagttcgtggactccggggagaaggggcgggacctgcgcttcctcatgaaccttcacaacaacgaggcaggccgtacgaccgtattctccgagatgcgccaggagtgcaagtgccacgggatgtccggctcatgcacggtgcgcacgtgctggatgcggctgcccacgctgcgcgccgtgggcgatgtgctgcgcgaccgcttcgacggcgcctcgcgcgtcctgtacggcaaccgcggcagcaaccgcgcttcgcgggcggagctgctgcgcctggagcccgacctcgtctacttcgagaaatcgcccaacttctgcacgtacagcggacgcctgggcacagcaggcacggcagggcgcgcctgtaacagctcgtcgcccgcgctggacggctgcgagctgctctgctgcggcaggggccaccgcacgcgcacgcagcgcgtcaccgagcgctgcaactgcaccttccactggtgctgccacgtcagctgccgcaactgcacgcacacgcgcgtactgcacgagtgtctgtga

SEQ ID NO: 34424 - DNA, 2547 bp, Homo sapiens
  source 1..2547: mol_type = unassigned DNA
cctcagcagggacgctcccacccccagtccccagcggacgcagtggcctcgggactcgtacacgcctccacgccccgccgcgtgacgtcacgtggggtagagccctgagacactaaatggcgggggggtggggggaggaaagggaaggcggcagagctccccgagccgggacagtcacttactctacaggcagtggggcccgacacagacagcgccgcccccgccagccagcctcgcacgccctcggaagcgcaggctcccggcgctgcgctggagggttccccggcaccccagcctcccgtccccagcccgctgcacctccgggccccccttacccttgagaggcaccgggagttgtcgcgggggggcctcgggaaattccccggacccctgtgccaggaggtgcccggttcgcccgctcttcaccccccgccccccccgagggcggtgcccgggggtgctgccccatggagcggggaggcgggcgccgtctgctccgggagccctgacccgagtcggagctgtgtgtcgcagccgccccgaccccccgccgatcatgcgccggcgcccctggctctccagtcccactgggctgtgagccccccactcccagcccgtcagggcctgcgcgccatgggcagcgcccaccctcgcccctggctgcggctccgaccccagccccagccgcggccagcgctctgggtgctcctgttcttcctactgctgctggctgctgccatgcccaggtcagcacccaatgacattctggacctccgcctccccccggagcccgtgctcaatgccaacacagtgtgcctaacattgccaggcctgagccggcggcagatggaggtgtgtgtgcgtcaccctgatgtggctgcctcagccatacagggcatccagatcgccatccacgaatgccaacaccaattcagggaccagcgctggaactgctcaagcctggagactcgcaacaagatcccctatgagagtcccatcttcagcagaggtttccgagagagcgcttttgcctacgccatcgcagcagctggcgtggtgcacgccgtgtccaatgcgtgtgccctgggcaaactgaaggcctgtggctgtgatgcgtcccggcgaggggacgaggaggccttccgtaggaagctgcaccgcttacaactggatgcactgcagcgtggtaagggcctgagccatggggtcccggaacacccagccctgcccacagccagcccaggcctgcaggactcctgggagtggggcggctgcagccccgacatgggcttcggggagcgcttttctaaggactttctggactcccgggagcctcacagagacatccacgcgagaatgaggcttcacaacaaccgagttgggaggcaggcagtgatggagaacatgcggcggaagtgcaagtgccacggcacgtcaggcagctgccagctcaagacgtgctggcaggtgacgcccgagttccgcaccgtgggggcgctgctgcgcagccgcttccaccgcgccacgctcatccggccgcacaaccgcaacggcggccagctggagccgggcccagcgggggcaccctcgccggctccgggcgctcccgggccgcgccgacgggccagccccgccgacctggtctacttcgaaaagtctcccgacttctgcgagcgcgagccgcgcctggactcggcgggcaccgtgggccgcctgtgcaacaagagcagcgccggctcggatggctgcggcagcatgtgctgcggccgcggccacaacatcctgcgccagacgcgcagcgagcgctgccactgccgcttccactggtgctgtttcgtggtctgcgaagagtgccgcatcaccgagtgggtcagcgtctgcaagtgagcggcccggggtcccctgggccctgatcgaggtcccctcctggagcctggccctctgaggcttacggtcttggcaaggcagcatcgccttggctcttgggaagaggagattggaccacatgatcttataggaacccctcagctctgaggtctgtgatcgccggacagtccaggcctgtctgaaccccaccactcacttctgtgggctctaggactgactgggttcttcctccctccccgaagcccagacagttcagttgggctgggggttgctccacaccctaaaacaagcctcagccaggcaacccgtcagtctgtctccatcctttcaccccttccctggagatgggaggtggggaatgaatggaagctgacgggcagagagaggaggattaaaaaaaagaaatagacataactgagctgaagtaattccataaagggcccagacagcctcctccaccattcccttcatcattcatttaacaaatatttattttgcactctctttgcggcactctgggggcggtggggtgcgtgggggtggcaatgcaaggcactgaggccacagatgtgagtaagcgagacacaacacttgtcctcttggaggttacattcttgctggggggaggcatgggcaataaacaagtaaatatacaaacaa

SEQ ID NO: 34425 - DNA, 2274 bp, Homo sapiens
  source 1..2274: mol_type = unassigned DNA
ggaggggctgcagctccgtcagcccggcagagccaccctgagctcggtgagagcaaagccagagcccccagtcctttgctcgccggcttgctagctctctcgatcactccctcccttcctccctcccttcctcccggcggccgcggcggcgctggggaagcggtgaagaggagtggcccggccctggaagaatgcggctctgacaaggggacagaacccagcgcagtctccccacggtttaagcagcactagtgaagcccaggcaacccaaccgtgcctgtctcggaccccgcacccaaaccactggaggtcctgatcgatctgcccaccggagcctccgggcttcgacatgctggaggagccccggccgcggcctccgccctcgggcctcgcgggtctcctgttcctggcgttgtgcagtcgggctctaagcaatgagattctgggcctgaagttgcctggcgagccgccgctgacggccaacaccgtgtgcttgacgctgtccggcctgagcaagcggcagctaggcctgtgcctgcgcaaccccgacgtgacggcgtccgcgcttcagggtctgcacatcgcggtccacgagtgtcagcaccagctgcgcgaccagcgctggaactgctccgcgcttgagggcggcggccgcctgccgcaccacagcgccatcctcaagcgcggtttccgagaaagtgctttttccttctccatgctggctgctggggtcatgcacgcagtagccacggcctgcagcctgggcaagctggtgagctgtggctgtggctggaagggcagtggtgagcaggatcggctgagggccaaactgctgcagctgcaggcactgtcccgaggcaagagtttcccccactctctgcccagccctggccctggctcaagccccagccctggcccccaggacacatgggaatggggtggctgtaaccatgacatggactttggagagaagttctctcgggatttcttggattccagggaagctccccgggacatccaggcacgaatgcgaatccacaacaacagggtggggcgccaggtggtaactgaaaacctgaagcggaaatgcaagtgtcatggcacatcaggcagctgccagttcaagacatgctggagggcggccccagagttccgggcagtgggggcggcgttgagggagcggctgggccgggccatcttcattgatacccacaaccgcaattctggagccttccagccccgtctgcgtccccgtcgcctctcaggagagctggtctactttgagaagtctcctgacttctgtgagcgagaccccactatgggctccccagggacaaggggccgggcctgcaacaagaccagccgcctgttggatggctgtggcagcctgtgctgtggccgtgggcacaacgtgctccggcagacacgagttgagcgctgccattgccgcttccactggtgctgctatgtgctgtgtgatgagtgcaaggttacagagtgggtgaatgtgtgtaagtgagggtcagccttaccttggggctggggaagaggactgtgtgagaggggcgccttttcagccctttgctctgatttccttccaaggtcactcttggtccctggaagcttaaagtatctacctggaaacagctttaggggtggtgggggtcaggtggactctgggatgtgtagccttctccccaacaattggagggtcttgaggggaagctgccacccctcttctgctccttagacacctgaatggactaagatgaaatgcactgtattgctcctcccacttctcaactccagagcccctttaaccctgattcatactccttttggctggggagtccctatagtttcaccactcctctcccttgagggataaccccaggcactgtttggagccataagatctgtatctagaaagagatcacccactcctatgtactatccccaaactcctttactgcagcctgggctccctcttgtgggataatgggagacagtggtagagaggtttttcttgggaaagagacagagtgctgaggggcactctcccctgaatcctcagagagttgtctgtccaggcccttagggaagttgtctccttccattcagatgttaatggggaccctccaaaggaaggggttttcccatgactcttggagcctctttttccttcttcagcaggaagggtgggaagggataatttatcatactgagacttgttcttggttcctgtttgaaactaaaataaattaagttactgga

SEQ ID NO: 34426 - DNA, 1802 bp, Homo sapiens
  source 1..1802: mol_type = unassigned DNA
acccaaccgtgcctgtctcggaccccgcacccaaaccactggaggtcctgatcgatctgcccaccggagcctccgggcttcgacatgctggaggagccccggccgcggcctccgccctcgggcctcgcgggtctcctgttcctggcgttgtgcagtcgggctctaagcaatgagattctgggcctgaagttgcctggcgagccgccgctgacggccaacaccgtgtgcttgacgctgtccggcctgagcaagcggcagctaggcctgtgcctgcgcaaccccgacgtgacggcgtccgcgcttcagggtctgcacatcgcggtccacgagtgtcagcaccagctgcgcgaccagcgctggaactgctccgcgcttgagggcggcggccgcctgccgcaccacagcgccatcctcaagcgcggtttccgagaaagtgctttttccttctccatgctggctgctggggtcatgcacgcagtagccacggcctgcagcctgggcaagctggtgagctgtggctgtggctggaagggcagtggtgagcaggatcggctgagggccaaactgctgcagctgcaggcactgtcccgagggaagctccccgggacatccaggcacgaatgcgaatccacaacaacagggtggggcgccaggtggtaactgaaaacctgaagcggaaatgcaagtgtcatggcacatcaggcagctgccagttcaagacatgctggagggcggccccagagttccgggcagtgggggcggcgttgagggagcggctgggccgggccatcttcattgatacccacaaccgcaattctggagccttccagccccgtctgcgtccccgtcgcctctcaggagagctggtctactttgagaagtctcctgacttctgtgagcgagaccccactatgggctccccagggacaaggggccgggcctgcaacaagaccagccgcctgttggatggctgtggcagcctgtgctgtggccgtgggcacaacgtgctccggcagacacgagttgagcgctgccattgccgcttccactggtgctgctatgtgctgtgtgatgagtgcaaggttacagagtgggtgaatgtgtgtaagtgagggtcagccttaccttggggctggggaagaggactgtgtgagaggggcgccttttcagccctttgctctgatttccttccaaggtcactcttggtccctggaagcttaaagtatctacctggaaacagctttaggggtggtgggggtcaggtggactctgggatgtgtagccttctccccaacaattggagggtcttgaggggaagctgccacccctcttctgctccttagacacctgaatggactaagatgaaatgcactgtattgctcctcccacttctcaactccagagcccctttaaccctgattcatactccttttggctggggagtccctatagtttcaccactcctctcccttgagggataaccccaggcactgtttggagccataagatctgtatctagaaagagatcacccactcctatgtactatccccaaactcctttactgcagcctgggctccctcttgtgggataatgggagacagtggtagagaggtttttcttgggaaagagacagagtgctgaggggcactctcccctgaatcctcagagagttgtctgtccaggcccttagggaagttgtctccttccattcagatgttaatggggaccctccaaaggaaggggttttcccatgactcttggagcctctttttccttcttcagcaggaagggtgggaaggga

SEQ ID NO: 34427 - DNA, 559 bp, Homo sapiens
  source 1..559: mol_type = unassigned DNA
caagtgtttgtgagtctgtgtgtctgagtttgcaagtgagtgtgtgtctgtgtgccgggcgttgtgtctgattgggcaaggttccaggggtgctcgcttgagtcctgagctgggacaacgccttgactcttcttctttaagacctccaagcctcagggactctgggaatcaaggggtgtttcttcttgttttgtttgaggaggaatgagaagggtcctgatcgatctgcccaccggagcctccgggcttcgacatgctggaggagccccggccgcggcctccgccctcgggcctcgcgggtctcctgttcctggcgttgtgcagtcgggctctaagcaatgagattctgggcctgaagttgcctggcgagccgccgctgacggccaacaccgtgtgcttgacgctgtccggcctgagcaagcggcagctaggcctgtgcctgcgcaaccccgacgtgacggcgtccgcgcttcagggtctgcacatcgcggtccacgagtgtcagcaccagctgcgcgaccagcgctggaactgctccgcgcttgagggcggcggccgc

SEQ ID NO: 34428 - DNA, 1489 bp, Homo sapiens
  source 1..1489: mol_type = unassigned DNA
gcgcttctgacaagcccgaaagtcatttccaatctcaagtggactttgttccaactattgggggcgtcgctccccctcttcatggtcgcgggcaaacttcctcctcggcgcctcttctaatggagccccacctgctcgggctgctcctcggcctcctgctcggtggcaccagggtcctcgctggctacccaatttggtggtccctggccctgggccagcagtacacatctctgggctcacagcccctgctctgcggctccatcccaggcctggtccccaagcaactgcgcttctgccgcaattacatcgagatcatgcccagcgtggccgagggcgtgaagctgggcatccaggagtgccagcaccagttccggggccgccgctggaactgcaccaccatagatgacagcctggccatctttgggcccgtcctcgacaaagccacccgcgagtcggccttcgttcacgccatcgcctcggccggcgtggccttcgccgtcacccgctcctgcgccgagggcacctccaccatttgcggctgtgactcgcatcataaggggccgcctggcgaaggctggaagtggggcggctgcagcgaggacgctgacttcggcgtgttagtgtccagggagttcgcggatgcgcgcgagaacaggccggacgcgcgctcggccatgaacaagcacaacaacgaggcgggccgcacgactatcctggaccacatgcacctcaaatgcaagtgccacgggctgtcgggcagctgtgaggtgaagacctgctggtgggcgcagcctgacttccgtgccatcggtgacttcctcaaggacaagtatgacagcgcctcggagatggtagtagagaagcaccgtgagtcccgaggctgggtggagaccctccgggccaagtactcgctcttcaagccacccacggagagggacctggtctactacgagaactcccccaacttttgtgagcccaacccagagacgggttcctttggcacaagggaccggacttgcaatgtcacctcccacggcatcgatggctgcgatctgctctgctgtggccggggccacaacacgaggacggagaagcggaaggaaaaatgccactgcatcttccactggtgctgctacgtcagctgccaggagtgtattcgcatctacgacgtgcacacctgcaagtagggcaccagggcgctgggaaggggtgaagtgtgtggctgggcggattcagcgaagtctcatgggaagcaggacctagagccgggcacagccctcagcgtcagacagcaaggaactgtcaccagccgcacgcgtggtaaatgacccagacccaactcgcctgtggacggggaggctctccctctctctcatcttacatttctcaccctactctggatggtgtgtggtttttaaagaagggggctttctttttagttctctagggtctgataggaacagacctgaggcttatctttgcacatgtt

SEQ ID NO: 34429 - DNA, 2932 bp, Homo sapiens
  source 1..2932: mol_type = unassigned DNA
agctcccagggcccggccccccccggcgctcacgctctcggggcggactcccggccctccgcgccctctcgcgcggcgatggccccactcggatacttcttactcctctgcagcctgaagcaggctctgggcagctacccgatctggtggtcgctggctgttgggccacagtattcctccctgggctcgcagcccatcctgtgtgccagcatcccgggcctggtccccaagcagctccgcttctgcaggaactacgtggagatcatgcccagcgtggccgagggcatcaagattggcatccaggagtgccagcaccagttccgcggccgccggtggaactgcaccaccgtccacgacagcctggccatcttcgggcccgtgctggacaaagctaccagggagtcggcctttgtccacgccattgcctcagccggtgtggcctttgcagtgacacgctcatgtgcagaaggcacggccgccatctgtggctgcagcagccgccaccagggctcaccaggcaagggctggaagtggggtggctgtagcgaggacatcgagtttggtgggatggtgtctcgggagttcgccgacgcccgggagaaccggccagatgcccgctcagccatgaaccgccacaacaacgaggctgggcgccaggccatcgccagccacatgcacctcaagtgcaagtgccacgggctgtcgggcagctgcgaggtgaagacatgctggtggtcgcaacccgacttccgcgccatcggtgacttcctcaaggacaagtacgacagcgcctcggagatggtggtggagaagcaccgggagtcccgcggctgggtggagaccctgcggccgcgctacacctacttcaaggtgcccacggagcgcgacctggtctactacgaggcctcgcccaacttctgcgagcccaaccctgagacgggctccttcggcacgcgcgaccgcacctgcaacgtcagctcgcacggcatcgacggctgcgacctgctgtgctgcggccgcggccacaacgcgcgagcggagcggcgccgggagaagtgccgctgcgtgttccactggtgctgctacgtcagctgccaggagtgcacgcgcgtctacgacgtgcacacctgcaagtaggcaccggccgcggctccccctggacggggcgggccctgcctgagggtgggcttttccctgggtggagcaggactcccacctaaacggggcagtactcctccctgggggcgggactcctccctgggggtggggctcctacctgggggcagaactcctacctgaaggcagggctcctccctggagctagtgtctcctctctggtggctgggctgctcctgaatgaggcggagctccaggatggggaggggctctgcgttggcttctccctggggacggggctcccctggacagaggcggggctacagattgggcggggcttctcttgggtgggacagggcttctcctgcgggggcgaggcccctcccagtaagggcgtggctctgggtgggcggggcactaggtaggcttctacctgcaggcggggctcctcctgaaggaggcggggctctaggatggggcacggctctggggtaggctgctccctgagggcggagcgcctccttaggagtggggttttatggtggatgaggcttcttcctggatggggcagagcttctcctgaccagggcaaggccccttccacgggggctgtggctctgggtgggcgtggcctgcataggctccttcctgtgggtggggcttctctgggaccaggctccaatggggcggggcttctctccgcgggtgggactcttccctgggaaccgccctcctgattaaggcgtggcttctgcaggaatcccggctccagagcaggaaattcagcccaccagccacctcatccccaaccccctgtaaggttccatccacccctgcgtcgagctgggaaggttccatgaagcgagtcgggtccccaacccgtgcccctgggatccgagggcccctctccaagcgcctggctttggaatgctccaggcgcgccgacgcctgtgccaccccttcctcagcctggggtttgaccacccacctgaccaggggccctacctggggaaagcctgaagggcctcccagcccccaaccccaagaccaagcttagtcctgggagaggacagggacttcgcagaggcaagcgaccgaggccctcccaaagaggcccgccctgcccgggctcccacaccgtcaggtactcctgccagggaactggcctgctgcgccccaggccccgcccgtctctgctctgctcagctgcgcccccttctttgcagctgcccagcccctcctccctgccctcgggtctccccacctgcactccatccagctacaggagagatagaagcctctcgtcccgtccctccctttcctccgcctgtccacagccccttaagggaaaggtaggaagagaggtccagccccccaggctgcccagagctgctggtctcatttgggggcgttcgggaggtttggggggcatcaaccccccgactgtgctgctcgcgaaggtcccacagccctgagatgggccggcccccttcctggcccctcatggcgggactggagaaatggtccgctttcctggagccaatggcccggcccctcctgactcatccgcctggcccgggaatgaatggggaggccgctgaacccacccggcccatatccctggttgcctcatggccagcgcccctcagcctctgccactgtgaaccggctcccaccctcaaggtgcggggagaagaagcggccaggcggggcgccccaagagcccaaaagagggcacaccgccatcctctgcctcaaattctgcgtttttggttttaatgttatatctgatgctgctatatccactgtccaacgg

SEQ ID NO: 34430 - DNA, 1368 bp, Homo sapiens
  source 1..1368: mol_type = unassigned DNA
acgctctcggggcggactcccggccctccgcgccctctcgcgcggcgatggccccactcggatacttcttactcctctgcagcctgaagcaggctctgggcagctacccgatctggtggtcgctggctgttgggccacagtattcctccctgggctcgcagcccatcctgtgtgccagcatcccgggcctggtccccaagcagctccgcttctgcaggaactacgtggagatcatgcccagcgtggccgagggcatcaagattggcatccaggagtgccagcaccagttccgcggccgccggtggaactgcaccaccgtccacgacagcctggccatcttcgggcccgtgctggacaaagctaccagggagtcggcctttgtccacgccattgcctcagccggtgtggcctttgcagtgacacgctcatgtgcagaaggcacggccgccatctgtggctgcagcagccgccaccagggctcaccaggcaagggctggaagtggggtggctgtagcgaggacatcgagtttggtgggatggtgtctcgggagttcgccgacgcccgggagaaccggccagatgcccgctcagccatgaaccgccacaacaacgaggctgggcgccaggccatcgccagccacatgcacctcaagtgcaagtgccacgggctgtcgggcagctgcgaggtgaagacatgctggtggtcgcaacccgacttccgcgccatcggtgacttcctcaaggacaagtacgacagcgcctcggagatggtggtggagaagcaccgggagtcccgcggctgggtggagaccctgcggccgcgctacacctacttcaaggtgcccacggagcgcgacctggtctactacgaggcctcgcccaacttctgcgagcccaaccctgagacgggctccttcggcacgcgcgaccgcacctgcaacgtcagctcgcacggcatcgacggctgcgacctgctgtgctgcggccgcggccacaacgcgcgagcggagcggcgccgggagaagtgccgctgcgtgttccactggtgctgctacgtcagctgccaggagtgcacgcgcgtctacgacgtgcacacctgcaagaatcccggctccagagcaggaaattcagcccaccagccacctcatccccaaccccctgtaaggttccatccacccctgcgtcgagctgggaaggttccatgaagcgagtcgggtccccaacccgtgcccctgggatccgagggcccctctccaagcgcctggctttggaatgctccaggcgcgccgacgcctgtgccaccccttcctcagcctggggtttgaccacccacctgaccaggggccctacctggggaaagcctgaagg

SEQ ID NO: 34431 - DNA, 1182 bp, Homo sapiens
  source 1..1182: mol_type = unassigned DNA
gcggccgcagccgctgccccgggccgggcgcccgcggcggcaccatgagtccccgctcgtgcctgcgttcgctgcgcctcctcgtcttcgccgtcttctcagccgccgcgagcaactggctgtacctggccaagctgtcgtcggtggggagcatctcagaggaggagacgtgcgagaaactcaagggcctgatccagaggcaggtgcagatgtgcaagcggaacctggaagtcatggactcggtgcgccgcggtgcccagctggccattgaggagtgccagtaccagttccggaaccggcgctggaactgctccacactcgactccttgcccgtcttcggcaaggtggtgacgcaagggactcgggaggcggccttcgtgtacgccatctcttcggcaggtgtggcctttgcagtgacgcgggcgtgcagcagtggggagctggagaagtgcggctgtgacaggacagtgcatggggtcagcccacagggcttccagtggtcaggatgctctgacaacatcgcctacggtgtggccttctcacagtcgtttgtggatgtgcgggagagaagcaagggggcctcgtccagcagagccctcatgaacctccacaacaatgaggccggcaggaaggccatcctgacacacatgcgggtggaatgcaagtgccacggggtgtcaggctcctgtgaggtaaagacgtgctggcgagccgtgccgcccttccgccaggtgggtcacgcactgaaggagaagtttgatggtgccactgaggtggagccacgccgcgtgggctcctccagggcactggtgccacgcaacgcacagttcaagccgcacacagatgaggacctggtgtacttggagcctagccccgacttctgtgagcaggacatgcgcagcggcgtgctgggcacgaggggccgcacatgcaacaagacgtccaaggccatcgacggctgtgagctgctgtgctgtggccgcggcttccacacggcgcaggtggagctggctgaacgctgcagctgcaaattccactggtgctgcttcgtcaagtgccggcagtgccagcggctcgtggagttgcacacgtgccgatgaccgcctgcctagccctgcgccggcaaccacctagtggcccagggaaggccgataatttaaacagtctcccaccacctacccc

SEQ ID NO: 34432 - DNA, 632 bp, Homo sapiens
  source 1..632: mol_type = unassigned DNA
gccgcgcgcgccccggcccgcccgcgggcgcccacctgcagccccgacgggaggccccccgcggccgcagccgctgccccgggccgggcgcccgcggcggcaccatgagtccccgctcgtgcctgcgttcgctgcgcctcctcgtcttcgccgtcttctcagccgccgcgagcaactggctgtacctggccaagctgtcgtcggtggggagcatctcagaggaggagacgtgcgagaaactcaagggcctgatccagaggcaggtgcagatgtgcaagcggaacctggaagtcatggactcggtgcgccgcggtgcccagctggccattgaggagtgccagtaccagttccggaaccggcgctggaactgctccacactcgactccttgcccgtcttcggcaaggtggtgacgcaaggtggcaaagcctggcatggaggagacagtggatgtcatctactgacagaaagcaggtcaggggagaggactcaaaggcgcaaggaaggaggtagcctggggcaatgctggcctgaagccatcgtgggtactcaggaccccatgagaagccctccttacctttgggggaggaaccaagggggcacccacaccggctcagcatctgagggacactga

SEQ ID NO: 34433 - DNA, 680 bp, Homo sapiens
  source 1..680: mol_type = unassigned DNA
gtacctggccaagctgtcgtcggtggggagcatctcagaggaggagacgtgcgagaaactcaagggcctgatccagaggcaggtgcagatgtgcaagcggaacctggaagtcatggactcggtgcgccgcggtgcccagctggccattgaggagtgccagtaccagttccggaaccggcgctggaactgctccacactcgactccttgcccgtcttcggcaaggtggtgacgcaaggtggcaaagcctggcatggaggagacagtggatgtcatctactgacagaaagcaggtcaggggagaggactcaaaggcgcaaggaaggaggtagcctggggcaatgctggcctgaagccatcgtgggtactcaggaccccatgagaagccctccttacctttgggggaggaaccaagggggcacccacaccggctcagcatctgagggacactgagattcctactaggcctgggtggtacctgctctggactaaagtctgactggtggagtcgaacgtccaatcccctttggagagggacatgtcaaggtgccgagactaagccagtcacactcggcaggtgccagtcacacctggagaaggaggctgagctctgcccactcatcaaactcctcccttttacgtttttggttttcttccctagtaaaattcctcttggaaactt

SEQ ID NO: 34434 - DNA, 482 bp, Homo sapiens
  source 1..482: mol_type = unassigned DNA
tggtgagtgagccaagagagcttccctaaactcctcctgtcctcccaatcacagcgtcttaagcccacttcccggatgagaaaacggaggctcagagtcaagaccctgctgcctggggcgcgcccagaccttgtggctagccagaagcgaggtttcggattcccacagtctcgggccactgtcccaagctgcccaaagctggggaggccccgtccagctcccggaaggctgtagggaggtacctggccaagctgtcgtcggtggggagcatctcagaggaggagacgtgcgagaaactcaagggcctgatccagaggcaggtgcagatgtgcaagcggaacctggaagtcatggactcggtgcgccgcggtgcccagctggccattgaggagtgccagtaccagttccggaaccggcgctggaactgctccacactcgactccttgcccgtcttcggcaaggtggtgacgcaaggtggcaaa

SEQ ID NO: 34435 - DNA, 1162 bp, Homo sapiens
  source 1..1162: mol_type = unassigned DNA
gagaaaacggaggctcagagtcaagaccctgctgcctggggcgcgcccagaccttgtggctagccagaagcgaggtttcggattcccacagtctcgggccactgtcccaagctgcccaaagctggggaggccccgtccagctcccggaaggctgtagggaggtacctggccaagctgtcgtcggtggggagcatctcagaggaggagacgtgcgagaaactcaagggcctgatccagaggcaggtgcagatgtgcaagcggaacctggaagtcatggactcggtgcgccgcggtgcccagctggccattgaggagtgccagtaccagttccggaaccggcgctggaactgctccacactcgactccttgcccgtcttcggcaaggtggtgacgcaagggactcgggaggcggccttcgtgtacgccatctcttcggcaggtgtggcctttgcagtgacgcgggcgtgcagcagtggggagctggagaagtgcggctgtgacaggacagtgcatggggtcagcccacagggcttccagtggtcaggatgctctgacaacatcgcctacggtgtggccttctcacagtcgtttgtggatgtgcgggagagaagcaagggggcctcgtccagcagagccctcatgaacctccacaacaatgaggccggcaggaaggccatcctgacacacatgcgggtggaatgcaagtgccacggggtgtcaggctcctgtgaggtaaagacgtgctggcgagccgtgccgcccttccgccaggtgggtcacgcactgaaggagaagtttgatggtgccactgaggtggagccacgccgcgtgggctcctccagggcactggtgccacgcaacgcacagttcaagccgcacacagatgaggacctggtgtacttggagcctagccccgacttctgtgagcaggacatgcgcagcggcgtgctgggcacgaggggccgcacatgcaacaagacgtccaaggccatcgacggctgtgagctgctgtgctgtggccgcggcttccacacggcgcaggtggagctggctgaacgctgcagctgcaaattccactggtgctgcttcgtcaagtgccggcagtgccagcggctcgtggagttgcacacgtgccgatgaccgcctgcctagccctgcgccg

SEQ ID NO: 34436 - DNA, 1703 bp, Homo sapiens
  source 1..1703: mol_type = unassigned DNA
tccgcaggagacacaggcgctggctgccccgtccgctctccgcctccgccgcgccctcctcgcccgggatgggcccccccgccgccgccggatccctcgcctcccggccgccgccgttgcgctcgccgcgctcgcactgaagcccgggccctcgcgcgccgcggttcgccccgcagcctcgccccctgcccacccgggcggccgtagggcggtcacgatgctgccgcccttaccctcccgcctcgggctgctgctgctgctgctcctgtgcccggcgcacgtcggcggactgtggtgggctgtgggcagccccttggttatggaccctaccagcatctgcaggaaggcacggcggctggccgggcggcaggccgagttgtgccaggctgagccggaagtggtggcagagctagctcggggcgcccggctcggggtgcgagagtgccagttccagttccgcttccgccgctggaattgctccagccacagcaaggcctttggacgcatcctgcaacaggacattcgggagacggccttcgtgttcgccatcactgcggccggcgccagccacgccgtcacgcaggcctgttctatgggcgagctgctgcagtgcggctgccaggcgccccgcgggcgggcccctccccggccctccggcctgcccggcacccccggaccccctggccccgcgggctccccggaaggcagcgccgcctgggagtggggaggctgcggcgacgacgtggacttcggggacgagaagtcgaggctctttatggacgcgcggcacaagcggggacgcggagacatccgcgcgttggtgcaactgcacaacaacgaggcgggcaggctggccgtgcggagccacacgcgcaccgagtgcaaatgccacgggctgtcgggatcatgcgcgctgcgcacctgctggcagaagctgcctccatttcgcgaggtgggcgcgcggctgctggagcgcttccacggcgcctcacgcgtcatgggcaccaacgacggcaaggccctgctgcccgccgtccgcacgctcaagccgccgggccgagcggacctcctctacgccgccgattcgcccgacttctgcgcccccaaccgacgcaccggctcccccggcacgcgcggtcgcgcctgcaatagcagcgccccggacctcagcggctgcgacctgctgtgctgcggccgcgggcaccgccaggagagcgtgcagctcgaagagaactgcctgtgccgcttccactggtgctgcgtagtacagtgccaccgctgccgtgtgcgcaaggagctcagcctctgcctgtgacccgccgcccggccgctagactgacttcgcgcagcggtggctcgcacctgtgggacctcagggcaccggcaccgggcgcctctcgccgctcgagcccagcctctccctgccaaagcccaactcccagggctctggaaatggtgaggcgaggggcttgagaggaacgcccacccacgaaggcccagggcgccagacggccccgaaaaggcgctcggggagcgtttaaaggacactgtacaggccctccctccccttggcctctaggaggaaacagttttttagactggaaaaaagccagtctaaaggcctctggatactgggctccccagaactgctggccacaggatggtgggtgaggttagtatcaataaagatatttaaaccacca

SEQ ID NO: 34437 - DNA, 4041 bp, Homo sapiens
  source 1..4041: mol_type = unassigned DNA
gaggggcgggggctggaggcagcagcgcccccgcactccccgcgtctcgcacacttgcaccggtcgctcgcgcgcagcccggcgtcgccccacgccgcgctcgctcctccctccctcctcccgctccgtggctcccgtgctcctggcgaggctcaggcgcggagcgcgcggacgggcgcaccgacagacggccccggggacgcctcggctcgcgcctcccgggcgggctatgttgattgccccgccggggccggcccgcgggatcagcacagcccggcccgcggccccggcggccaatcgggactatgaaccggaaagcgcggcgctgcctgggccacctctttctcagcctgggcatggtctacctccggatcggtggcttctcctcagtggtagctctgggcgcaagcatcatctgtaacaagatcccaggcctggctcccagacagcgggcgatctgccagagccggcccgacgccatcatcgtcataggagaaggctcacaaatgggcctggacgagtgtcagtttcagttccgcaatggccgctggaactgctctgcactgggagagcgcaccgtcttcgggaaggagctcaaagtggggagccgggaggctgcgttcacctacgccatcattgccgccggcgtggcccacgccatcacagctgcctgtacccagggcaacctgagcgactgtggctgcgacaaagagaagcaaggccagtaccaccgggacgagggctggaagtggggtggctgctctgccgacatccgctacggcatcggcttcgccaaggtctttgtggatgcccgggagatcaagcagaatgcccggactctcatgaacttgcacaacaacgaggcaggccgaaagatcctggaggagaacatgaagctggaatgtaagtgccacggcgtgtcaggctcgtgcaccaccaagacgtgctggaccacactgccacagtttcgggagctgggctacgtgctcaaggacaagtacaacgaggccgttcacgtggagcctgtgcgtgccagccgcaacaagcggcccaccttcctgaagatcaagaagccactgtcgtaccgcaagcccatggacacggacctggtgtacatcgagaagtcgcccaactactgcgaggaggacccggtgaccggcagtgtgggcacccagggccgcgcctgcaacaagacggctccccaggccagcggctgtgacctcatgtgctgtgggcgtggctacaacacccaccagtacgcccgcgtgtggcagtgcaactgtaagttccactggtgctgctatgtcaagtgcaacacgtgcagcgagcgcacggagatgtacacgtgcaagtgagccccgtgtgcacaccaccctcccgctgcaagtcagattgctgggaggactggaccgtttccaagctgcgggctccctggcaggatgctgagcttgtcttttctgctgaggagggtacttttcctgggtttcctgcaggcatccgtgggggaaaaaaaatctctcagagccctcaactattctgttccacacccaatgctgctccaccctcccccagacacagcccaggtccctccgcggctggagcgaagccttctgcagcaggaactctggacccctgggcctcatcacagcaatatttaacaatttattctgataaaaataatattaatttatttaattaaaaagaattcttccacctcgtcgggatccgttttctgcaatcaaagtggactgcttgctttcctagcaggatgattttgttgctaggacaaggagccgtgtagaagtgtacataactattctttatgcagatatttctactagctgattttgcaggtacccaccttgcagcactagatgtttaagtacaagaggagacatcttttatgcatatatagatatacacacacacatttttttttttttttttgctgtttgctgctacttatccagaaatttaagctggtccagatttggagacgttttttccagagtatgttttccatccttttgccctccccagttcaaacttcaccattagaaaaatccagtttggaataaatagagaggaaaaataataaattcccagcagtttccatctttcggaaagtgagccaccggataagagagaatattttgtaagagactatttttatatgaatattttatttatatcgagtctactgtatcattccacggcctgtgcttcttcttaattctggtactcacttaggggtaaggaggggcgatgcctggttgtggcgtcaggccccatggggccccttgcacagctggattcttgagttctgtttgccaagtgggcacaagctgcccctggatgcctggggttgaggcatcatctcatccatgttagccgggaaagaaatcaaatccccagcctcagcctgttaagctcaggcctttcaagcagggccactgagtggtagcttcgaaatgagtcactgtggtgggtggtcatcgtgcccctcacagggacttgaccgtcatcctgcagcagaggccagttcagggagccccacacctcaccaagacactagccattgcctgcgtgtcctggaaggtgagatgtagtcctcaggtgaggtgacccaaagcagatggggtgaggggccgatgagcagccgggcccagcggggcttcctggatatcctgctcccaaggccaagcagcagagagaggttcaagtgaggccactttgctttgggtccagctacacccagagcctcagcctagaaagctgtcctccagcaggctgggggtgttctaatatgtgtccgtttgcatttccggtgtgtgtgtgtgtgtgtgtgtgtgtgtgtgtgtgtgtgtgtgtgtgtactgtatcttcttagggacttgagtgtagtcacgtgactttgcgccttgcagcgcctccgccgtactcgtgtgtgtatgtgtctgtgtgtttccgtgctacccaagcgtctgtttctctccgtgtgcctgggagatcaggtctcaggcatggagctgcatgcctttgcatctgctgctccccagagtctctgcttgcatgtgagggctggtggtatgaggcagacagcagagattgtgtgtgattgtgttgaaccgccaagagaaggcacctctgaactctgtccccacacccatgggtgaaaaccagacacctctgagaccacagcacagccccatggccccacctgctgggagcccttcagtatctaggctgtgtctgactcctcagtgtccacactgagcctggatcacagcatgggcaaataaaagtgactggatggttgcatggtttcttcccttggacatttttttccatttttcttttacttgggtgtctggaggagtgggcatgtgaaggggccatggagtgaatggatggagggatggatgaatgtgtgagtaggtaggtaggtgaatgggtagatgtgtggatggataagtaggtgggtgggtgaatggataaatggatggatgggtagatggatggatgaagggataaacagatgggtggatggattgataagtgagcggatgaatggatgaatagctaggaaagtgggtgggtggatgagggtgggttgatgaggtaggtacacctacagataggtaagtgagcagtttcttgggagtccacaggtcacattttatctttgctttggaaaacctagcagatctgccatgatcaggatggcttcccgaccttgcaacccttctgcttctgacctccttggcacctgggaatgggggagattctgaccagcctccccagatgagtgttcaatgatagttacataaacacagtctcagaagagtcatccctgtgtcctccctcactgtgggttcccagctctggggcctgccctctctcgggtgccctgttcagctgtgctctgagccccagtttctccacctgtgaaatcagaataacacctacctcacagggctgttgtgaggatcctcccagtaatgactgtatggcactttgagttgcaaagcaatggatgaa

SEQ ID NO: 34438 - DNA, 3919 bp, Homo sapiens
  source 1..3919: mol_type = unassigned DNA
attggccgccgcggcgctcggcgaggcgctcacggcctcaggcggctgcgcctagtgcaggctgcacccgcccgccagccgcgcccgggcccccggcccgcgcttgcaggggtccacggtcgctcaaccgggcttcgaggtcgcggcccccagcctgggtcaattccccgggctcacgcggcggtggcggcggcggcatcccgggctcaccatggtggcagcgcgcgccgagtgcccgcgcgtcgccggccgcccgagccgcagcgcgggctgagcgcagtctgcccgcagccccctggcccctgcccggccctgccgggcccgcgcgtcccctccggccgccgctgtctatggcgcagcccccctccctggatcatgcacagaaactttcgcaagtggattttctacgtgtttctctgctttggcgtcctgtacgtgaagctcggagcactgtcatccgtggtggccctgggagccaacatcatctgcaacaagattcctggcctagccccgcggcagcgtgccatctgccagagtcggcccgatgccatcattgtgattggggagggggcgcagatgggcatcaacgagtgccagtaccagttccgcttcggacgctggaactgctctgccctcggcgagaagaccgtcttcgggcaagagctccgagtagggagccgtgaggctgccttcacgtacgccatcaccgcggctggcgtggcgcacgccgtcaccgctgcctgcagccaagggaacctgagcaactgcggctgcgaccgcgagaagcagggctactacaaccaagccgagggctggaagtggggcggctgctcggccgacgtgcgttacggcatcgacttctcccggcgcttcgtggacgctcgggagatcaagaagaacgcgcggcgcctcatgaacctgcataacaatgaggccggcaggaaggttctagaggaccggatgcagctggagtgcaagtgccacggcgtgtctggctcctgcaccaccaaaacctgctggaccacgctgcccaagttccgagaggtgggccacctgctgaaggagaagtacaacgcggccgtgcaggtggaggtggtgcgggccagccgtctgcggcagcccaccttcctgcgcatcaaacagctgcgcagctatcagaagcccatggagacagacctggtgtacattgagaagtcgcccaactactgcgaggaggacgcggccacgggcagcgtgggcacgcagggccgtctctgcaaccgcacgtcgcccggcgcggacggctgtgacaccatgtgctgcggccgaggctacaacacccaccagtacaccaaggtgtggcagtgcaactgcaaattccactggtgctgcttcgtcaagtgcaacacctgcagcgagcgcaccgaggtcttcacctgcaagtgaggccaggcccggaggcggccgcgggcaccctggaacccggcggcattttgcacatccactcctcaccttccctgccttggtgctgccagcagcagacatagacgggtgcagaagcggggagctccaggtgcaggagggcaccggccggggcccacgccctctgcccgcctccctggggctccttcctgccacctcctcccatcacctcctgcggcagaacagcacccgtgacccacccagagagcaaggccaggggtcttggtgctccccgacggggcccggcaagttctctttcttctctctgggaaaatgaacgtccaggacacacctgtatcccagagagcaaagtgatgaggagactgagcgtccccagccccacctggcggcatggacacagaaaagctacgccggctggcctctccagaccagttcccaggctgggtctgccgctgggccctggggcggtggggacagatgttgacacaaattatttatgttttcttagtatcagaagaggattctcggcactaacacatagccagtcctaactccgtactctgtgtcagcccatcccctagacaccctctgtttcctttcccggccccacctggccggccctctgcccctgcagagctgaggcagcctggggttgatggggaccacgcggtgcctgcaggtcctagaagtgagctgggcaggggctcttcagaccacacagccctgaccgggccttggaggagagccatggacaggctcctccatgccgtctttccttcttttgaaaatcctatcaatggctgggcgcggtggctcacacctgtaatcccagcactttgggagaccgaggcaggtggatcacctgaggtcaggagttcgagaccagcctggccaacgtggtgaaaccctgtctctactaaaaatacaaaaattagctgggcgtggtggcgtgcacctgtaatcccagctactcaggaggctgagacaggacacttgcttgaacccgggaggtggaggttgcaatgagccaagattgtgccactgtattccaacttgggtgacagagcacgactctgtctcaaaaaaagaaaagaaaataatatcaagcaaatcaaaatatcacccacgtcaggttccaggagtccttcgttccctccctcatcctgtcaccctcccggcctggcacctccagtttacagagacccccttccccctggagccagcctgacccctgggacagtgctgccgcgggggtcaggcaggtggtgagtggtcagggatgtttgtcccacttgacagatgggaactctgaggcccagagtggcacaaggacctaccagagaccctgcagctgtgactggaggcttccacctttctcctgcccagcctggggctctggacctgggagaacacatcaggatgcccggggtggcagtaggtagctcccatgccttgaggcacttggctgctccctccaccccctgacagcctcattggggcctgcactcccctcggtgcctttgaggcttcgcctagccctgtcctggtccttttaccctgaccccagtgctgagaaaatctggatccagagctggacatgtcctttctggatgctcccacccctgtctctgaggagcatgagtgacagagggaggaacttgtccgaggccagagaggatggtctgcagctggctcctggtgcacccccactgcccacggcctggcccccatttagggtgtgttctcttggaagcccgtaggaatgtgttcttgagcagccgacaagccaagggcctgggctcagcctggggcaagtgggtccctcctgggctctggccctgtggtccagcccatgtgcctctaaccatgcctggacgctctgagtctccgggccaccgtgaatgccccaccctcagcctggccccatccccttaccttccccaagtcccagaacacacctgagtccataggcccggcagcctctgcaaggaacctggttaacttatgttgttatatagcgtcgaaatgtctatagtgtctttaaattattgtgacctacactgggtaccggagagggggatggctgcggcccccatccctcatcccccatcccatcccatccctcatctcatccctcatcccatcccccatcccatccctgaccccatcccccatcccatccctcatccctattccccatacccaccccccatcccatcccccatctcccgaaccaggctcctcctgcttcaacagacccttggggcccctgatgccaccgagacactcgcactgtcccttggctgccgggcaccccactgagcccctgcccaccccaaagtctgccagcaacaggccctttgcctgggtgagacgggggtcagggtggcccagatgggggtgatggcgaccaaggtgctgcgtccccacccttctgacggcagcctcccctggaggggagtgctcggcccaataaaagctggaatcggaaaagtga

SEQ ID NO: 34439 - DNA, 2285 bp, Homo sapiens
  source 1..2285: mol_type = unassigned DNA
gggtgtcccagccaaggcaacttgggcaagccctggaggcggctcccaccgcacgctccggtcagcctcccctttaaaaaaacccgccgggggaggaggcggatgtaggggcggcccgtccaatggcagctgcgcgcctcgggagacttggagaagtgagccagagcgagcgacagagccggttcgcaccgacagacggacggaggtccagaccgcagccaaggcgcgcccgctgcccccggccgggtccccgccccgcactccagccccagctcccgccgctgccccagacccagcgccatgcgcggccctagcggcggggcacgggcgacaactgcgcccgggcccacgagacccggcccctagcgcccagcgccgccgccctgcatcggggagctccgcggggaccccggcctcagctggcccaggcgcccggcccgcggagcctgttcagccccgccaggcacgccggcccaccatgcttctactgtcgccgcgcagcgcgctcgtctccgtctattgcccgcagatctttctcctcctgtccagcggcagctacttagcactgtcatccgtggtggccctgggagccaacatcatctgcaacaagattcctggcctagccccgcggcagcgtgccatctgccagagtcggcccgatgccatcattgtgattggggagggggcgcagatgggcatcaacgagtgccagtaccagttccgcttcggacgctggaactgctctgccctcggcgagaagaccgtcttcgggcaagagctccgagtagggagccgtgaggctgccttcacgtacgccatcaccgcggctggcgtggcgcacgccgtcaccgctgcctgcagccaagggaacctgagcaactgcggctgcgaccgcgagaagcagggctactacaaccaagccgagggctggaagtggggcggctgctcggccgacgtgcgttacggcatcgacttctcccggcgcttcgtggacgctcgggagatcaagaagaacgcgcggcgcctcatgaacctgcataacaatgaggccggcaggaaggttctagaggaccggatgcagctggagtgcaagtgccacggcgtgtctggctcctgcaccaccaaaacctgctggaccacgctgcccaagttccgagaggtgggccacctgctgaaggagaagtacaacgcggccgtgcaggtggaggtggtgcgggccagccgtctgcggcagcccaccttcctgcgcatcaaacagctgcgcagctatcagaagcccatggagacagacctggtgtacattgagaagtcgcccaactactgcgaggaggacgcggccacgggcagcgtgggcacgcagggccgtctctgcaaccgcacgtcgcccggcgcggacggctgtgacaccatgtgctgcggccgaggctacaacacccaccagtacaccaaggtgtggcagtgcaactgcaaattccactggtgctgcttcgtcaagtgcaacacctgcagcgagcgcaccgaggtcttcacctgcaagtgaggccaggcccggaggcggccgcgggcaccctggaacccggcggcattttgcacatccactcctcaccttccctgccttggtgctgccagcagcagacatagacgggtgcagaagcggggagctccaggtgcaggagggcaccggccggggcccacgccctctgcccgcctccctggggctccttcctgccacctcctcccatcacctcctgcggcagaacagcacccgtgacccacccagagagcaaggccaggggtcttggtgctccccgacggggcccggcaagttctctttcttctctctgggaaaatgaacgtccaggacacacctgtatcccagagagcaaagtgatgaggagactgagcgtccccagccccacctggcggcatggacacagaaaagctacgccggctggcctctccagaccagttcccaggctgggtctgccgctgggccctggggcggtggggacagatgttgacacaaattatttatgttttcttagtatcagaagaggattctcggcactaacacatagccagtcctaactccgtactctgtgtcagcccatcccctagacaccctctgtttcctttcccggccccacctggccggccctctgcccctgcagagctgaggcagcctggggttgatggggaccacgcggtgcctgcaggtcctagaagtgagctgggcaggggctcttcagaccacacagccctgaccgggccttggaggagagcca

SEQ ID NO: 34440 - DNA, 714 bp, Homo sapiens
  source 1..714: mol_type = unassigned DNA
cgcgtcccctccggccgccgctgtctatggcgcagcccccctccctggatcatgcacagaaactttcgcaagtggattttctacgtgtttctctgctttggcgtcctgtacgtgaagctcggagcactgtcatccgtggtggccctgggagccaacatcatctgcaacaagattcctggcctagccccgcggcagcgtgccatctgccagagtcggcccgatgccatcattgtgattggggagggggcgcagatgggcatcaacgagtgccagtaccagttccgcttcggacgctggaactgctctgccctcggcgagaagaccgtcttcgggcaagagctccgagtagggagccgtgaggctgccttcacgtacgccatcaccgcggctggcgtggcgcacgccgtcaccgctgcctgcagccaagggaacctgagcaactgcggctgcgaccgcgagaagcagggctactacaaccaagccgagggctggaagtggggcggctgctcggccgacgtgcgttacggcatcgacttctcccggcgcttcgtggacgctcgggagatcaagaagaacgcgcggcgcctcatgaacctgcataacaatgaggccggcaggaagggcctacttggacaacccagggtgacctcctctccgttgtttccttgaccacatctgtaaaggccctacttccaaataaagtcacttgccgag

SEQ ID NO: 34441 - DNA, 2202 bp, Homo sapiens
  source 1..2202: mol_type = unassigned DNA
ctggcgcggcccggcgggcgggcgcccggcgagccgcgctagctgctctctgcggtagctgctccgagtcgtatttccacattcctgaacccagccgagtccttacctgttgagccgcgatctcctttagacagaatctgtctcggcttcgctcgaagtgggggtggagaaacggcgtgacggagagggggtgcggtgcacctcgcctggggcgcccaccgcccgctgctggccccgcgctcctcgcacctgcggggacccgggccccgccgcgccctgcgcgcctactgtgcgccgccggctgccccgaggcgagccccgtccaggccacaggcaaggcggtgaacagacccgcgggaggggcaggtgcaggtaccactggtgggagacgcggcttcccaggcggagaggtggaagcaggcgctgggaatcgtctctccatcaccctccatcccatgtctgccccgccattttacagagcactgtcatccgtggtggccctgggagccaacatcatctgcaacaagattcctggcctagccccgcggcagcgtgccatctgccagagtcggcccgatgccatcattgtgattggggagggggcgcagatgggcatcaacgagtgccagtaccagttccgcttcggacgctggaactgctctgccctcggcgagaagaccgtcttcgggcaagagctccgagtagggagccgtgaggctgccttcacgtacgccatcaccgcggctggcgtggcgcacgccgtcaccgctgcctgcagccaagggaacctgagcaactgcggctgcgaccgcgagaagcagggctactacaaccaagccgagggctggaagtggggcggctgctcggccgacgtgcgttacggcatcgacttctcccggcgcttcgtggacgctcgggagatcaagaagaacgcgcggcgcctcatgaacctgcataacaatgaggccggcaggaaggttctagaggaccggatgcagctggagtgcaagtgccacggcgtgtctggctcctgcaccaccaaaacctgctggaccacgctgcccaagttccgagaggtgggccacctgctgaaggagaagtacaacgcggccgtgcaggtggaggtggtgcgggccagccgtctgcggcagcccaccttcctgcgcatcaaacagctgcgcagctatcagaagcccatggagacagacctggtgtacattgagaagtcgcccaactactgcgaggaggacgcggccacgggcagcgtgggcacgcagggccgtctctgcaaccgcacgtcgcccggcgcggacggctgtgacaccatgtgctgcggccgaggctacaacacccaccagtacaccaaggtgtggcagtgcaactgcaaattccactggtgctgcttcgtcaagtgcaacacctgcagcgagcgcaccgaggtcttcacctgcaagtgaggccaggcccggaggcggccgcgggcaccctggaacccggcggcattttgcacatccactcctcaccttccctgccttggtgctgccagcagcagacatagacgggtgcagaagcggggagctccaggtgcaggagggcaccggccggggcccacgccctctgcccgcctccctggggctccttcctgccacctcctcccatcacctcctgcggcagaacagcacccgtgacccacccagagagcaaggccaggggtcttggtgctccccgacggggcccggcaagttctctttcttctctctgggaaaatgaacgtccaggacacacctgtatcccagagagcaaagtgatgaggagactgagcgtccccagccccacctggcggcatggacacagaaaagctacgccggctggcctctccagaccagttcccaggctgggtctgccgctgggccctggggcggtggggacagatgttgacacaaattatttatgttttcttagtatcagaagaggattctcggcactaacacatagccagtcctaactccgtactctgtgtcagcccatcccctagacaccctctgtttcctttcccggccccacctggccggccctctgcccctgcagagctgaggcagcctggggttgatggggaccacgcggtgcctgcaggtcctagaagtgagctgggcaggggctcttcagaccacacagccctgaccgggccttggaggagagcca

SEQ ID NO: 34442 - DNA, 521 bp, Homo sapiens
  source 1..521: mol_type = unassigned DNA
gccgcgatctcctttagacagaatctgtctcggcttcgctcgaagtgggggtggagaaacggcgtgacggagagggggtgcggtgcacctcgcctggggcgcccaccgcccgctgctggccccgcgctcctcgcacctgcggggacccgggccccgccgcgccctgcgcgcctactgtgcgccgccggctgccccgaggcgagccccgtccaggccacagagcactgtcatccgtggtggccctgggagccaacatcatctgcaacaagattcctggcctagccccgcggcagcgtgccatctgccagagtcggcccgatgccatcattgtgattggggagggggcgcagatgggcatcaacgagtgccagtaccagttccgcttcggacgctggaactgctctgccctcggcgagaagaccgtcttcgggcaagagctccgagtagggagccgtgaggctgccttcacgtacgccatcaccgcggctggcgtggcgcacgccgtcaccgctgcctgcagc

SEQ ID NO: 34443 - DNA, 2112 bp, Homo sapiens
  source 1..2112: mol_type = unassigned DNA
cgcttacacaccaaggaagttgggctttgagaattccatcccactggcactgaggagaatatttctccgtcttgcttacccatctcccagttttttggaattttctctagctgttactccagaggattatgtttctttcaaagccttctgtgtacatctgtcttttcacctgtgtcctccaactcagccacagctggtcggtgaacaatttcctgatgactggtccaaaggcttacctgatttactccagcagtgtggcagctggtgcccagagtggtattgaagaatgcaagtatcagtttgcctgggaccgctggaactgccctgagagagccctgcagctgtccagccatggtgggcttcgcagtgccaatcgggagacagcatttgtgcatgccatcagttctgctggagtcatgtacaccctgactagaaactgcagccttggagattttgataactgtggctgtgatgactcccgcaacgggcaactggggggacaaggctggctgtggggaggctgcagtgacaatgtgggcttcggagaggcgatttccaagcagtttgtcgatgccctggaaacaggacaggatgcacgggcagccatgaacctgcacaacaacgaggctggccgcaaggcggtgaagggcaccatgaaacgcacgtgcaagtgccacggcgtgtctggcagctgcaccacgcagacctgttggctgcagctgcccgagttccgcgaggtgggcgcgcacctgaaggagaagtaccacgcagcactcaaggtggacctgctgcagggtgctggcaacagcgcggccggccgcggcgccatcgccgacacctttcgctccatctctacccgggagctggtgcacctggaggactccccggactactgcctggagaacaaaacgctagggctgctgggcaccgaaggccgagagtgcctaaggcgcgggcgggccctgggtcgctgggaacgccgcagctgccgccggctctgcggggactgcgggctggcggtggaggagcgccgggccgagaccgtgtccagctgcaactgcaagttccactggtgctgcgcagtccgctgcgagcagtgccgccggagggtcaccaagtacttctgtagccgcgcagagcggccgcgggggggcgctgcgcacaaacccgggagaaaaccctaagggtttcctctgccccctccttttcccactggttcttggcttcctttagagaccccggtaattgtggaacctagggaatggggaacccgctctcccagacctagggatcctgagagggagagactgcaatttctccaaagcttgccactttccagcctgtttccccaattcctctgtgctctcctagagctctgtctgaatcctcgcagccacacctaggtctgagaactcaggctttgagttactgatcttccttggattaggagaacaggtgttcctcctcccctctcctagcagccctaatgtctgacctagcctatcaagccttaggcgctggaagaacccttctcagacacgcaggacccaggtaaagtcaaagctttgcccttttgcccactgtctgctaccagggctcacccactgctgcacctctcttctgcacagctcctcccctgctacctgctgagccagattccccaggaatcttgaatgctttctctcctcttctccctttcctttcccagaaaaactgaggaaactggccccggaaaagcatgtctttggggttggttcctagaggcagaggttgaagatggaagagggagctctggagtgctaacttgaacaccaagggtgctactcatccctatggtatcatatcatgaatggactttactagtggggcaatgactttcctagacaataacccgagggactccagatacataccccgaaggtctaggaaatacgttaagggcagattacagtcatttcctaccctttaaaggtaacttctcccttctcctgacctacttcctcctagcaaccaactttacctcttcttctccaaaggatctttgttcctctgagccaagactgaggtaaataaagccactttcctcttcagatcctggtctgcacctctaga

SEQ ID NO: 34444 - DNA, 1814 bp, Homo sapiens
  source 1..1814: mol_type = unassigned DNA
gattcccagcaccatcagaatctgtccctctgtacagctgccctcatgtatatactgagtagagatcgtttgaacatggatcttgatagagctagcttagatctaatgattcgacttttggaactggaacaagatgcttcatcagccaagctactgaatgaaaaagacatgaacaaaattaaagaaaaaatccgaaggctctgtgaaactgtacacaacaagcatcttgatctagaaaatataacgactgggcatttagctatggagacattattatcccttacttctaaacgagcaggagactggtttaaagaagaactccggcttttgggtggtctggatcatattgtagataaagtaaaagaatgtgtggatcatttaagtagagatgaggatgaagagaaactggtagcctcactatggggagcagagagatgtttacgagttttagaaagtgtaactgtgcataatcccgaaaatcaaagctacttgatagcatataaagattcccaacttattgtttcatcagctaaagcattacagcattgtgaagaactgattcagcagtacaaccgtgctgaggacagcatatgcttagctgacagtaagcctctgcctcaccagaatgtaactaaccatgtaggcaaagcagtggaggactgcatgagggccatcatcggggtgttgcttaatttaactaatgataatgagtggggcagcaccaaaacaggagagcaggacggtctcataggcacagcgctgaactgtgtgcttcaggttccaaagtacctacctcaggagcagagatttgatattcgagtgctgctattccttgagcgagagcgggcagcccagctagcagaaagtaaaacagatgagttgatcaaagatgctcccaccactcagcatgataagagtggagagtggcaagaaacaagtggagaaatacagtgggtgtcaactgaaaagactgatggtacagaagagaaacataagaaggaggaggaggatgaagaacttgacctcaataaagcccttcagcatgccggcaaacacatggaggattgcattgtggcctcctacacagcactacttcttgggtgtctctgccaggaaagtccaatcaatgtaaccactgtgcgggaatatctgccagaaggagacttttcaataatgacagagatgctcaaaaaatttttgagttttatgaatctcacttgtgctgttggaacaactggccagaaatctatctctagagtgattgaatatttggaacattgctagctgctttacctttgcttcaggtgctcggtaatgctggagctatccttagacaaagaaaagtcaagtcatgaaagaagtccttgaagatataccaagaacattcatcagtatcattcgtgtttggatttttaaggccacctgatttcttcgtcatgcattcggcatttgctaaatgacagttactacatcaatctgcaactatcaaaaatgaggggaaaaggttcaggctgttaacaattccatgcagtatttaaatacatttactttggcagagtttataccctccccttgttttcttgctttattctgggcaagtttgaaggggaaaatttgtgctgctgttagtgcaactgctgtgtatgttgagccactgttgtcatgccagccaggtgcaaaggcagcttagctactgaggtagcgaatgttctgaggacattctagacaacagcttagttcctttttcaggctcatttgcttttgcttttttgttgaatgattccaatcgtaaataaagcttttaataattttgt

SEQ ID NO: 34445 - DNA, 6302 bp, Homo sapiens
  source 1..6302: mol_type = unassigned DNA
gcgagcggctgttggaggaaggaggtgggggccgggagcgcaaatggcgttgagatggttcagggccctgttcaaactccagcactgaccattcaccggcggaagcggcggcgcaggaggcggcggcggcccagcgggggcacacagcaggctctgttaccagctccagcagtggcggccagcgagagctaggcctgggcccggccggcggcgctcgaggcggggagggaagttgcggggccgccgctcctgcccccccaaccgggcttcctatttaccgaaagcagagtccctcgcctctctcggctctcacctgccggccctgctctcccgcgcgagggttccgcgcccgcccgcgggccgtagggagcgggagaggcggaggcggcccgtggccaaagcacccgccaggctccgaggagaatatgaaactggtgtcaaaatgacatccagatttgggaaaacatacagtaggaaaggtggaaatggcagttcaaaattcgatgaagtcttttccaacaaacggactacccttagcacaaaatggggagagaccacatttatggctaaattagggcagaagaggcccaatttcaaaccagatatccaagaaattccgaagaaacctaaagtggaagaagaaagtactggagatccttttggatttgatagtgatgatgagtctctaccagtttcttcaaagaatttagcccaggttaagtgttcctcttattcagaatctagtgaagctgctcagttggaagaggtcacttcagtacttgaagctaatagcaaaattagtcatgtggtcgttgaagacactgtcgtttctgataaatgcttccctttggaggacactttacttgggaaagaaaagagcacaaaccgaattgtagaagatgatgcaagcataagtagctgtaataaattaataacttcagataaagtggagaattttcatgaagaacatgaaaagaatagtcaccatattcacaaaaatgctgatgacagtactaagaaacccaatgcagaaactacagtggcttctgaaatcaaggaaacaaatgatacttggaactcccagtttgggaaaaggccagaatcaccatcagaaatatctccaatcaagggatctgttagaactggtttgtttgaatgggataatgattttgaagatatcagatcagaagactgtattttaagtttggatagtgatccccttttggagatgaaggatgacgattttaaaaatcgattggaaaatctgaatgaagccattgaggaagatattgtacaaagtgttcttaggccaaccaactgtaggacgtactgtagggccaataaaacgaaatcctcccaaggagcatcaaattttgataagctgatggacggcaccagtcaggccttagccaaagcaaacagtgaatcgagtaaagatggcctgaatcaggcaaagaaagggggtgtaagttgtgggaccagttttagagggacagttggacggactagagattacactgttttacatccatcttgcttgtcagtttgtaatgttaccatacaggatactatggaacgcagcatggatgagttcactgcatccactcctgcagatttgggagaagctggtcgtctcagaaaaaaggcagatattgcaacttctaagactactactagatttcgacctagtaatactaaatccaaaaaggatgttaaacttgaattttttggttttgaagatcatgagacaggaggtgatgaaggaggttctggaagttctaattacaaaattaagtattttggctttgatgatctcagtgaaagcgaagatgatgaagatgatgactgtcaagtagaaagaaagacaagcaaaaaaagaactaaaacagctccatcaccctccttgcagcctcccccagaaagcaatgataattcccaggacagtcagtctggtactaacaatgcagaaaacttggattttacagaggacttgcctggtgtgcctgaaagtgtgaagaagcccataaataaacaaggagataaatcaaaggaaaataccagaaagatttttagtggccccaaacggtcacccacaaaagctgtatataatgccagacattggaatcatccagattcagaagaactgcctgggccaccagtagtaaaacctcagagtgtcacagtgaggctgtcttcaaaggaaccaaatcaaaaagatgatggagtttttaaggctcctgcaccaccatccaaagtgataaaaactgtgacaatacctactcagccctaccaagatatagttactgcactgaaatgcagacgagaagacaaagaattatatactgttgttcagcacgtgaagcacttcaacgatgttgtagaatttggtgaaaatcaagagttcactgatgacattgagtacttgttaagtggcttaaagagcactcagcctctaaacacacgttgccttagtgttattagcttggctactaaatgtgccatgcccagttttcgaatgcacctgagagcacatgggatggtagcaatggtctttaaaaccttggatgattcccagcaccatcagaatctgtccctctgtacagctgccctcatgtatatactgagtagagatcgtttgaacatggatcttgatagagctagcttagatctaatgattcgacttttggaactggaacaagatgcttcatcagccaagctactgaatgaaaaagacatgaacaaaattaaagaaaaaatccgaaggctctgtgaaactgtacacaacaagcatcttgatctagaaaatataacgactgggcatttagctatggagacattattatcccttacttctaaacgagcaggagactggtttaaagaagaactccggcttttgggtggtctggatcatattgtagataaagtaaaagaatgtgtggatcatttaagtagagatgaggatgaagagaaactggtagcctcactatggggagcagagagatgtttacgagttttagaaagtgtaactgtgcataatcccgaaaatcaaagctacttgatagcatataaagattcccaacttattgtttcatcagctaaagcattacagcattgtgaagaactgattcagcagtacaaccgtgctgaggacagcatatgcttagctgacagtaagcctctgcctcaccagaatgtaactaaccatgtaggcaaagcagtggaggactgcatgagggccatcatcggggtgttgcttaatttaactaatgataatgagtggggcagcaccaaaacaggagagcaggacggtctcataggcacagcgctgaactgtgtgcttcaggttccaaagtacctacctcaggagcagagatttgatattcgagtgctgggcttaggtctgctgataaatctagtggagtatagtgctcggaatcggcactgtcttgtcaacatggaaacatcgtgctcttttgattcttccatctgtagtggagaaggggatgatagtttaaggataggtggacaagttcatgctgtccaggctttagtgcagctattccttgagcgagagcgggcagcccagctagcagaaagtaaaacagatgagttgatcaaagatgctcccaccactcagcatgataagagtggagagtggcaagaaacaagtggagaaatacagtgggtgtcaactgaaaagactgatggtacagaagagaaacataagaaggaggaggaggatgaagaacttgacctcaataaagcccttcagcatgccggcaaacacatggaggattgcattgtggcctcctacacagcactacttcttgggtgtctctgccaggaaagtccaatcaatgtaaccactgtgcgggaatatctgccagaaggagacttttcaataatgacagagatgctcaaaaaatttttgagttttatgaatctcacttgtgctgttggaacaactggccagaaatctatctctagagtgattgaatatttggaacattgctagctgctttacctttgcttcaggtgctcggtaatgctggagctatccttagacaaagaaaagtcaagtcatgaaagaagtccttgaagatataccaagaacattcatcagtatcattcgtgtttggatttttaaggccacctgatttcttcgtcatgcattcggcatttgctaaatgacagttactacatcaatctgcaactatcaaaaatgaggggaaaaggttcaggctgttaacaattccatgcagtatttaaatacatttactttggcagagtttataccctccccttgttttcttgctttattctgggcaagtttgaaggggaaaatttgtgctgctgttagtgcaactgctgtgtatgttgagccactgttgtcatgccagccaggtgcaaaggcagcttagctactgaggtagcgaatgttctgaggacattctagacaacagcttagttcctttttcaggctcatttgcttttgcttttttgttgaatgattccaatcgtaaataaagcttttaataattttgtgaattttttggttgttgttccctgaactactgtctatatttaaaattagatggaatccaaagatacacgggattaatagtatatttttttattcttgattaggtttgggttattgaactattttttacttttgagaccacaaccatattcaatatcataccataatgtgtcatagctataggcacaagaaaaacaacagtttgagagaatattatataagatgatgtgccctgttaaaaggaggaggcaaaatagtcaaacccagggtagtttacacttaatgctagggaggctcttaaaacattattagattttgaggaaagactctctagatatattttctaatgttcagtacaataaatataaggaagctaaaacaccaatgtggaattcctgtttccagataacatgtatattcttctatagagtgacaggatcaattgcataagcgcaaagccttaaattgctggtttagagaagacccttttttcattcagattctttgttcgtagagcagttatttgaaaaacagttatggaacacaaaacattttatagatttaatatcataacattgcaaatttttcttgtattattcacaccactggttatacttttttttttccttttttattgattgggcctgaatacaggctttctagagatctttttcattaatacttttaaatacctttcaggtagttacatcatgtttcttcattggatttgtaaaacttgaagccataaaaatattagtttggtgtgtattggggaaaatagctaaaagtctaatttttacccatttagactttgttatttccttgtataaagtgacaaatcggggctcttgtatcagtgccagctgtaatgtttttaaatgcagtggctgccttctattgtcttcctatttttgataatgcagattgttgggaaatctgtaaggaagtaactgattccaggcaaattgttttcttccttctacccaccccaacccctacccatcaccttttaagaacatagtacgccagtgtaacgtgggaaccattgagattgtatttgccctgagtattaaagctagcttagcaaaatacttttaaaaacatattggtaaatgatacccgtaaaattaaattagttatattttattttaaaatgcaaaatacattgatatttattaatcattggatttagggaaagggacagatttttggtgaacctgacttgtggcagatggtaaggaatattataaaacatttggatgagaacaatcagggcgaactgcatttttctgttacactggtaatcatttgaaaattgatttacctcagtgtttaacagttttttgttttgttttgttttttaaataataactaattgtcgagcactgatagagatgcagattttggtggggggaggtggtgggggagataatcacttcaccaactgcagtgcatttgtgtgtttttaaccctcagagaactctgcattttagggtacttgaggctgacttaactaaaagttttaaagtaaccttttttccattgtaaatatttctgtaaatactaccaattggaaattagaacagtagagtacttttctgaatccaatcctatttttattttatacagtatttctcagctgtgatctttggagcaaaagccaacggcaggaaaaaatagtttgtaccagtttcatgaagtatgtctttgggtttttgtaaataattttaactcaaataaaattgctactttcaataca

SEQ ID NO: 34446 - DNA, 6200 bp, Homo sapiens
  source 1..6200: mol_type = unassigned DNA
gcgcggggactgtgggaagcggagtgacggagcgagcggctgttggaggaaggaggtgggggccgggagcgcaaatggcgttgagatggttcagggccctgttcaaactccagcactgaccattcaccggcggaagcggcgccgctcctgcccccccaaccgggcttcctatttaccgaaagcagagtccctcgcctctctcggctctcacctgccggccctgctctcccgcgcgagggttccgcgcccgcccgcgggccgtagggagcgggagaggcggaggcggcccgtggccaaagcacccgccaggctccgaggagaatatgaaactggtgtcaaaatgacatccagatttgggaaaacatacagtaggaaaggtggaaatggcagttcaaaattcgatgaagtcttttccaacaaacggactacccttagcacaaaatggggagagaccacatttatggctaaattagggcagaagaggcccaatttcaaaccagatatccaagaaattccgaagaaacctaaagtggaagaagaaagtactggagatccttttggatttgatagtgatgatgagtctctaccagtttcttcaaagaatttagcccaggttaagtgttcctcttattcagaatctagtgaagctgctcagttggaagaggtcacttcagtacttgaagctaatagcaaaattagtcatgtggtcgttgaagacactgtcgtttctgataaatgcttccctttggaggacactttacttgggaaagaaaagagcacaaaccgaattgtagaagatgatgcaagcataagtagctgtaataaattaataacttcagataaagtggagaattttcatgaagaacatgaaaagaatagtcaccatattcacaaaaatgctgatgacagtactaagaaacccaatgcagaaactacagtggcttctgaaatcaaggaaacaaatgatacttggaactcccagtttgggaaaaggccagaatcaccatcagaaatatctccaatcaagggatctgttagaactggtttgtttgaatgggataatgattttgaagatatcagatcagaagactgtattttaagtttggatagtgatccccttttggagatgaaggatgacgattttaaaaatcgattggaaaatctgaatgaagccattgaggaagatattgtacaaagtgttcttaggccaaccaactgtaggacgtactgtagggccaataaaacgaaatcctcccaaggagcatcaaattttgataagctgatggacggcaccagtcaggccttagccaaagcaaacagtgaatcgagtaaagatggcctgaatcaggcaaagaaagggggtgtaagttgtgggaccagttttagagggacagttggacggactagagattacactgttttacatccatcttgcttgtcagtttgtaatgttaccatacaggatactatggaacgcagcatggatgagttcactgcatccactcctgcagatttgggagaagctggtcgtctcagaaaaaaggcagatattgcaacttctaagactactactagatttcgacctagtaatactaaatccaaaaaggatgttaaacttgaattttttggttttgaagatcatgagacaggaggtgatgaaggaggttctggaagttctaattacaaaattaagtattttggctttgatgatctcagtgaaagcgaagatgatgaagatgatgactgtcaagtagaaagaaagacaagcaaaaaaagaactaaaacagctccatcaccctccttgcagcctcccccagaaagcaatgataattcccaggacagtcagtctggtactaacaatgcagaaaacttggattttacagaggacttgcctggtgtgcctgaaagtgtgaagaagcccataaataaacaaggagataaatcaaaggaaaataccagaaagatttttagtggccccaaacggtcacccacaaaagctgtatataatgccagacattggaatcatccagattcagaagaactgcctgggccaccagtagtaaaacctcagagtgtcacagtgaggctgtcttcaaaggaaccaaatcaaaaagatgatggagtttttaaggctcctgcaccaccatccaaagtgataaaaactgtgacaatacctactcagccctaccaagatatagttactgcactgaaatgcagacgagaagacaaagaattatatactgttgttcagcacgtgaagcacttcaacgatgttgtagaatttggtgaaaatcaagagttcactgatgacattgagtacttgttaagtggcttaaagagcactcagcctctaaacacacgttgccttagtgttattagcttggctactaaatgtgccatgcccagttttcgaatgcacctgagagcacatgggatggtagcaatggtctttaaaaccttggatgattcccagcaccatcagaatctgtccctctgtacagctgccctcatgtatatactgagtagagatcgtttgaacatggatcttgatagagctagcttagatctaatgattcgacttttggaactggaacaagatgcttcatcagccaagctactgaatgaaaaagacatgaacaaaattaaagaaaaaatccgaaggctctgtgaaactgtacacaacaagcatcttgatctagaaaatataacgactgggcatttagctatggagacattattatcccttacttctaaacgagcaggagactggtttaaagaagaactccggcttttgggtggtctggatcatattgtagataaagtaaaagaatgtgtggatcatttaagtagagatgaggatgaagagaaactggtagcctcactatggggagcagagagatgtttacgagttttagaaagtgtaactgtgcataatcccgaaaatcaaagctacttgatagcatataaagattcccaacttattgtttcatcagctaaagcattacagcattgtgaagaactgattcagcagtacaaccgtgctgaggacagcatatgcttagctgacagtaagcctctgcctcaccagaatgtaactaaccatgtaggcaaagcagtggaggactgcatgagggccatcatcggggtgttgcttaatttaactaatgataatgagtggggcagcaccaaaacaggagagcaggacggtctcataggcacagcgctgaactgtgtgcttcaggttccaaagtacctacctcaggagcagagatttgatattcgagtgctgggcttaggtctgctgataaatctagtggagtatagtgctcggaatcggcactgtcttgtcaacatggaaacatcgtgctcttttgattcttccatctgtagtggagaaggggatgatagtttaaggataggtggacaagttcatgctgtccaggctttagtgcagctattccttgagcgagagcgggcagcccagctagcagaaagtaaaacagatgagttgatcaaagatgctcccaccactcagcatgataagagtggagagtggcaagaaacaagtggagaaatacagtgggtgtcaactgaaaagactgatggtacagaagagaaacataagaaggaggaggaggatgaagaacttgacctcaataaagcccttcagcatgccggcaaacacatggaggattgcattgtggcctcctacacagcactacttcttgggtgtctctgccaggaaagtccaatcaatgtaaccactgtgcgggaatatctgccagaaggagacttttcaataatgacagagatgctcaaaaaatttttgagttttatgaatctcacttgtgctgttggaacaactggccagaaatctatctctagagtgattgaatatttggaacattgctagctgctttacctttgcttcaggtgctcggtaatgctggagctatccttagacaaagaaaagtcaagtcatgaaagaagtccttgaagatataccaagaacattcatcagtatcattcgtgtttggatttttaaggccacctgatttcttcgtcatgcattcggcatttgctaaatgacagttactacatcaatctgcaactatcaaaaatgaggggaaaaggttcaggctgttaacaattccatgcagtatttaaatacatttactttggcagagtttataccctccccttgttttcttgctttattctgggcaagtttgaaggggaaaatttgtgctgctgttagtgcaactgctgtgtatgttgagccactgttgtcatgccagccaggtgcaaaggcagcttagctactgaggtagcgaatgttctgaggacattctagacaacagcttagttcctttttcaggctcatttgcttttgcttttttgttgaatgattccaatcgtaaataaagcttttaataattttgtgaattttttggttgttgttccctgaactactgtctatatttaaaattagatggaatccaaagatacacgggattaatagtatatttttttattcttgattaggtttgggttattgaactattttttacttttgagaccacaaccatattcaatatcataccataatgtgtcatagctataggcacaagaaaaacaacagtttgagagaatattatataagatgatgtgccctgttaaaaggaggaggcaaaatagtcaaacccagggtagtttacacttaatgctagggaggctcttaaaacattattagattttgaggaaagactctctagatatattttctaatgttcagtacaataaatataaggaagctaaaacaccaatgtggaattcctgtttccagataacatgtatattcttctatagagtgacaggatcaattgcataagcgcaaagccttaaattgctggtttagagaagacccttttttcattcagattctttgttcgtagagcagttatttgaaaaacagttatggaacacaaaacattttatagatttaatatcataacattgcaaatttttcttgtattattcacaccactggttatacttttttttttccttttttattgattgggcctgaatacaggctttctagagatctttttcattaatacttttaaatacctttcaggtagttacatcatgtttcttcattggatttgtaaaacttgaagccataaaaatattagtttggtgtgtattggggaaaatagctaaaagtctaatttttacccatttagactttgttatttccttgtataaagtgacaaatcggggctcttgtatcagtgccagctgtaatgtttttaaatgcagtggctgccttctattgtcttcctatttttgataatgcagattgttgggaaatctgtaaggaagtaactgattccaggcaaattgttttcttccttctacccaccccaacccctacccatcaccttttaagaacatagtacgccagtgtaacgtgggaaccattgagattgtatttgccctgagtattaaagctagcttagcaaaatacttttaaaaacatattggtaaatgatacccgtaaaattaaattagttatattttattttaaaatgcaaaatacattgatatttattaatcattggatttagggaaagggacagatttttggtgaacctgacttgtggcagatggtaaggaatattataaaacatttggatgagaacaatcagggcgaactgcatttttctgttacactggtaatcatttgaaaattgatttacctcagtgtttaacagttttttgttttgttttgttttttaaataataactaattgtcgagcactgatagagatgcagattttggtggggggaggtggtgggggagataatcacttcaccaactgcagtgcatttgtgtgtttttaaccctcagagaactctgcattttagggtacttgaggctgacttaactaaaagttttaaagtaaccttttttccattgtaaatatttctgtaaatactaccaattggaaattagaacagtagagtacttttctgaatccaatcctatttttattttatacagtatttctcagctgtgatctttggagcaaaagccaacggcaggaaaaaatagtttgtaccagtttcatgaagtatgtctttgggtttttgtaaataattttaactcaaataaaattgctactttcaataca

SEQ ID NO: 34447 - DNA, 1801 bp, Homo sapiens
  source 1..1801: mol_type = unassigned DNA
agaatctgtccctctgtacagctgccctcatgtatatactgagtagagatcgtttgaacatggatcttgatagagctagcttagatctaatgattcgacttttggaactggaacaagatgcttcatcagccaagctactgaatgaaaaagacatgaacaaaattaaagaaaaaatccgaaggctctgtgaaactgtacacaacaagcatcttgatctagaaaatataacgactgggcatttagctatggagacattattatcccttacttctaaacgagcaggagactggtttaaagaagaactccggcttttgggtggtctggatcatattgtagataaagtaaaagaatgtgtggatcatttaagtagagatgaggatgaagagaaactggtagcctcactatggggagcagagagatgtttacgagttttagaaagtgtaactgtgcataatcccgaaaatcaaagctacttgatagcatataaagattcccaacttattgtttcatcagctaaagcattacagcattgtgaagaactgattcagcagtacaaccgtgctgaggacagcatatgcttagctgacagtaagcctctgcctcaccagaatgtaactaaccatgtaggcaaagcagtggaggactgcatgagggccatcatcggggtgttgcttaatttaactaatgataatgagtggggcagcaccaaaacaggagagcaggacggtctcataggcacagcgctgaactgtgtgcttcaggttccaaagtacctacctcaggagcagagatttgatattcgagtgctgctattccttgagcgagagcgggcagcccagctagcagaaagtaaaacagatgagttgatcaaagatgctcccaccactcagcatgataagagtggagagtggcaagaaacaagtggagaaatacagtgggtgtcaactgaaaagactgatggtacagaagagaaacataagaaggaggaggaggatgaagaacttgacctcaataaagcccttcagcatgccggcaaacacatggaggattgcattgtggcctcctacacagcactacttcttgggtgtctctgccaggaaagtccaatcaatgtaaccactgtgcgggaatatctgccagaaggagacttttcaataatgacagagatgctcaaaaaatttttgagttttatgaatctcacttgtgctgttggaacaactggccagaaatctatctctagagtgattgaatatttggaacattgctagctgctttacctttgcttcaggtgctcggtaatgctggagctatccttagacaaagaaaagtcaagtcatgaaagaagtccttgaagatataccaagaacattcatcagtatcattcgtgtttggatttttaaggccacctgatttcttcgtcatgcattcggcatttgctaaatgacagttactacatcaatctgcaactatcaaaaatgaggggaaaaggttcaggctgttaacaattccatgcagtatttaaatacatttactttggcagagtttataccctccccttgttttcttgctttattctgggcaagtttgaaggggaaaatttgtgctgctgttagtgcaactgctgtgtatgttgagccactgttgtcatgccagccaggtgcaaaggcagcttagctactgaggtagcgaatgttctgaggacattctagacaacagcttagttcctttttcaggctcatttgcttttgcttttttgttgaatgattccaatcgtaaataaagcttttaataattttgtgaa

SEQ ID NO: 34448 - DNA, 6114 bp, Homo sapiens
  source 1..6114: mol_type = unassigned DNA
atggttcagggccctgttcaaactccagcactgaccattcaccggcggaagcggcgccgctcctgcccccccaaccgggcttcctatttaccgaaagcagagtccctcgcctctctcggctctcacctgccggccctgctctcccgcgcgagggttccgcgcccgcccgcgggccgtagggagcgggagaggcggaggcggcccgtggccaaagcacccgccaggctccgaggagaatatgaaactggtgtcaaaatgacatccagatttgggaaaacatacagtaggaaaggtggaaatggcagttcaaaattcgatgaagtcttttccaacaaacggactacccttagcacaaaatggggagagaccacatttatggctaaattagggcagaagaggcccaatttcaaaccagatatccaagaaattccgaagaaacctaaagtggaagaagaaagtactggagatccttttggatttgatagtgatgatgagtctctaccagtttcttcaaagaatttagcccaggttaagtgttcctcttattcagaatctagtgaagctgctcagttggaagaggtcacttcagtacttgaagctaatagcaaaattagtcatgtggtcgttgaagacactgtcgtttctgataaatgcttccctttggaggacactttacttgggaaagaaaagagcacaaaccgaattgtagaagatgatgcaagcataagtagctgtaataaattaataacttcagataaagtggagaattttcatgaagaacatgaaaagaatagtcaccatattcacaaaaatgctgatgacagtactaagaaacccaatgcagaaactacagtggcttctgaaatcaaggaaacaaatgatacttggaactcccagtttgggaaaaggccagaatcaccatcagaaatatctccaatcaagggatctgttagaactggtttgtttgaatgggataatgattttgaagatatcagatcagaagactgtattttaagtttggatagtgatccccttttggagatgaaggatgacgattttaaaaatcgattggaaaatctgaatgaagccattgaggaagatattgtacaaagtgttcttaggccaaccaactgtaggacgtactgtagggccaataaaacgaaatcctcccaaggagcatcaaattttgataagctgatggacggcaccagtcaggccttagccaaagcaaacagtgaatcgagtaaagatggcctgaatcaggcaaagaaagggggtgtaagttgtgggaccagttttagagggacagttggacggactagagattacactgttttacatccatcttgcttgtcagtttgtaatgttaccatacaggatactatggaacgcagcatggatgagttcactgcatccactcctgcagatttgggagaagctggtcgtctcagaaaaaaggcagatattgcaacttctaagactactactagatttcgacctagtaatactaaatccaaaaaggatgttaaacttgaattttttggttttgaagatcatgagacaggaggtgatgaaggaggttctggaagttctaattacaaaattaagtattttggctttgatgatctcagtgaaagcgaagatgatgaagatgatgactgtcaagtagaaagaaagacaagcaaaaaaagaactaaaacagctccatcaccctccttgcagcctcccccagaaagcaatgataattcccaggacagtcagtctggtactaacaatgcagaaaacttggattttacagaggacttgcctggtgtgcctgaaagtgtgaagaagcccataaataaacaaggagataaatcaaaggaaaataccagaaagatttttagtggccccaaacggtcacccacaaaagctgtatataatgccagacattggaatcatccagattcagaagaactgcctgggccaccagtagtaaaacctcagagtgtcacagtgaggctgtcttcaaaggaaccaaatcaaaaagatgatggagtttttaaggctcctgcaccaccatccaaagtgataaaaactgtgacaatacctactcagccctaccaagatatagttactgcactgaaatgcagacgagaagacaaagaattatatactgttgttcagcacgtgaagcacttcaacgatgttgtagaatttggtgaaaatcaagagttcactgatgacattgagtacttgttaagtggcttaaagagcactcagcctctaaacacacgttgccttagtgttattagcttggctactaaatgtgccatgcccagttttcgaatgcacctgagagcacatgggatggtagcaatggtctttaaaaccttggatgattcccagcaccatcagaatctgtccctctgtacagctgccctcatgtatatactgagtagagatcgtttgaacatggatcttgatagagctagcttagatctaatgattcgacttttggaactggaacaagatgcttcatcagccaagctactgaatgaaaaagacatgaacaaaattaaagaaaaaatccgaaggctctgtgaaactgtacacaacaagcatcttgatctagaaaatataacgactgggcatttagctatggagacattattatcccttacttctaaacgagcaggagactggtttaaagaagaactccggcttttgggtggtctggatcatattgtagataaagtaaaagaatgtgtggatcatttaagtagagatgaggatgaagagaaactggtagcctcactatggggagcagagagatgtttacgagttttagaaagtgtaactgtgcataatcccgaaaatcaaagctacttgatagcatataaagattcccaacttattgtttcatcagctaaagcattacagcattgtgaagaactgattcagcagtacaaccgtgctgaggacagcatatgcttagctgacagtaagcctctgcctcaccagaatgtaactaaccatgtaggcaaagcagtggaggactgcatgagggccatcatcggggtgttgcttaatttaactaatgataatgagtggggcagcaccaaaacaggagagcaggacggtctcataggcacagcgctgaactgtgtgcttcaggttccaaagtacctacctcaggagcagagatttgatattcgagtgctgggcttaggtctgctgataaatctagtggagtatagtgctcggaatcggcactgtcttgtcaacatggaaacatcgtgctcttttgattcttccatctgtagtggagaaggggatgatagtttaaggataggtggacaagttcatgctgtccaggctttagtgcagctattccttgagcgagagcgggcagcccagctagcagaaagtaaaacagatgagttgatcaaagatgctcccaccactcagcatgataagagtggagagtggcaagaaacaagtggagaaatacagtgggtgtcaactgaaaagactgatggtacagaagagaaacataagaaggaggaggaggatgaagaacttgacctcaataaagcccttcagcatgccggcaaacacatggaggattgcattgtggcctcctacacagcactacttcttgggtgtctctgccaggaaagtccaatcaatgtaaccactgtgcgggaatatctgccagaaggagacttttcaataatgacagagatgctcaaaaaatttttgagttttatgaatctcacttgtgctgttggaacaactggccagaaatctatctctagagtgattgaatatttggaacattgctagctgctttacctttgcttcaggtgctcggtaatgctggagctatccttagacaaagaaaagtcaagtcatgaaagaagtccttgaagatataccaagaacattcatcagtatcattcgtgtttggatttttaaggccacctgatttcttcgtcatgcattcggcatttgctaaatgacagttactacatcaatctgcaactatcaaaaatgaggggaaaaggttcaggctgttaacaattccatgcagtatttaaatacatttactttggcagagtttataccctccccttgttttcttgctttattctgggcaagtttgaaggggaaaatttgtgctgctgttagtgcaactgctgtgtatgttgagccactgttgtcatgccagccaggtgcaaaggcagcttagctactgaggtagcgaatgttctgaggacattctagacaacagcttagttcctttttcaggctcatttgcttttgcttttttgttgaatgattccaatcgtaaataaagcttttaataattttgtgaattttttggttgttgttccctgaactactgtctatatttaaaattagatggaatccaaagatacacgggattaatagtatatttttttattcttgattaggtttgggttattgaactattttttacttttgagaccacaaccatattcaatatcataccataatgtgtcatagctataggcacaagaaaaacaacagtttgagagaatattatataagatgatgtgccctgttaaaaggaggaggcaaaatagtcaaacccagggtagtttacacttaatgctagggaggctcttaaaacattattagattttgaggaaagactctctagatatattttctaatgttcagtacaataaatataaggaagctaaaacaccaatgtggaattcctgtttccagataacatgtatattcttctatagagtgacaggatcaattgcataagcgcaaagccttaaattgctggtttagagaagacccttttttcattcagattctttgttcgtagagcagttatttgaaaaacagttatggaacacaaaacattttatagatttaatatcataacattgcaaatttttcttgtattattcacaccactggttatacttttttttttccttttttattgattgggcctgaatacaggctttctagagatctttttcattaatacttttaaatacctttcaggtagttacatcatgtttcttcattggatttgtaaaacttgaagccataaaaatattagtttggtgtgtattggggaaaatagctaaaagtctaatttttacccatttagactttgttatttccttgtataaagtgacaaatcggggctcttgtatcagtgccagctgtaatgtttttaaatgcagtggctgccttctattgtcttcctatttttgataatgcagattgttgggaaatctgtaaggaagtaactgattccaggcaaattgttttcttccttctacccaccccaacccctacccatcaccttttaagaacatagtacgccagtgtaacgtgggaaccattgagattgtatttgccctgagtattaaagctagcttagcaaaatacttttaaaaacatattggtaaatgatacccgtaaaattaaattagttatattttattttaaaatgcaaaatacattgatatttattaatcattggatttagggaaagggacagatttttggtgaacctgacttgtggcagatggtaaggaatattataaaacatttggatgagaacaatcagggcgaactgcatttttctgttacactggtaatcatttgaaaattgatttacctcagtgtttaacagttttttgttttgttttgttttttaaataataactaattgtcgagcactgatagagatgcagattttggtggggggaggtggtgggggagataatcacttcaccaactgcagtgcatttgtgtgtttttaaccctcagagaactctgcattttagggtacttgaggctgacttaactaaaagttttaaagtaaccttttttccattgtaaatatttctgtaaatactaccaattggaaattagaacagtagagtacttttctgaatccaatcctatttttattttatacagtatttctcagctgtgatctttggagcaaaagccaacggcaggaaaaaatagtttgtaccagtttcatgaagtatgtctttgggtttttgtaaataattttaactcaaataaaattgctactttcaatac

SEQ ID NO: 34449 - DNA, 1849 bp, Homo sapiens
  source 1..1849: mol_type = unassigned DNA
gctgctcattgcggaagttcctcttcttaccctgcacccagagcctcgccagagaagacaagggcagaaagcaccatgagtgggggcccaatgggaggaaggcccgggggccgaggagcaccagcggttcagcagaacataccctccaccctcctccaggaccacgagaaccagcgactctttgagatgcttggacgaaaatgcttgacgctggccactgcagttgttcagctgtacctggcgctgccccctggagctgagcactggaccaaggagcattgtggggctgtgtgcttcgtgaaggataacccccagaagtcctacttcatccgcctttacggccttcaggctggtcggctgctctgggaacaggagctgtactcacagcttgtctactccacccccacccccttcttccacaccttcgctggagatgactgccaagcggggctgaactttgcagacgaggacgaggcccaggccttccgggccctcgtgcaggagaagatacaaaaaaggaatcagaggcaaagtggagacagacgccagctacccccaccaccaacaccagccaatgaagagagaagaggagggctcccacccctgcccctgcatccaggtggagaccaaggaggccctccagtgggtccgctctccctggggctggcgacagtggacatccagaaccctgacatcacgagttcacgataccgtgggctcccagcacctggacctagcccagctgataagaaacgctcagggaagaagaagatcagcaaagctgatattggtgcacccagtggattcaagcatgtcagccacgtggggtgggacccccagaatggatttgacgtgaacaacctcgacccagatctgcggagtctgttctccagggcaggaatcagcgaggcccagctcaccgacgccgagacctctaaacttatctacgacttcattgaggaccagggtgggctggaggctgtgcggcaggagatgaggcgccaggagccacttccgccgcccccaccgccatctcgaggagggaaccagctcccccggccccctattgtggggggtaacaagggtcgttctggtccactgccccctgtacctttggggattgccccacccccaccaacaccccggggacccccacccccaggccgagggggccctccaccaccaccccctccagctactggacgttctggaccactgccccctccaccccctggagctggtgggccacccatgccaccaccaccgccaccaccgccaccgccgcccagctccgggaatggaccagcccctcccccactccctcctgctctggtgcctgccgggggcctggcccctggtgggggtcggggagcgcttttggatcaaatccggcagggaattcagctgaacaagacccctggggccccagagagctcagcgctgcagccaccacctcagagctcagagggactggtgggggccctgatgcacgtgatgcagaagagaagcagagccatccactcctccgacgaaggggaggaccaggctggcgatgaagatgaagatgatgaatgggatgactgagtggctgagttacttgctgccctgtgctcctccccgcaggacatggctccccctccacctgctctgtgcccaccctccactctcctcttccaggcccccaaccccccatttcttccccaccaacccctccaatgctgttatccctgcctggtcctcacactcacccaacaatcccaaggccctttttatacaaaaattctcagttctcttcactcaaggatttttaaagaaaaataaaagaattgtctttctgtctctctataaa

SEQ ID NO: 34450 - DNA, 933 bp, Homo sapiens
  source 1..933: mol_type = unassigned DNA
tcaagactaagtcaaaggaggagagggcaacgcggtgggcaggagagaggccaacggccgcccggggcgaggggagccggtaggacgggaccaggactggccgacccggccccgcgcggggaagggggcgccttcctcccacaacacaaaacgtggaaatggggttttgccatgttgcccaggctcgtcttgaactcctgacctcaagtgatccactcgtctcggcctcccaaagtgctgggattacagagcctcgccagagaagacaagggcagaaagcaccatgagtgggggcccaatgggaggaaggcccgggggccgaggagcaccagcggttcagcagaacataccctccaccctcctccaggaccacgagaaccagcgactctttgagatgcttggacgaaaatgcttgacgctggccactgcagttgttcagctgtacctggcgctgccccctggagctgagcactggaccaaggagcattgtggggctgtgtgcttcgtgaaggataacccccagaagtcctacttcatccgcctttacggccttcaggctggtcggctgctctgggaacaggagctgtactcacagcttgtctactccacccccacccccttcttccacaccttcgctggagatgactgccaagcggggctgaactttgcagacgaggacgaggcccaggccttccgggccctcgtgcaggagaagatacaaaaaaggaatcagaggcaaagtggagacagacgccagctacccccaccaccaacaccagccaatgaagagagaagaggagggctcccacccctgcccctgcatccaggtggagaccaaggaggccctccagtgggtccgctctccctggggctggcgacagtggacatccagaaccctgacatcacgagttcacgataccgtgggctcccagc

SEQ ID NO: 34451 - DNA, 9494 bp, Homo sapiens
  source 1..9494: mol_type = unassigned DNA
ctcctctgccccggggccgccaccgcccgggcgtcggacctggtcccgtgctcgcggtgccgccgccctctgggcctagcccgcccagctcggcgagcggcggcagtgggagccgcgtccgccgcatccgcctcgactcggtgccggcccctggccctcccctcatgactgcggcgcctctgctgccaccgcccgcccggccgccgctcgccgcaggatggatgcggaccgtgcggcgctaacccccgtggctcagctcccgaatcgcccgccttcgagccctcctcgtgagccgcagcagcctcggtgccagcccccgccgcagctgggcccagcggtccgcctgtccctcgttgcggcttgtcggtgctgagtgaggcgtcgtccgggtcggcgcgaacccgcccggccgcggttccctgcagacctctgcgcgggcggctcggcccttcacgcccttttcgttcacgaatccgagcccgctcgcctctctccagcgaaccgaccatgtctggcggcgccgcagagaagcagagcagcactcccggttccctgttcctctcgccgccggctcctgcccccaagaatggctccagctccgattcctccgtgggggagaaactgggagccgcggccgccgacgctgtgaccggcaggaccgaggagtacaggcgccgccgccacactatggacaaggacagccgtggggcggccgcgaccactaccaccactgagcaccgcttcttccgccggagcgtcatctgtgactccaatgccactgcactggagcttcccggccttcctctttccctgccccagcccagcatccccgcggctgtcccgcagagtgctccaccggagccccaccgggaagagaccgtgaccgccaccgccacttcccaggtagcccagcagcctccagccgctgccgcccctggggaacaggccgtcgcgggccctgccccctcgactgtccccagcagtaccagcaaagaccgcccagtgtcccagcctagccttgtggggagcaaagaggagccgccgccggcgagaagtggcagcggcggcggcagcgccaaggagccacaggaggaacggagccagcagcaggatgatatcgaagagctggagaccaaggccgtgggaatgtctaacgatggccgctttctcaagtttgacatcgaaatcggcagaggctcctttaagacggtctacaaaggtctggacactgaaaccaccgtggaagtcgcctggtgtgaactgcaggatcgaaaattaacaaagtctgagaggcagagatttaaagaagaagctgaaatgttaaaaggtcttcagcatcccaatattgttagattttatgattcctgggaatccacagtaaaaggaaagaagtgcattgttttggtgactgaacttatgacgtctggaacacttaaaacgtatctgaaaaggtttaaagtgatgaagatcaaagttctaagaagctggtgccgtcagatccttaaaggtcttcagtttcttcatactcgaactccacctatcattcaccgcgatcttaaatgtgacaacatctttatcaccggccctactggctcagtcaagattggagacctcggtctggcaaccctgaagcgggcttcttttgccaagagtgtgataggtaccccagagttcatggcccctgagatgtatgaggagaaatatgatgaatccgttgacgtttatgcttttgggatgtgcatgcttgagatggctacatctgaatatccttactcggagtgccaaaatgctgcacagatctaccgtcgcgtgaccagtggggtgaagccagccagttttgacaaagtagcaattcctgaagtgaaggaaattattgaaggatgcatacgacaaaacaaagatgaaagatattccatcaaagaccttttgaaccatgccttcttccaagaggaaacaggagtacgggtagaattagcagaagaagatgatggagaaaaaatagccataaaattatggctacgtattgaagatattaagaaattaaagggaaaatacaaagataatgaagctattgagttttcttttgatttagagagagatgtcccagaagatgttgcacaagaaatggtagagtctgggtatgtctgtgaaggtgatcacaagaccatggctaaagctatcaaagacagagtatcattaattaagaggaaacgagagcagcggcagttggtacgggaggagcaagaaaaaaaaaagcaggaagagagcagtctcaaacagcaggtagaacaatccagtgcttcccagacaggaatcaagcagctcccttctgctagcaccggcatacctactgcttctaccacttcagcttcagtttctacacaagtagaacctgaagaacctgaggcagatcaacatcaacaactacagtaccagcaacccagtatatctgtgttatctgatgggacggttgacagtggtcagggatcctctgtcttcacagaatctcgagtgagcagccaacagacagtttcatatggttcccaacatgaacaggcacattctacaggcacagtcccagggcatataccttctactgtccaagcacagtctcagccccatggggtatatccaccctcaagtgtgcagcagggaatacagcagacagcccctcctcaacagacagtgcagtattcactttcacagacatcaacctccagtgaggccactactgcacagccagtgagtcagcctcaagctccacaagtcttgcctcaagtatcagctggaaaacagagtactcagggagtctctcaggttgctcctgcagagccagttgcagtagcacagacccaagctacccagccgaccactttggcttcctctgtagacagtgcacattcagatgttgcttcaggtatgagtgatggcaatgagaacgtcccatcttccagtggaaggcatgaaggaagaactacaaaacggcattaccgaaaatctgtaaggagtcgctctcgacatgaaaaaacttcacgcccaaaattaagaattttgaatgtttcaaataaaggagaccgagtagtagaatgtcaattagagactcataataggaaaatggttacattcaaatttgacctagatggtgacaaccccgaggagatagcaacaattatggtgaacaatgactttattctagcaatagagagagagtcgtttgtggatcaagtgcgagaaattattgaaaaagctgatgaaatgctcagtgaggatgtcagtgtggaaccagagggtgatcagggattggagagtctacaaggaaaggatgactatggcttttcaggttctcagaaattggaaggagagttcaaacaaccaattcctgcgtcttccatgccacagcaaataggcattcctaccagttctttaactcaagttgttcattctgcgggaaggcggtttatagtgagtcctgtgccagaaagccgattacgagaatcaaaagttttccccagtgaaataacagatacagttgctgcctctacagctcagagccctggaatgaacttgtctcactctgcatcatcccttagtctacaacaggccttttctgaacttagacgtgcccaaatgacagaaggacccaacacagcacctccaaactttagtcatacaggaccaacatttccagtagtacctcctttcttaagtagcattgctggagtcccaaccacagcagcagccacagcaccagtccctgcaacaagcagccctcctaatgacatttccacatcagtaattcagtctgaggttacagtgcccactgaagaggggattgctggagttgccaccagcacaggtgtggtaacttcaggtggtctccccataccacctgtgtctgaatcaccagtactttccagcgtagtttcaagtatcacaatacctgcagttgtctcaatatctactacatccccgtcacttcaagtccccacatccacatctgagatcgttgtttctagtacagcactgtatccttcagtaacagtttcagcaacttcagcctctgcagggggcagtactgctaccccaggtcctaagcctccagctgtagtatctcagcaggcagcaggcagcactactgtgggagccacattaacatcagtttctaccaccacttcattcccaagcacagcttcacagctgtgcattcagcttagcagcagtacttctactcctactttagctgaaaccgtggtagttagcgcacactcactagataagacatctcatagcagtacaactggattggctttctccctctctgcaccatcttcctcttcctctcctggagcaggagtgtctagttatatttctcagcctggtgggctgcatcctttggtcattccatcagtgatagcttctactcctattcttccccaagcagcaggacctacttctacacctttattaccccaagtacctagtatcccacccttggtacagcctgttgccaatgtgcctgctgtacagcagacactaattcatagtcagcctcaaccagctttgcttcccaaccagccccatactcattgtcctgaagtagattctgatacacaacccaaagctcctggaattgatgacataaagactctagaagaaaagctgcggtctctgttcagtgaacacagctcatctggagctcagcatgcctctgtctcactggagacctcactagtcatagagagcactgtcacaccaggcatcccaactactgctgttgcaccaagcaaactcctgacttctaccacaagtacttgcttaccaccaaccaatttaccactaggaacagttgctttgccagttacaccagtggtcacacctgggcaagtttctaccccagtcagcactactacatcaggagtgaaacctggaactgctccctccaagccacctctaactaaggctccggtgctgccagtgggtactgaacttccagcaggtactctacccagcgagcagctgccaccttttccaggaccttctctaacccagtcccagcaacctctagaggatcttgatgctcaattgagaagaacacttagtccagagatgatcacagtgacttctgcggttggtcctgtgtccatggcggctccaacagcaatcacagaagcaggaacacagcctcagaagggtgtttctcaagtcaaagaaggccctgtcctagcaactagttcaggagctggtgtttttaagatgggacgatttcaggtttctgttgcagcagacggtgcccagaaagagggtaaaaataagtcagaagatgcaaagtctgttcattttgaatccagcacctcagagtcctcagtgctatcaagtagtagtccagagagtaccttggtgaaaccagagccgaatggcataaccatccctggtatctcttcagatgtgccagagagtgcccacaaaactactgcctcagaggcaaagtcagacactgggcagcctaccaaggttggacgttttcaggtgacaactacagcaaacaaagtgggtcgtttctctgtatcaaaaactgaggacaagatcactgacacaaagaaagaaggaccagtggcatctcctccttttatggatttggaacaagctgttcttcctgctgtgataccaaagaaagagaagcctgaactgtcagagccttcacatctaaatgggccgtcttctgacccggaggccgcttttttaagtagggatgtggatgatggttccggtagtccacactcgccccatcagctgagctcaaagagccttcctagccagaatctaagtcaaagccttagtaattcatttaactcctcttacatgagtagcgacaatgagtcagatatcgaagatgaagacttaaagttagagctgcgacgactacgagataaacatctcaaagagattcaggacctgcagagtcgccagaagcatgaaattgaatctttgtataccaaactgggcaaggtgccccctgctgttattattcccccagctgctcccctttcagggagaagacgacgacccactaaaagcaaaggcagcaaatctagtcgaagcagttccttggggaataaaagcccccagctttcaggtaacctgtctggtcagagtgcagcttcagtcttgcacccccagcagaccctccaccctcctggcaacatcccagagtccgggcagaatcagctgttacagccccttaagccatctccctccagtgacaacctctattcagccttcaccagtgatggtgccatttcagtaccaagcctttctgctccaggtcaaggaaccagcagcacaaacactgttggggcaacagtgaacagccaagccgcccaagctcagcctcctgccatgacgtccagcaggaagggcacattcacagatgacttgcacaagttggtagacaattgggcccgagatgccatgaatctctcaggcaggagaggaagcaaagggcacatgaattacgagggccctggaatggcaaggaagttctctgcacctgggcaactgtgcatctccatgacctcgaacctgggtggctctgcccccatctctgcagcatcagctacctctctaggtcacttcaccaagtctatgtgccccccacagcagtatggctttccagctaccccatttggcgctcaatggagtgggacgggtggcccagcaccacagccacttggccagttccaacctgtgggaactgcctccttgcagaatttcaacatcagcaatttgcagaaatccatcagcaaccccccaggctccaacctgcggaccacttagacctagagacattaactgaatagatctgggggcaggagatggaatgctgagggggtgggtgggggtgggaagtagcctatatactaactactagtgctgcatttaactggttatttcttgccagaggggaatgtttttaatactgcattgagccctcagaatggagagtctcccccgctccagttattggaatgggagaggaaggaaagaacagcttttttgtcaaggggcagcttcagaccatgctttcctgtttatctatactcagtaatgaggatgagggctaggaaagtcttgttcataaggaagctggagaactcaatgtaaaatcaaacccatctgtaatttcgagtgggtggagctcttgcttttggtacatgccctgaatccctcactccctcaagaatccgaaccacaggacaaaaaccacctactgggctctctcctaccctgccctcctcccttttttttacccctctcttttttattttttctttgctctttagaacccagtgaaaaataccagggtactggggtgcaactctttcttatgataggtcattagtgctttaagcaaaagatattagcagctttgactgcagcattagcaattaggaaaaaaaaaaaattaagttccctgcggacatgtaactttgccatcagttttgatgtggaaacactgtgatatataaaatgttgttggacaacagtagttttaagagtaaaatatgaaacgtttaaaaagttccaaaaaaagctagctctgtcctttacttattgagacactttaactttttcctttgtatttccattgtattagataaataaatgtgaatgtaaaattgtataaattactgtacttgaatacttctgtttcccagtgttgcttgctggacattttagtgccttggacttctattgcttctgccattagcatcaacttaccagaccccagatcaataaagggcatgtggaaggaaatcgtaggtccatgtgaccccagcagtccagcagtggttatgccaaagggaaattgaaaaagtatttttttaagtcattcaacaactttgtctagagcaggtgtaagatgagtagggtgggaagttaggttggcatcagtggttaaaaacagaaagttctgtttcgggaatagtgaggagggggtgttgtaacaaaattggacaacttaaaagaatggtgtgtgctgggtgaaagacaaagactaaagaatgaggaaacaaacgtgatgcctggccagtgactgtcatataaacctttcttatttgagctaggcttgaacagacgtgacctagaagaaactgaacataaagagaagggggtggggggctagttttcaagttggggaacctgatagtgaaaagtcacagatggagaaaattgctctcagaaaaactgtttggattgctttcctcttgttgcacatgtaccatgcatttctcagcttggggtactacattttgtggaaagttaatctatctatctttccacatctgaattaatcattctaggaaagaatacttattcctactcatttcctttatgatgtccaaatggttgcaggatcataatctattgtgccacctttatttctagaagtacaactaatatgttcacattttcaaataaataatactccccgtaagtaataactgcaaccaatcagtgttattcagtgctatgcctccttgtaatgggtagttattaattattttcagagctttccggaaatactgtcctaactggctatgtttaggatctttgttatctctgaagacaaagaaagaagctaggactcttaattttggggtgcttcttgactcttagttgggaaactgaaaatatttccaaccttttacccacgtcaatggcatattctgggaatcaccaccaccaccaccactaccacagaaagaggctggaggctcctgtaccctgttcattccttaagggccctgcttcccttagtaagtaagtaagttggtctacggccctaaatatgcaaatgagagctgaaggtttttaaaaggtagaaaggaaaagggcaagggcttccacccctgctttaaaatgatttatttattctctgcttgtatttcttgtggagagagtaaggatagaaccaacaaggggctgagtagctgagaaaggggccacccaagagtgaaacatactttataccagaggagcagtggagcctcatgcagcacattatcatttgttatttgggtttaataataattttgacatcttttcactcatacacaaaaaaagtcagaactggtgttatttactgttgatttcatcctcctgtgtatgaaataacaagcctagaggaatgaactagtgctactgaactgtttaaattatttttgtgttaatagtacactttgagtatctttttccacattaaaaactttctgaattataaatgttttccttacattatttaacaatgtacactgttaaaaataaaaataaaaattcaaactttgggggtttctcagcagccgttaattgtacattttgcactaactctgggtgttgcgcttcttgtaagattgcgctttgtgcttcagtttgttacctttgtagacttatttaatgaaaccattcaaataaaccaaacttgcttttgttga

SEQ ID NO: 34452 - DNA, 10452 bp, Homo sapiens
  source 1..10452: mol_type = unassigned DNA
ccggcccttcgcctctgggcgatgggcgacctgtgaggccggtccccatcgctgggggcgcgtgtgggaggaggcggccgcccgagtgaccgggagccgggccgcggccttccctcgcccgcctcggcccctcccactcctctgccccggggccgccaccgcccgggcgtcggacctggtcccgtgctcgcggtgccgccgccctctgggcctagcccgcccagctcggcgagcggcggcagtgggagccgcgtccgccgcatccgcctcgactcggtgccggcccctggccctcccctcatgactgcggcgcctctgctgccaccgcccgcccggccgccgctcgccgcaggatggatgcggaccgtgcggcgctaacccccgtggctcagctcccgaatcgcccgccttcgagccctcctcgtgagccgcagcagcctcggtgccagcccccgccgcagctgggcccagcggtccgcctgtccctcgttgcggcttgtcggtgctgagtgaggcgtcgtccgggtcggcgcgaacccgcccggccgcggttccctgcagacctctgcgcgggcggctcggcccttcacgcccttttcgttcacgaatccgagcccgctcgcctctctccagcgaaccgaccatgtctggcggcgccgcagagaagcagagcagcactcccggttccctgttcctctcgccgccggctcctgcccccaagaatggctccagctccgattcctccgtgggggagaaactgggagccgcggccgccgacgctgtgaccggcaggaccgaggagtacaggcgccgccgccacactatggacaaggacagccgtggggcggccgcgaccactaccaccactgagcaccgcttcttccgccggagcgtcatctgtgactccaatgccactgcactggagcttcccggccttcctctttccctgccccagcccagcatccccgcggctgtcccgcagagtgctccaccggagccccaccgggaagagaccgtgaccgccaccgccacttcccaggtagcccagcagcctccagccgctgccgcccctggggaacaggccgtcgcgggccctgccccctcgactgtccccagcagtaccagcaaagaccgcccagtgtcccagcctagccttgtggggagcaaagaggagccgccgccggcgagaagtggcagcggcggcggcagcgccaaggagccacaggaggaacggagccagcagcaggatgatatcgaagagctggagaccaaggccgtgggaatgtctaacgatggccgctttctcaagtttgacatcgaaatcggcagaggctcctttaagacggtctacaaaggtctggacactgaaaccaccgtggaagtcgcctggtgtgaactgcaggatcgaaaattaacaaagtctgagaggcagagatttaaagaagaagctgaaatgttaaaaggtcttcagcatcccaatattgttagattttatgattcctgggaatccacagtaaaaggaaagaagtgcattgttttggtgactgaacttatgacgtctggaacacttaaaacgtatctgaaaaggtttaaagtgatgaagatcaaagttctaagaagctggtgccgtcagatccttaaaggtcttcagtttcttcatactcgaactccacctatcattcaccgcgatcttaaatgtgacaacatctttatcaccggccctactggctcagtcaagattggagacctcggtctggcaaccctgaagcgggcttcttttgccaagagtgtgataggtaccccagagttcatggcccctgagatgtatgaggagaaatatgatgaatccgttgacgtttatgcttttgggatgtgcatgcttgagatggctacatctgaatatccttactcggagtgccaaaatgctgcacagatctaccgtcgcgtgaccagtggggtgaagccagccagttttgacaaagtagcaattcctgaagtgaaggaaattattgaaggatgcatacgacaaaacaaagatgaaagatattccatcaaagaccttttgaaccatgccttcttccaagaggaaacaggagtacgggtagaattagcagaagaagatgatggagaaaaaatagccataaaattatggctacgtattgaagatattaagaaattaaagggaaaatacaaagataatgaagctattgagttttcttttgatttagagagagatgtcccagaagatgttgcacaagaaatggtagagtctgggtatgtctgtgaaggtgatcacaagaccatggctaaagctatcaaagacagagtatcattaattaagaggaaacgagagcagcggcagttggtacgggaggagcaagaaaaaaaaaagcaggaagagagcagtctcaaacagcaggtagaacaatccagtgcttcccagacaggaatcaagcagctcccttctgctagcaccggcatacctactgcttctaccacttcagcttcagtttctacacaagtagaacctgaagaacctgaggcagatcaacatcaacaactacagtaccagcaacccagtatatctgtgttatctgatgggacggttgacagtggtcagggatcctctgtcttcacagaatctcgagtgagcagccaacagacagtttcatatggttcccaacatgaacaggcacattctacaggcacagtcccagggcatataccttctactgtccaagcacagtctcagccccatggggtatatccaccctcaagtgtggcacaggggcagagccagggtcagccatcctcaagtagcttaacaggggtttcatcttcccaacccatacaacatcctcagcagcagcagggaatacagcagacagcccctcctcaacagacagtgcagtattcactttcacagacatcaacctccagtgaggccactactgcacagccagtgagtcagcctcaagctccacaagtcttgcctcaagtatcagctggaaaacagcttccagtttcccagccagtaccaactatccaaggcgaacctcagatcccagttgcgacacaaccctcggttgttccagtccactctggtgctcatttccttccagtgggacagccgctccctactcccttgctccctcagtaccctgtctctcagattcccatatcaactcctcatgtgtctacggctcagacaggtttctcatcccttcccatcacaatggcagctggcattactcagcctctgctcacgttggcttcatctgctacaacagctgcgatcccgggggtatcaactgtggttcctagtcagcttccaacccttctgcagcctgtgactcagctgccaagtcaggttcacccacagctcctacaaccagcagttcagtccatgggaataccagctaaccttggacaagctgctgaggttccactttcctctggagatgttctgtaccagggcttcccacctcgactgccaccacagtacccaggagattcaaatattgctccctcttccaacgtggcttctgtttgcatccattctacagtcctatcccctcccatgccgacagaagtactggctacacctgggtactttcccacagtggtgcagccttatgtggaatcaaatcttttagttcctatgggtggtgtaggaggacaggttcaagtgtcccagccaggagggagtttagcacaagcccccactacatcctcccagcaagcagttttggagagtactcagggagtctctcaggttgctcctgcagagccagttgcagtagcacagacccaagctacccagccgaccactttggcttcctctgtagacagtgcacattcagatgttgcttcaggtatgagtgatggcaatgagaacgtcccatcttccagtggaaggcatgaaggaagaactacaaaacggcattaccgaaaatctgtaaggagtcgctctcgacatgaaaaaacttcacgcccaaaattaagaattttgaatgtttcaaataaaggagaccgagtagtagaatgtcaattagagactcataataggaaaatggttacattcaaatttgacctagatggtgacaaccccgaggagatagcaacaattatggtgaacaatgactttattctagcaatagagagagagtcgtttgtggatcaagtgcgagaaattattgaaaaagctgatgaaatgctcagtgaggatgtcagtgtggaaccagagggtgatcagggattggagagtctacaaggaaaggatgactatggcttttcaggttctcagaaattggaaggagagttcaaacaaccaattcctgcgtcttccatgccacagcaaataggcattcctaccagttctttaactcaagttgttcattctgcgggaaggcggtttatagtgagtcctgtgccagaaagccgattacgagaatcaaaagttttccccagtgaaataacagatacagttgctgcctctacagctcagagccctggaatgaacttgtctcactctgcatcatcccttagtctacaacaggccttttctgaacttagacgtgcccaaatgacagaaggacccaacacagcacctccaaactttagtcatacaggaccaacatttccagtagtacctcctttcttaagtagcattgctggagtcccaaccacagcagcagccacagcaccagtccctgcaacaagcagccctcctaatgacatttccacatcagtaattcagtctgaggttacagtgcccactgaagaggggattgctggagttgccaccagcacaggtgtggtaacttcaggtggtctccccataccacctgtgtctgaatcaccagtactttccagcgtagtttcaagtatcacaatacctgcagttgtctcaatatctactacatccccgtcacttcaagtccccacatccacatctgagatcgttgtttctagtacagcactgtatccttcagtaacagtttcagcaacttcagcctctgcagggggcagtactgctaccccaggtcctaagcctccagctgtagtatctcagcaggcagcaggcagcactactgtgggagccacattaacatcagtttctaccaccacttcattcccaagcacagcttcacagctgtgcattcagcttagcagcagtacttctactcctactttagctgaaaccgtggtagttagcgcacactcactagataagacatctcatagcagtacaactggattggctttctccctctctgcaccatcttcctcttcctctcctggagcaggagtgtctagttatatttctcagcctggtgggctgcatcctttggtcattccatcagtgatagcttctactcctattcttccccaagcagcaggacctacttctacacctttattaccccaagtacctagtatcccacccttggtacagcctgttgccaatgtgcctgctgtacagcagacactaattcatagtcagcctcaaccagctttgcttcccaaccagccccatactcattgtcctgaagtagattctgatacacaacccaaagctcctggaattgatgacataaagactctagaagaaaagctgcggtctctgttcagtgaacacagctcatctggagctcagcatgcctctgtctcactggagacctcactagtcatagagagcactgtcacaccaggcatcccaactactgctgttgcaccaagcaaactcctgacttctaccacaagtacttgcttaccaccaaccaatttaccactaggaacagttgctttgccagttacaccagtggtcacacctgggcaagtttctaccccagtcagcactactacatcaggagtgaaacctggaactgctccctccaagccacctctaactaaggctccggtgctgccagtgggtactgaacttccagcaggtactctacccagcgagcagctgccaccttttccaggaccttctctaacccagtcccagcaacctctagaggatcttgatgctcaattgagaagaacacttagtccagagatgatcacagtgacttctgcggttggtcctgtgtccatggcggctccaacagcaatcacagaagcaggaacacagcctcagaagggtgtttctcaagtcaaagaaggccctgtcctagcaactagttcaggagctggtgtttttaagatgggacgatttcaggtttctgttgcagcagacggtgcccagaaagagggtaaaaataagtcagaagatgcaaagtctgttcattttgaatccagcacctcagagtcctcagtgctatcaagtagtagtccagagagtaccttggtgaaaccagagccgaatggcataaccatccctggtatctcttcagatgtgccagagagtgcccacaaaactactgcctcagaggcaaagtcagacactgggcagcctaccaaggttggacgttttcaggtgacaactacagcaaacaaagtgggtcgtttctctgtatcaaaaactgaggacaagatcactgacacaaagaaagaaggaccagtggcatctcctccttttatggatttggaacaagctgttcttcctgctgtgataccaaagaaagagaagcctgaactgtcagagccttcacatctaaatgggccgtcttctgacccggaggccgcttttttaagtagggatgtggatgatggttccggtagtccacactcgccccatcagctgagctcaaagagccttcctagccagaatctaagtcaaagccttagtaattcatttaactcctcttacatgagtagcgacaatgagtcagatatcgaagatgaagacttaaagttagagctgcgacgactacgagataaacatctcaaagagattcaggacctgcagagtcgccagaagcatgaaattgaatctttgtataccaaactgggcaaggtgccccctgctgttattattcccccagctgctcccctttcagggagaagacgacgacccactaaaagcaaaggcagcaaatctagtcgaagcagttccttggggaataaaagcccccagctttcaggtaacctgtctggtcagagtgcagcttcagtcttgcacccccagcagaccctccaccctcctggcaacatcccagagtccgggcagaatcagctgttacagccccttaagccatctccctccagtgacaacctctattcagccttcaccagtgatggtgccatttcagtaccaagcctttctgctccaggtcaaggaaccagcagcacaaacactgttggggcaacagtgaacagccaagccgcccaagctcagcctcctgccatgacgtccagcaggaagggcacattcacagatgacttgcacaagttggtagacaattgggcccgagatgccatgaatctctcaggcaggagaggaagcaaagggcacatgaattacgagggccctggaatggcaaggaagttctctgcacctgggcaactgtgcatctccatgacctcgaacctgggtggctctgcccccatctctgcagcatcagctacctctctaggtcacttcaccaagtctatgtgccccccacagcagtatggctttccagctaccccatttggcgctcaatggagtgggacgggtggcccagcaccacagccacttggccagttccaacctgtgggaactgcctccttgcagaatttcaacatcagcaatttgcagaaatccatcagcaaccccccaggctccaacctgcggaccacttagacctagagacattaactgaatagatctgggggcaggagatggaatgctgagggggtgggtgggggtgggaagtagcctatatactaactactagtgctgcatttaactggttatttcttgccagaggggaatgtttttaatactgcattgagccctcagaatggagagtctcccccgctccagttattggaatgggagaggaaggaaagaacagcttttttgtcaaggggcagcttcagaccatgctttcctgtttatctatactcagtaatgaggatgagggctaggaaagtcttgttcataaggaagctggagaactcaatgtaaaatcaaacccatctgtaatttcgagtgggtggagctcttgcttttggtacatgccctgaatccctcactccctcaagaatccgaaccacaggacaaaaaccacctactgggctctctcctaccctgccctcctcccttttttttacccctctcttttttattttttctttgctctttagaacccagtgaaaaataccagggtactggggtgcaactctttcttatgataggtcattagtgctttaagcaaaagatattagcagctttgactgcagcattagcaattaggaaaaaaaaaaaattaagttccctgcggacatgtaactttgccatcagttttgatgtggaaacactgtgatatataaaatgttgttggacaacagtagttttaagagtaaaatatgaaacgtttaaaaagttccaaaaaaagctagctctgtcctttacttattgagacactttaactttttcctttgtatttccattgtattagataaataaatgtgaatgtaaaattgtataaattactgtacttgaatacttctgtttcccagtgttgcttgctggacattttagtgccttggacttctattgcttctgccattagcatcaacttaccagaccccagatcaataaagggcatgtggaaggaaatcgtaggtccatgtgaccccagcagtccagcagtggttatgccaaagggaaattgaaaaagtatttttttaagtcattcaacaactttgtctagagcaggtgtaagatgagtagggtgggaagttaggttggcatcagtggttaaaaacagaaagttctgtttcgggaatagtgaggagggggtgttgtaacaaaattggacaacttaaaagaatggtgtgtgctgggtgaaagacaaagactaaagaatgaggaaacaaacgtgatgcctggccagtgactgtcatataaacctttcttatttgagctaggcttgaacagacgtgacctagaagaaactgaacataaagagaagggggtggggggctagttttcaagttggggaacctgatagtgaaaagtcacagatggagaaaattgctctcagaaaaactgtttggattgctttcctcttgttgcacatgtaccatgcatttctcagcttggggtactacattttgtggaaagttaatctatctatctttccacatctgaattaatcattctaggaaagaatacttattcctactcatttcctttatgatgtccaaatggttgcaggatcataatctattgtgccacctttatttctagaagtacaactaatatgttcacattttcaaataaataatactccccgtaagtaataactgcaaccaatcagtgttattcagtgctatgcctccttgtaatgggtagttattaattattttcagagctttccggaaatactgtcctaactggctatgtttaggatctttgttatctctgaagacaaagaaagaagctaggactcttaattttggggtgcttcttgactcttagttgggaaactgaaaatatttccaaccttttacccacgtcaatggcatattctgggaatcaccaccaccaccaccactaccacagaaagaggctggaggctcctgtaccctgttcattccttaagggccctgcttcccttagtaagtaagtaagttggtctacggccctaaatatgcaaatgagagctgaaggtttttaaaaggtagaaaggaaaagggcaagggcttccacccctgctttaaaatgatttatttattctctgcttgtatttcttgtggagagagtaaggatagaaccaacaaggggctgagtagctgagaaaggggccacccaagagtgaaacatactttataccagaggagcagtggagcctcatgcagcacattatcatttgttatttgggtttaataataattttgacatcttttcactcatacacaaaaaaagtcagaactggtgttatttactgttgatttcatcctcctgtgtatgaaataacaagcctagaggaatgaactagtgctactgaactgtttaaattatttttgtgttaatagtacactttgagtatctttttccacattaaaaactttctgaattataaatgttttccttacattatttaacaatgtacactgttaaaaataaaaataaaaattcaaactttgggggtttctcagcagccgttaattgtacattttgcactaactctgggtgttgcgcttcttgtaagattgcgctttgtgcttcagtttgttacctttgtagacttatttaatgaaaccattcaaataaaccaaacttgcttttgttga

SEQ ID NO: 34453 - DNA, 8588 bp, Homo sapiens
  source 1..8588: mol_type = unassigned DNA
atggatattaaaaagaaagatttttgctcagtatttgtcatcataaattctcattgctgctgctgccctcaaaaggattgtataaatgagggggtgaagccagccagttttgacaaagtagcaattcctgaagtgaaggaaattattgaaggatgcatacgacaaaacaaagatgaaagatattccatcaaagaccttttgaaccatgccttcttccaagaggaaacaggagtacgggtagaattagcagaagaagatgatggagaaaaaatagccataaaattatggctacgtattgaagatattaagaaattaaagggaaaatacaaagataatgaagctattgagttttcttttgatttagagagagatgtcccagaagatgttgcacaagaaatggtagagtctgggtatgtctgtgaaggtgatcacaagaccatggctaaagctatcaaagacagagtatcattaattaagaggaaacgagagcagcggcagttggtacgggaggagcaagaaaaaaaaaagcaggaagagagcagtctcaaacagcaggtagaacaatccagtgcttcccagacaggaatcaagcagctcccttctgctagcaccggcatacctactgcttctaccacttcagcttcagtttctacacaagtagaacctgaagaacctgaggcagatcaacatcaacaactacagtaccagcaacccagtatatctgtgttatctgatgggacggttgacagtggtcagggatcctctgtcttcacagaatctcgagtgagcagccaacagacagtttcatatggttcccaacatgaacaggcacattctacaggcacagtcccagggcatataccttctactgtccaagcacagtctcagccccatggggtatatccaccctcaagtgtggcacaggggcagagccagggtcagccatcctcaagtagcttaacaggggtttcatcttcccaacccatacaacatcctcagcagcagcagggaatacagcagacagcccctcctcaacagacagtgcagtattcactttcacagacatcaacctccagtgaggccactactgcacagccagtgagtcagcctcaagctccacaagtcttgcctcaagtatcagctggaaaacagcttccagtttcccagccagtaccaactatccaaggcgaacctcagatcccagttgcgacacaaccctcggttgttccagtccactctggtgctcatttccttccagtgggacagccgctccctactcccttgctccctcagtaccctgtctctcagattcccatatcaactcctcatgtgtctacggctcagacaggtttctcatcccttcccatcacaatggcagctggcattactcagcctctgctcacgttggcttcatctgctacaacagctgcgatcccgggggtatcaactgtggttcctagtcagcttccaacccttctgcagcctgtgactcagctgccaagtcaggttcacccacagctcctacaaccagcagttcagtccatgggaataccagctaaccttggacaagctgctgaggttccactttcctctggagatgttctgtaccagggcttcccacctcgactgccaccacagtacccaggagattcaaatattgctccctcttccaacgtggcttctgtttgcatccattctacagtcctatcccctcccatgccgacagaagtactggctacacctgggtactttcccacagtggtgcagccttatgtggaatcaaatcttttagttcctatgggtggtgtaggaggacaggttcaagtgtcccagccaggagggagtttagcacaagcccccactacatcctcccagcaagcagttttggagagtactcagggagtctctcaggttgctcctgcagagccagttgcagtagcacagacccaagctacccagccgaccactttggcttcctctgtagacagtgcacattcagatgttgcttcaggtatgagtgatggcaatgagaacgtcccatcttccagtggaaggcatgaaggaagaactacaaaacggcattaccgaaaatctgtaaggagtcgctctcgacatgaaaaaacttcacgcccaaaattaagaattttgaatgtttcaaataaaggagaccgagtagtagaatgtcaattagagactcataataggaaaatggttacattcaaatttgacctagatggtgacaaccccgaggagatagcaacaattatggtgaacaatgactttattctagcaatagagagagagtcgtttgtggatcaagtgcgagaaattattgaaaaagctgatgaaatgctcagtgaggatgtcagtgtggaaccagagggtgatcagggattggagagtctacaaggaaaggatgactatggcttttcaggttctcagaaattggaaggagagttcaaacaaccaattcctgcgtcttccatgccacagcaaataggcattcctaccagttctttaactcaagttgttcattctgcgggaaggcggtttatagtgagtcctgtgccagaaagccgattacgagaatcaaaagttttccccagtgaaataacagatacagttgctgcctctacagctcagagccctggaatgaacttgtctcactctgcatcatcccttagtctacaacaggccttttctgaacttagacgtgcccaaatgacagaaggacccaacacagcacctccaaactttagtcatacaggaccaacatttccagtagtacctcctttcttaagtagcattgctggagtcccaaccacagcagcagccacagcaccagtccctgcaacaagcagccctcctaatgacatttccacatcagtaattcagtctgaggttacagtgcccactgaagaggggattgctggagttgccaccagcacaggtgtggtaacttcaggtggtctccccataccacctgtgtctgaatcaccagtactttccagcgtagtttcaagtatcacaatacctgcagttgtctcaatatctactacatccccgtcacttcaagtccccacatccacatctgagatcgttgtttctagtacagcactgtatccttcagtaacagtttcagcaacttcagcctctgcagggggcagtactgctaccccaggtcctaagcctccagctgtagtatctcagcaggcagcaggcagcactactgtgggagccacattaacatcagtttctaccaccacttcattcccaagcacagcttcacagctgtgcattcagcttagcagcagtacttctactcctactttagctgaaaccgtggtagttagcgcacactcactagataagacatctcatagcagtacaactggattggctttctccctctctgcaccatcttcctcttcctctcctggagcaggagtgtctagttatatttctcagcctggtgggctgcatcctttggtcattccatcagtgatagcttctactcctattcttccccaagcagcaggacctacttctacacctttattaccccaagtacctagtatcccacccttggtacagcctgttgccaatgtgcctgctgtacagcagacactaattcatagtcagcctcaaccagctttgcttcccaaccagccccatactcattgtcctgaagtagattctgatacacaacccaaagctcctggaattgatgacataaagactctagaagaaaagctgcggtctctgttcagtgaacacagctcatctggagctcagcatgcctctgtctcactggagacctcactagtcatagagagcactgtcacaccaggcatcccaactactgctgttgcaccaagcaaactcctgacttctaccacaagtacttgcttaccaccaaccaatttaccactaggaacagttgctttgccagttacaccagtggtcacacctgggcaagtttctaccccagtcagcactactacatcaggagtgaaacctggaactgctccctccaagccacctctaactaaggctccggtgctgccagtgggtactgaacttccagcaggtactctacccagcgagcagctgccaccttttccaggaccttctctaacccagtcccagcaacctctagaggatcttgatgctcaattgagaagaacacttagtccagagatgatcacagtgacttctgcggttggtcctgtgtccatggcggctccaacagcaatcacagaagcaggaacacagcctcagaagggtgtttctcaagtcaaagaaggccctgtcctagcaactagttcaggagctggtgtttttaagatgggacgatttcaggtttctgttgcagcagacggtgcccagaaagagggtaaaaataagtcagaagatgcaaagtctgttcattttgaatccagcacctcagagtcctcagtgctatcaagtagtagtccagagagtaccttggtgaaaccagagccgaatggcataaccatccctggtatctcttcagatgtgccagagagtgcccacaaaactactgcctcagaggcaaagtcagacactgggcagcctaccaaggttggacgttttcaggtgacaactacagcaaacaaagtgggtcgtttctctgtatcaaaaactgaggacaagatcactgacacaaagaaagaaggaccagtggcatctcctccttttatggatttggaacaagctgttcttcctgctgtgataccaaagaaagagaagcctgaactgtcagagccttcacatctaaatgggccgtcttctgacccggaggccgcttttttaagtagggatgtggatgatggttccggtagtccacactcgccccatcagctgagctcaaagagccttcctagccagaatctaagtcaaagccttagtaattcatttaactcctcttacatgagtagcgacaatgagtcagatatcgaagatgaagacttaaagttagagctgcgacgactacgagataaacatctcaaagagattcaggacctgcagagtcgccagaagcatgaaattgaatctttgtataccaaactgggcaaggtgccccctgctgttattattcccccagctgctcccctttcagggagaagacgacgacccactaaaagcaaaggcagcaaatctagtcgaagcagttccttggggaataaaagcccccagctttcaggtaacctgtctggtcagagtgcagcttcagtcttgcacccccagcagaccctccaccctcctggcaacatcccagagtccgggcagaatcagctgttacagccccttaagccatctccctccagtgacaacctctattcagccttcaccagtgatggtgccatttcagtaccaagcctttctgctccaggtcaaggaaccagcagcacaaacactgttggggcaacagtgaacagccaagccgcccaagctcagcctcctgccatgacgtccagcaggaagggcacattcacagatgacttgcacaagttggtagacaattgggcccgagatgccatgaatctctcaggcaggagaggaagcaaagggcacatgaattacgagggccctggaatggcaaggaagttctctgcacctgggcaactgtgcatctccatgacctcgaacctgggtggctctgcccccatctctgcagcatcagctacctctctaggtcacttcaccaagtctatgtgccccccacagcagtatggctttccagctaccccatttggcgctcaatggagtgggacgggtggcccagcaccacagccacttggccagttccaacctgtgggaactgcctccttgcagaatttcaacatcagcaatttgcagaaatccatcagcaaccccccaggctccaacctgcggaccacttagacctagagacattaactgaatagatctgggggcaggagatggaatgctgagggggtgggtgggggtgggaagtagcctatatactaactactagtgctgcatttaactggttatttcttgccagaggggaatgtttttaatactgcattgagccctcagaatggagagtctcccccgctccagttattggaatgggagaggaaggaaagaacagcttttttgtcaaggggcagcttcagaccatgctttcctgtttatctatactcagtaatgaggatgagggctaggaaagtcttgttcataaggaagctggagaactcaatgtaaaatcaaacccatctgtaatttcgagtgggtggagctcttgcttttggtacatgccctgaatccctcactccctcaagaatccgaaccacaggacaaaaaccacctactgggctctctcctaccctgccctcctcccttttttttacccctctcttttttattttttctttgctctttagaacccagtgaaaaataccagggtactggggtgcaactctttcttatgataggtcattagtgctttaagcaaaagatattagcagctttgactgcagcattagcaattaggaaaaaaaaaaaattaagttccctgcggacatgtaactttgccatcagttttgatgtggaaacactgtgatatataaaatgttgttggacaacagtagttttaagagtaaaatatgaaacgtttaaaaagttccaaaaaaagctagctctgtcctttacttattgagacactttaactttttcctttgtatttccattgtattagataaataaatgtgaatgtaaaattgtataaattactgtacttgaatacttctgtttcccagtgttgcttgctggacattttagtgccttggacttctattgcttctgccattagcatcaacttaccagaccccagatcaataaagggcatgtggaaggaaatcgtaggtccatgtgaccccagcagtccagcagtggttatgccaaagggaaattgaaaaagtatttttttaagtcattcaacaactttgtctagagcaggtgtaagatgagtagggtgggaagttaggttggcatcagtggttaaaaacagaaagttctgtttcgggaatagtgaggagggggtgttgtaacaaaattggacaacttaaaagaatggtgtgtgctgggtgaaagacaaagactaaagaatgaggaaacaaacgtgatgcctggccagtgactgtcatataaacctttcttatttgagctaggcttgaacagacgtgacctagaagaaactgaacataaagagaagggggtggggggctagttttcaagttggggaacctgatagtgaaaagtcacagatggagaaaattgctctcagaaaaactgtttggattgctttcctcttgttgcacatgtaccatgcatttctcagcttggggtactacattttgtggaaagttaatctatctatctttccacatctgaattaatcattctaggaaagaatacttattcctactcatttcctttatgatgtccaaatggttgcaggatcataatctattgtgccacctttatttctagaagtacaactaatatgttcacattttcaaataaataatactccccgtaagtaataactgcaaccaatcagtgttattcagtgctatgcctccttgtaatgggtagttattaattattttcagagctttccggaaatactgtcctaactggctatgtttaggatctttgttatctctgaagacaaagaaagaagctaggactcttaattttggggtgcttcttgactcttagttgggaaactgaaaatatttccaaccttttacccacgtcaatggcatattctgggaatcaccaccaccaccaccactaccacagaaagaggctggaggctcctgtaccctgttcattccttaagggccctgcttcccttagtaagtaagtaagttggtctacggccctaaatatgcaaatgagagctgaaggtttttaaaaggtagaaaggaaaagggcaagggcttccacccctgctttaaaatgatttatttattctctgcttgtatttcttgtggagagagtaaggatagaaccaacaaggggctgagtagctgagaaaggggccacccaagagtgaaacatactttataccagaggagcagtggagcctcatgcagcacattatcatttgttatttgggtttaataataattttgacatcttttcactcatacacaaaaaaagtcagaactggtgttatttactgttgatttcatcctcctgtgtatgaaataacaagcctagaggaatgaactagtgctactgaactgtttaaattatttttgtgttaatagtacactttgagtatctttttccacattaaaaactttctgaattataaatgttttccttacattatttaacaatgtacactgttaaaaataaaaataaaaattcaaactttgggggtttctcagcagccgttaattgtacattttgcactaactctgggtgttgcgcttcttgtaagattgcgctttgtgcttcagtttgttacctttgtagacttatttaatgaaaccattcaaataaaccaaacttgcttttgttga

SEQ ID NO: 34454 - DNA, 1902 bp, Homo sapiens
  source 1..1902: mol_type = unassigned DNA
ccactcctctgccccggggccgccaccgcccgggcgtcggacctggtcccgtgctcgcggtgccgccgccctctgggcctagcccgcccagctcggcgagcggcggcagtgggagccgcgtccgccgcatccgcctcgactcggtgccggcccctggccctcccctcatgactgcggcgcctctgctgccaccgcccgcccggccgccgctcgccgcaggatggatgcggaccgtgcggcgctaacccccgtggctcagctcccgaatcgcccgccttcgagccctcctcgtgagccgcagcagcctcggtgccagcccccgccgcagctgggcccagcggtccgcctgtccctcgttgcggcttgtcggtgctgagtgaggcgtcgtccgggtcggcgcgaacccgcccggccgcggttccctgcagacctctgcgcgggcggctcggcccttcacgcccttttcgttcacgaatccgagcccgctcgcctctctccagcgaaccgaccatgtctggcggcgccgcagagaagcagagcagcactcccggttccctgttcctctcgccgccggctcctgcccccaagaatggctccagctccgattcctccgtgggggagaaactgggagccgcggccgccgacgctgtgaccggcaggaccgaggagtacaggcgccgccgccacactatggacaaggacagccgtggggcggccgcgaccactaccaccactgagcaccgcttcttccgccggagcgtcatctgtgactccaatgccactgcactggagcttcccggccttcctctttccctgccccagcccagcatccccgcggctgtcccgcagagtgctccaccggagccccaccgggaagagaccgtgaccgccaccgccacttcccaggtagcccagcagcctccagccgctgccgcccctggggaacaggccgtcgcgggccctgccccctcgactgtccccagcagtaccagcaaagaccgcccagtgtcccagcctagccttgtggggagcaaagaggagccgccgccggcgagaagtggcagcggcggcggcagcgccaaggagccacaggaggaacggagccagcagcaggatgatatcgaagagctggagaccaaggccgtgggaatgtctaacgatggccgctttctcaagtttgacatcgaaatcggcagaggctcctttaagacggtctacaaaggtctggacactgaaaccaccgtggaagtcgcctggtgtgaactgcaggatcgaaaattaacaaagtctgagaggcagagatttaaagaagaagctgaaatgttaaaaggtcttcagcatcccaatattgttagattttatgattcctgggaatccacagtaaaaggaaagaagtgcattgttttggtgactgaacttatgacgtctggaacacttaaaacgtatctgaaaaggtttaaagtgatgaagatcaaagttctaagaagctggtgccgtcagatccttaaaggtcttcagtttcttcatactcgaactccacctatcattcaccgcgatcttaaatgtgacaacatctttatcaccggccctactggctcagtcaagattggagacctcggtctggcaaccctgaagcgggcttcttttgccaagagtgtgataggtatgtttcaggtgtaccttggagcctgactggctttctcacattccttttatttagaatcctggctctgtcagagttttaagtgatataaaccttaagaaattcatagcttgaactcaggaggtgatccattgtacttatgagatataggattctctatatttgtgcttcttggaatcatcttagagactattggtaacattacgttacaagaaataaagtgaactttgttgataaaa

SEQ ID NO: 34455 - DNA, 8643 bp, Homo sapiens
  source 1..8643: mol_type = unassigned DNA
atgtctggcggcgccgcagagaagcagagcagcactcccggttccctgttcctctcgccgccggctcctgcccccaagaatggctccagctccgattcctccgtgggggagaaactgggagccgcggccgccgacgctgtgaccggcaggaccgaggagtacaggcgccgccgccacactatggacaaggacagccgtggggcggccgcgaccactaccaccactgagcaccgcttcttccgccggagcgtcatctgtgactccaatgccactgcactggagcttcccggccttcctctttccctgccccagcccagcatccccgcggctgtcccgcagagtgctccaccggagccccaccgggaagagaccgtgaccgccaccgccacttcccaggtagcccagcagcctccagccgctgccgcccctggggaacaggccgtcgcgggccctgccccctcgactgtccccagcagtaccagcaaagaccgcccagtgtcccagcctagccttgtggggagcaaagaggagccgccgccggcgagaagtggcagcggcggcggcagcgccaaggagccacaggaggaacggagccagcagcaggatgatatcgaagagctggagaccaaggccgtgggaatgtctaacgatggccgctttctcaagtttgacatcgaaatcggcagaggctcctttaagacggtctacaaaggtctggacactgaaaccaccgtggaagtcgcctggtgtgaactgcaggatcgaaaattaacaaagtctgagaggcagagatttaaagaagaagctgaaatgttaaaaggtcttcagcatcccaatattgttagattttatgattcctgggaatccacagtaaaaggaaagaagtgcattgttttggtgactgaacttatgacgtctggaacacttaaaacgtatctgaaaaggtttaaagtgatgaagatcaaagttctaagaagctggtgccgtcagatccttaaaggtcttcagtttcttcatactcgaactccacctatcattcaccgcgatcttaaatgtgacaacatctttatcaccggccctactggctcagtcaagattggagacctcggtctggcaaccctgaagcgggcttcttttgccaagagtgtgataggtaccccagagttcatggcccctgagatgtatgaggagaaatatgatgaatccgttgacgtttatgcttttgggatgtgcatgcttgagatggctacatctgaatatccttactcggagtgccaaaatgctgcacagatctaccgtcgcgtgaccagtggggtgaagccagccagttttgacaaagtagcaattcctgaagtgaaggaaattattgaaggatgcatacgacaaaacaaagatgaaagatattccatcaaagaccttttgaaccatgccttcttccaagaggaaacaggagtacgggtagaattagcagaagaagatgatggagaaaaaatagccataaaattatggctacgtattgaagatattaagaaattaaagggaaaatacaaagataatgaagctattgagttttcttttgatttagagagagatgtcccagaagatgttgcacaagaaatggtagagtctgggtatgtctgtgaaggtgatcacaagaccatggctaaagctatcaaagacagagtatcattaattaagaggaaacgagagcagcggcagttggtacgggaggagcaagaaaaaaaaaagcaggaagagagcagtctcaaacagcaggtagaacaatccagtgcttcccagacaggaatcaagcagctcccttctgctagcaccggcatacctactgcttctaccacttcagcttcagtttctacacaagtagaacctgaagaacctgaggcagatcaacatcaacaactacagtaccagcaacccagtatatctgtgttatctgatgggacggttgacagtggtcagggatcctctgtcttcacagaatctcgagtgagcagccaacagacagtttcatatggttcccaacatgaacaggcacattctacaggcacagtcccagggcatataccttctactgtccaagcacagtctcagccccatggggtatatccaccctcaagtgtgcctcgtcgtggccgtagcatgtcggtttgtgttcccatctttctgctgttgcctctgtgtcccgcatctctcccagtgctcttccaccccaccgccagtactgtctgcacctctttctccttccctcctccggactgccccgaggaaacttttgccgaaaagctttctaaagcattggagagtgtcctgcctatgcactctgcctctcagcgcaagcaccgacgctccagcctgccttccctctttgtcagtactcctcagtccatggcgcatccgtgtggggggaccccaacatacccagaatcacagatatttttcccaactattcatgaacgtccagtttctttttcaccacctcccacctgcccaccgaaagtagccatttcccagcggcgtaagagcacctccttcctggaagcccaaactcaccacttccaacccctgctgaggactgttggccaaagtcttcttccacctggtggcagcccaactaactggacaccagaggccgtagttatgttgggtactacagccagtagagtaactggagagtcatgtgagatacaggtccatcctatgtttgaaccatctcaagtttacagtgactatagacctggactagtacttccagaagaagctcactattttattcctcaggaagcagtgtatgtagctggggtacattaccaggcccgggtggcagaacagtatgagggcattccatacaactcatcagtactgtcaagtcctatgaaacagatacctgaacagaagccagtacaagggggccctacttcaagttctgtctttgaatttccatctggacaggctttcctggtaggacaccttcagaatctaagattagattctggattgggtccgggatctcccctctctagtatttctgcacctatcagtacagatgctacacgtttgaaatttcaccctgtctttgttcctcattctgcgcctgctgtgttaactcataacaatgagagcagaagcaactgtgtatttgaatttcatgttcacacaccaagctcctcttcaggagaaggaggtggaattttacctcagcgtgtttaccgaaatcggcaggttgcagtggacttgaatcaagaagaactgcctcctcaatcagttggattacatggctacttgcagcctgtgactgaagaaaagcataattaccatgccccagaattgaccgtttctgtggtagagcctatcggacagaactggccaataggaagcccagaatattccagtgattcctcacaaatcacttcttcagaccccagtgattttcagtcacctccccctacagggggagcagctgcaccttttggctctgacgtctcaatgccctttatccatctgcctcagacagtgttacaagaatccccacttttcttctgtttcccccaaggaaccacatctcagcaggtcttaactgcctcattttcttcaggaggatctgcacttcatccacaggcacaggggcagagccagggtcagccatcctcaagtagcttaacaggggtttcatcttcccaacccatacaacatcctcagcagcagcagggaatacagcagacagcccctcctcaacagacagtgcagtattcactttcacagacatcaacctccagtgaggccactactgcacagccagtgagtcagcctcaagctccacaagtcttgcctcaagtatcagctggaaaacagcttccagtttcccagccagtaccaactatccaaggcgaacctcagatcccagttgcgacacaaccctcggttgttccagtccactctggtgctcatttccttccagtgggacagccgctccctactcccttgctccctcagtaccctgtctctcagattcccatatcaactcctcatgtgtctacggctcagacaggtttctcatcccttcccatcacaatggcagctggcattactcagcctctgctcacgttggcttcatctgctacaacagctgcgatcccgggggtatcaactgtggttcctagtcagcttccaacccttctgcagcctgtgactcagctgccaagtcaggttcacccacagctcctacaaccagcagttcagtccatgggaataccagctaaccttggacaagctgctgaggttccactttcctctggagatgttctgtaccagggcttcccacctcgactgccaccacagtacccaggagattcaaatattgctccctcttccaacgtggcttctgtttgcatccattctacagtcctatcccctcccatgccgacagaagtactggctacacctgggtactttcccacagtggtgcagccttatgtggaatcaaatcttttagttcctatgggtggtgtaggaggacaggttcaagtgtcccagccaggagggagtttagcacaagcccccactacatcctcccagcaagcagttttggagagtactcagggagtctctcaggttgctcctgcagagccagttgcagtagcacagacccaagctacccagccgaccactttggcttcctctgtagacagtgcacattcagatgttgcttcaggtatgagtgatggcaatgagaacgtcccatcttccagtggaaggcatgaaggaagaactacaaaacggcattaccgaaaatctgtaaggagtcgctctcgacatgaaaaaacttcacgcccaaaattaagaattttgaatgtttcaaataaaggagaccgagtagtagaatgtcaattagagactcataataggaaaatggttacattcaaatttgacctagatggtgacaaccccgaggagatagcaacaattatggtgaacaatgactttattctagcaatagagagagagtcgtttgtggatcaagtgcgagaaattattgaaaaagctgatgaaatgctcagtgaggatgtcagtgtggaaccagagggtgatcagggattggagagtctacaaggaaaggatgactatggcttttcaggttctcagaaattggaaggagagttcaaacaaccaattcctgcgtcttccatgccacagcaaataggcattcctaccagttctttaactcaagttgttcattctgcgggaaggcggtttatagtgagtcctgtgccagaaagccgattacgagaatcaaaagttttccccagtgaaataacagatacagttgctgcctctacagctcagagccctggaatgaacttgtctcactctgcatcatcccttagtctacaacaggccttttctgaacttagacgtgcccaaatgacagaaggacccaacacagcacctccaaactttagtcatacaggaccaacatttccagtagtacctcctttcttaagtagcattgctggagtcccaaccacagcagcagccacagcaccagtccctgcaacaagcagccctcctaatgacatttccacatcagtaattcagtctgaggttacagtgcccactgaagaggggattgctggagttgccaccagcacaggtgtggtaacttcaggtggtctccccataccacctgtgtctgaatcaccagtactttccagcgtagtttcaagtatcacaatacctgcagttgtctcaatatctactacatccccgtcacttcaagtccccacatccacatctgagatcgttgtttctagtacagcactgtatccttcagtaacagtttcagcaacttcagcctctgcagggggcagtactgctaccccaggtcctaagcctccagctgtagtatctcagcaggcagcaggcagcactactgtgggagccacattaacatcagtttctaccaccacttcattcccaagcacagcttcacagctgtgcattcagcttagcagcagtacttctactcctactttagctgaaaccgtggtagttagcgcacactcactagataagacatctcatagcagtacaactggattggctttctccctctctgcaccatcttcctcttcctctcctggagcaggagtgtctagttatatttctcagcctggtgggctgcatcctttggtcattccatcagtgatagcttctactcctattcttccccaagcagcaggacctacttctacacctttattaccccaagtacctagtatcccacccttggtacagcctgttgccaatgtgcctgctgtacagcagacactaattcatagtcagcctcaaccagctttgcttcccaaccagccccatactcattgtcctgaagtagattctgatacacaacccaaagctcctggaattgatgacataaagactctagaagaaaagctgcggtctctgttcagtgaacacagctcatctggagctcagcatgcctctgtctcactggagacctcactagtcatagagagcactgtcacaccaggcatcccaactactgctgttgcaccaagcaaactcctgacttctaccacaagtacttgcttaccaccaaccaatttaccactaggaacagttgctttgccagttacaccagtggtcacacctgggcaagtttctaccccagtcagcactactacatcaggagtgaaacctggaactgctccctccaagccacctctaactaaggctccggtgctgccagtgggtactgaacttccagcaggtactctacccagcgagcagctgccaccttttccaggaccttctctaacccagtcccagcaacctctagaggatcttgatgctcaattgagaagaacacttagtccagagatgatcacagtgacttctgcggttggtcctgtgtccatggcggctccaacagcaatcacagaagcaggaacacagcctcagaagggtgtttctcaagtcaaagaaggccctgtcctagcaactagttcaggagctggtgtttttaagatgggacgatttcaggtttctgttgcagcagacggtgcccagaaagagggtaaaaataagtcagaagatgcaaagtctgttcattttgaatccagcacctcagagtcctcagtgctatcaagtagtagtccagagagtaccttggtgaaaccagagccgaatggcataaccatccctggtatctcttcagatgtgccagagagtgcccacaaaactactgcctcagaggcaaagtcagacactgggcagcctaccaaggttggacgttttcaggtgacaactacagcaaacaaagtgggtcgtttctctgtatcaaaaactgaggacaagatcactgacacaaagaaagaaggaccagtggcatctcctccttttatggatttggaacaagctgttcttcctgctgtgataccaaagaaagagaagcctgaactgtcagagccttcacatctaaatgggccgtcttctgacccggaggccgcttttttaagtagggatgtggatgatggttccggtagtccacactcgccccatcagctgagctcaaagagccttcctagccagaatctaagtcaaagccttagtaattcatttaactcctcttacatgagtagcgacaatgagtcagatatcgaagatgaagacttaaagttagagctgcgacgactacgagataaacatctcaaagagattcaggacctgcagagtcgccagaagcatgaaattgaatctttgtataccaaactgggcaaggtgccccctgctgttattattcccccagctgctcccctttcagggagaagacgacgacccactaaaagcaaaggcagcaaatctagtcgaagcagttccttggggaataaaagcccccagctttcaggtaacctgtctggtcagagtgcagcttcagtcttgcacccccagcagaccctccaccctcctggcaacatcccagagtccgggcagaatcagctgttacagccccttaagccatctccctccagtgacaacctctattcagccttcaccagtgatggtgccatttcagtaccaagcctttctgctccaggtcaaggaaccagcagcacaaacactgttggggcaacagtgaacagccaagccgcccaagctcagcctcctgccatgacgtccagcaggaagggcacattcacagatgacttgcacaagttggtagacaattgggcccgagatgccatgaatctctcaggcaggagaggaagcaaagggcacatgaattacgagggccctggaatggcaaggaagttctctgcacctgggcaactgtgcatctccatgacctcgaacctgggtggctctgcccccatctctgcagcatcagctacctctctaggtcacttcaccaagtctatgtgccccccacagcagtatggctttccagctaccccatttggcgctcaatggagtgggacgggtggcccagcaccacagccacttggccagttccaacctgtgggaactgcctccttgcagaatttcaacatcagcaatttgcagaaatccatcagcaaccccccaggctccaacctgcggaccacttag

SEQ ID NO: 34456 - DNA, 9886 bp, Homo sapiens
  source 1..9886: mol_type = unassigned DNA
atttagcgcggagagtttcccgggtggacgcggctcctctctcggccactccgcacccccatcttcggtgacagaaggcgcctggtgggggtggctgctcttttctctccctgttccccctcacccagtcctctaggtctcctctcctcttgcctcagagaagcagcggagctcgggccccgcggtgagcggccctcccctccccgccgttccctcctccgtcagcccccggcaccggcccgggaggagacgggtttgccaggcctggggcgggcggggaggcctcggggaagggggggcccgctcctcaggcgccgaggctccgaggctccggcccttcgcctctgggcgatgggcgacctgtgaggccggtccccatcgctgggggcgcgtgtgggaggaggcggccgcccgagtgaccgggagccgggccgcggccttccctcgcccgcctcggcccctcccactcctctgccccggggccgccaccgcccgggcgtcggacctggtcccgtgctcgcggtgccgccgccctctgggcctagcccgcccagctcggcgagcggcggcagtgggagccgcgtccgccgcatccgcctcgactcggtgccggcccctggccctcccctcatgactgcggcgcctctgctgccaccgcccgcccggccgccgctcgccgcaggatggatgcggaccgtgcggcgctaacccccgtggctcagctcccgaatcgcccgccttcgagccctcctcgtgagccgcagcagcctcggtgccagcccccgccgcagctgggcccagcggtccgcctgtccctcgttgcggcttgtcggtgctgagtgaggcgtcgtccgggtcggcgcgaacccgcccggccgcggttccctgcagacctctgcgcgggcggctcggcccttcacgcccttttcgttcacgaatccgagcccgctcgcctctctccagcgaaccgaccatgtctggcggcgccgcagagaagcagagcagcactcccggttccctgttcctctcgccgccggctcctgcccccaagaatggctccagctccgattcctccgtgggggagaaactgggagccgcggccgccgacgctgtgaccggcaggaccgaggagtacaggcgccgccgccacactatggacaaggacagccgtggggcggccgcgaccactaccaccactgagcaccgcttcttccgccggagcgtcatctgtgactccaatgccactgcactggagcttcccggccttcctctttccctgccccagcccagcatccccgcggctgtcccgcagagtgctccaccggagccccaccgggaagagaccgtgaccgccaccgccacttcccaggtagcccagcagcctccagccgctgccgcccctggggaacaggccgtcgcgggccctgccccctcgactgtccccagcagtaccagcaaagaccgcccagtgtcccagcctagccttgtggggagcaaagaggagccgccgccggcgagaagtggcagcggcggcggcagcgccaaggagccacaggaggaacggagccagcagcaggatgatatcgaagagctggagaccaaggccgtgggaatgtctaacgatggccgctttctcaagtttgacatcgaaatcggcagaggctcctttaagacggtctacaaaggtctggacactgaaaccaccgtggaagtcgcctggtgtgaactgcaggatcgaaaattaacaaagtctgagaggcagagatttaaagaagaagctgaaatgttaaaaggtcttcagcatcccaatattgttagattttatgattcctgggaatccacagtaaaaggaaagaagtgcattgttttggtgactgaacttatgacgtctggaacacttaaaacgtatctgaaaaggtttaaagtgatgaagatcaaagttctaagaagctggtgccgtcagatccttaaaggtcttcagtttcttcatactcgaactccacctatcattcaccgcgatcttaaatgtgacaacatctttatcaccggccctactggctcagtcaagattggagacctcggtctggcaaccctgaagcgggcttcttttgccaagagtgtgataggtaccccagagttcatggcccctgagatgtatgaggagaaatatgatgaatccgttgacgtttatgcttttgggatgtgcatgcttgagatggctacatctgaatatccttactcggagtgccaaaatgctgcacagatctaccgtcgcgtgaccagtggggtgaagccagccagttttgacaaagtagcaattcctgaagtgaaggaaattattgaaggatgcatacgacaaaacaaagatgaaagatattccatcaaagaccttttgaaccatgccttcttccaagaggaaacaggagtacgggtagaattagcagaagaagatgatggagaaaaaatagccataaaattatggctacgtattgaagatattaagaaattaaagggaaaatacaaagataatgaagctattgagttttcttttgatttagagagagatgtcccagaagatgttgcacaagaaatggtagagtctgggtatgtctgtgaaggtgatcacaagaccatggctaaagctatcaaagacagagtatcattaattaagaggaaacgagagcagcggcagttggtacgggaggagcaagaaaaaaaaaagcaggaagagagcagtctcaaacagcaggtagaacaatccagtgcttcccagacaggaatcaagcagctcccttctgctagcaccggcatacctactgcttctaccacttcagcttcagtttctacacaagtagaacctgaagaacctgaggcagatcaacatcaacaactacagtaccagcaacccagtatatctgtgttatctgatgggacggttgacagtggtcagggatcctctgtcttcacagaatctcgagtgagcagccaacagacagtttcatatggttcccaacatgaacaggcacattctacaggcacagtcccagggcatataccttctactgtccaagcacagtctcagccccatggggtatatccaccctcaagtgtggcacaggggcagagccagggtcagccatcctcaagtagcttaacaggggtttcatcttcccaacccatacaacatcctcagcagcagggaatacagcagacagcccctcctcaacagacagtgcagtattcactttcacagacatcaacctccagtgaggccactactgcacagccagtgagtcagcctcaagctccacaagtcttgcctcaagtatcagctggaaaacagagtactcagggagtctctcaggttgctcctgcagagccagttgcagtagcacagacccaagctacccagccgaccactttggcttcctctgtagacagtgcacattcagatgttgcttcaggtatgagtgatggcaatgagaacgtcccatcttccagtggaaggcatgaaggaagaactacaaaacggcattaccgaaaatctgtaaggagtcgctctcgacatgaaaaaacttcacgcccaaaattaagaattttgaatgtttcaaataaaggagaccgagtagtagaatgtcaattagagactcataataggaaaatggttacattcaaatttgacctagatggtgacaaccccgaggagatagcaacaattatggtgaacaatgactttattctagcaatagagagagagtcgtttgtggatcaagtgcgagaaattattgaaaaagctgatgaaatgctcagtgaggatgtcagtgtggaaccagagggtgatcagggattggagagtctacaaggaaaggatgactatggcttttcaggttctcagaaattggaaggagagttcaaacaaccaattcctgcgtcttccatgccacagcaaataggcattcctaccagttctttaactcaagttgttcattctgcgggaaggcggtttatagtgagtcctgtgccagaaagccgattacgagaatcaaaagttttccccagtgaaataacagatacagttgctgcctctacagctcagagccctggaatgaacttgtctcactctgcatcatcccttagtctacaacaggccttttctgaacttagacgtgcccaaatgacagaaggacccaacacagcacctccaaactttagtcatacaggaccaacatttccagtagtacctcctttcttaagtagcattgctggagtcccaaccacagcagcagccacagcaccagtccctgcaacaagcagccctcctaatgacatttccacatcagtaattcagtctgaggttacagtgcccactgaagaggggattgctggagttgccaccagcacaggtgtggtaacttcaggtggtctccccataccacctgtgtctgaatcaccagtactttccagcgtagtttcaagtatcacaatacctgcagttgtctcaatatctactacatccccgtcacttcaagtccccacatccacatctgagatcgttgtttctagtacagcactgtatccttcagtaacagtttcagcaacttcagcctctgcagggggcagtactgctaccccaggtcctaagcctccagctgtagtatctcagcaggcagcaggcagcactactgtgggagccacattaacatcagtttctaccaccacttcattcccaagcacagcttcacagctgtgcattcagcttagcagcagtacttctactcctactttagctgaaaccgtggtagttagcgcacactcactagataagacatctcatagcagtacaactggattggctttctccctctctgcaccatcttcctcttcctctcctggagcaggagtgtctagttatatttctcagcctggtgggctgcatcctttggtcattccatcagtgatagcttctactcctattcttccccaagcagcaggacctacttctacacctttattaccccaagtacctagtatcccacccttggtacagcctgttgccaatgtgcctgctgtacagcagacactaattcatagtcagcctcaaccagctttgcttcccaaccagccccatactcattgtcctgaagtagattctgatacacaacccaaagctcctggaattgatgacataaagactctagaagaaaagctgcggtctctgttcagtgaacacagctcatctggagctcagcatgcctctgtctcactggagacctcactagtcatagagagcactgtcacaccaggcatcccaactactgctgttgcaccaagcaaactcctgacttctaccacaagtacttgcttaccaccaaccaatttaccactaggaacagttgctttgccagttacaccagtggtcacacctgggcaagtttctaccccagtcagcactactacatcaggagtgaaacctggaactgctccctccaagccacctctaactaaggctccggtgctgccagtgggtactgaacttccagcaggtactctacccagcgagcagctgccaccttttccaggaccttctctaacccagtcccagcaacctctagaggatcttgatgctcaattgagaagaacacttagtccagagatgatcacagtgacttctgcggttggtcctgtgtccatggcggctccaacagcaatcacagaagcaggaacacagcctcagaaggtttctcaagtcaaagaaggccctgtcctagcaactagttcaggagctggtgtttttaagatgggacgatttcaggtttctgttgcagcagacggtgcccagaaagagggtaaaaataagtcagaagatgcaaagtctgttcattttgaatccagcacctcagagtcctcagtgctatcaagtagtagtccagagagtaccttggtgaaaccagagccgaatggcataaccatccctggtatctcttcagatgtgccagagagtgcccacaaaactactgcctcagaggcaaagtcagacactgggcagcctaccaaggttggacgttttcaggtgacaactacagcaaacaaagtgggtcgtttctctgtatcaaaaactgaggacaagatcactgacacaaagaaagaaggaccagtggcatctcctccttttatggatttggaacaagctgttcttcctgctgtgataccaaagaaagagaagcctgaactgtcagagccttcacatctaaatgggccgtcttctgacccggaggccgcttttttaagtagggatgtggatgatggttccggtagtccacactcgccccatcagctgagctcaaagagccttcctagccagaatctaagtcaaagccttagtaattcatttaactcctcttacatgagtagcgacaatgagtcagatatcgaagatgaagacttaaagttagagctgcgacgactacgagataaacatctcaaagagattcaggacctgcagagtcgccagaagcatgaaattgaatctttgtataccaaactgggcaaggtgccccctgctgttattattcccccagctgctcccctttcagggagaagacgacgacccactaaaagcaaaggcagcaaatctagtcgaagcagttccttggggaataaaagcccccagctttcaggtaacctgtctggtcagagtgcagcttcagtcttgcacccccagcagaccctccaccctcctggcaacatcccagagtccgggcagaatcagctgttacagccccttaagccatctccctccagtgacaacctctattcagccttcaccagtgatggtgccatttcagtaccaagcctttctgctccaggtcaaggaaccagcagcacaaacactgttggggcaacagtgaacagccaagccgcccaagctcagcctcctgccatgacgtccagcaggaagggcacattcacagatgacttgcacaagttggtagacaattgggcccgagatgccatgaatctctcaggcaggagaggaagcaaagggcacatgaattacgagggccctggaatggcaaggaagttctctgcacctgggcaactgtgcatctccatgacctcgaacctgggtggctctgcccccatctctgcagcatcagctacctctctaggtcacttcaccaagtctatgtgccccccacagcagtatggctttccagctaccccatttggcgctcaatggagtgggacgggtggcccagcaccacagccacttggccagttccaacctgtgggaactgcctccttgcagaatttcaacatcagcaatttgcagaaatccatcagcaaccccccaggctccaacctgcggaccacttagacctagagacattaactgaatagatctgggggcaggagatggaatgctgagggggtgggtgggggtgggaagtagcctatatactaactactagtgctgcatttaactggttatttcttgccagaggggaatgtttttaatactgcattgagccctcagaatggagagtctcccccgctccagttattggaatgggagaggaaggaaagaacagcttttttgtcaaggggcagcttcagaccatgctttcctgtttatctatactcagtaatgaggatgagggctaggaaagtcttgttcataaggaagctggagaactcaatgtaaaatcaaacccatctgtaatttcgagtgggtggagctcttgcttttggtacatgccctgaatccctcactccctcaagaatccgaaccacaggacaaaaaccacctactgggctctctcctaccctgccctcctcccttttttttacccctctcttttttattttttctttgctctttagaacccagtgaaaaataccagggtactggggtgcaactctttcttatgataggtcattagtgctttaagcaaaagatattagcagctttgactgcagcattagcaattaggaaaaaaaaaaaattaagttccctgcggacatgtaactttgccatcagttttgatgtggaaacactgtgatatataaaatgttgttggacaacagtagttttaagagtaaaatatgaaacgtttaaaaagttccaaaaaaagctagctctgtcctttacttattgagacactttaactttttcctttgtatttccattgtattagataaataaatgtgaatgtaaaattgtataaattactgtacttgaatacttctgtttcccagtgttgcttgctggacattttagtgccttggacttctattgcttctgccattagcatcaacttaccagaccccagatcaataaagggcatgtggaaggaaatcgtaggtccatgtgaccccagcagtccagcagtggttatgccaaagggaaattgaaaaagtatttttttaagtcattcaacaactttgtctagagcaggtgtaagatgagtagggtgggaagttaggttggcatcagtggttaaaaacagaaagttctgtttcgggaatagtgaggagggggtgttgtaacaaaattggacaacttaaaagaatggtgtgtgctgggtgaaagacaaagactaaagaatgaggaaacaaacgtgatgcctggccagtgactgtcatataaacctttcttatttgagctaggcttgaacagacgtgacctagaagaaactgaacataaagagaagggggtggggggctagttttcaagttggggaacctgatagtgaaaagtcacagatggagaaaattgctctcagaaaaactgtttggattgctttcctcttgttgcacatgtaccatgcatttctcagcttggggtactacattttgtggaaagttaatctatctatctttccacatctgaattaatcattctaggaaagaatacttattcctactcatttcctttatgatgtccaaatggttgcaggatcataatctattgtgccacctttatttctagaagtacaactaatatgttcacattttcaaataaataatactccccgtaagtaataactgcaaccaatcagtgttattcagtgctatgcctccttgtaatgggtagttattaattattttcagagctttccggaaatactgtcctaactggctatgtttaggatctttgttatctctgaagacaaagaaagaagctaggactcttaattttggggtgcttcttgactcttagttgggaaactgaaaatatttccaaccttttacccacgtcaatggcatattctgggaatcaccaccaccaccaccactaccacagaaagaggctggaggctcctgtaccctgttcattccttaagggccctgcttcccttagtaagtaagtaagttggtctacggccctaaatatgcaaatgagagctgaaggtttttaaaaggtagaaaggaaaagggcaagggcttccacccctgctttaaaatgatttatttattctctgcttgtatttcttgtggagagagtaaggatagaaccaacaaggggctgagtagctgagaaaggggccacccaagagtgaaacatactttataccagaggagcagtggagcctcatgcagcacattatcatttgttatttgggtttaataataattttgacatcttttcactcatacacaaaaaaagtcagaactggtgttatttactgttgatttcatcctcctgtgtatgaaataacaagcctagaggaatgaactagtgctactgaactgtttaaattatttttgtgttaatagtacactttgagtatctttttccacattaaaaactttctgaattataaatgttttccttacattatttaacaatgtacactgttaaaaataaaaataaaaattcaaa

SEQ ID NO: 34457 - DNA, 4614 bp, Homo sapiens
  source 1..4614: mol_type = unassigned DNA
cggcgccgcagagaagcagagcaagaaaaaaaaaagcaggaagagagcagtctcaaacagcaggtagaacaatccagtgcttcccagacaggaatcaagcagctcccttctgctagcaccggcatacctactgcttctaccacttcagcttcagtttctacacaagtagaacctgaagaacctgaggcagatcaacatcaacaactacagtaccagcaacccagtatatctgtgttatctgatgggacggttgacagtggtcagggatcctctgtcttcacagaatctcgagtgagcagccaacagacagtttcatatggttcccaacatgaacaggcacattctacaggcacagtcccagggcatataccttctactgtccaagcacagtctcagccccatggggtatatccaccctcaagtgtgcagcagggaatacagcagacagcccctcctcaacagacagtgcagtattcactttcacagacatcaacctccagtgaggccactactgcacagccagtgagtcagcctcaagctccacaagtcttgcctcaagtatcagctggaaaacagagtactcagggagtctctcaggttgctcctgcagagccagttgcagtagcacagacccaagctacccagccgaccactttggcttcctctgtagacagtgcacattcagatgttgcttcaggtatgagtgatggcaatgagaacgtcccatcttccagtggaaggcatgaaggaagaactacaaaacggcattaccgaaaatctgtaaggagtcgctctcgacatgaaaaaacttcacgcccaaaattaagaattttgaatgtttcaaataaaggagaccgagtagtagaatgtcaattagagactcataataggaaaatggttacattcaaatttgacctagatggtgacaaccccgaggagatagcaacaattatggtgaacaatgactttattctagcaatagagagagagtcgtttgtggatcaagtgcgagaaattattgaaaaagctgatgaaatgctcagtgaggatgtcagtgtggaaccagagggtgatcagggattggagagtctacaaggaaaggatgactatggcttttcaggttctcagaaattggaaggagagttcaaacaaccaattcctgcgtcttccatgccacagcaaataggcattcctaccagttctttaactcaagttgttcattctgcgggaaggcggtttatagtgagtcctgtgccagaaagccgattacgagaatcaaaagttttccccagtgaaataacagatacagttgctgcctctacagctcagagccctggaatgaacttgtctcactctgcatcatcccttagtctacaacaggccttttctgaacttagacgtgcccaaatgacagaaggacccaacacagcacctccaaactttagtcatacaggaccaacatttccagtagtacctcctttcttaagtagcattgctggagtcccaaccacagcagcagccacagcaccagtccctgcaacaagcagccctcctaatgacatttccacatcagtaattcagtctgaggttacagtgcccactgaagaggggattgctggagttgccaccagcacaggtgtggtaacttcaggtggtctccccataccacctgtgtctgaatcaccagtactttccagcgtagtttcaagtatcacaatacctgcagttgtctcaatatctactacatccccgtcacttcaagtccccacatccacatctgagatcgttgtttctagtacagcactgtatccttcagtaacagtttcagcaacttcagcctctgcagggggcagtactgctaccccaggtcctaagcctccagctgtagtatctcagcaggcagcaggcagcactactgtgggagccacattaacatcagtttctaccaccacttcattcccaagcacagcttcacagctgtgcattcagcttagcagcagtacttctactcctactttagctgaaaccgtggtagttagcgcacactcactagataagacatctcatagcagtacaactggattggctttctccctctctgcaccatcttcctcttcctctcctggagcaggagtgtctagttatatttctcagcctggtgggctgcatcctttggtcattccatcagtgatagcttctactcctattcttccccaagcagcaggacctacttctacacctttattaccccaagtacctagtatcccacccttggtacagcctgttgccaatgtgcctgctgtacagcagacactaattcatagtcagcctcaaccagctttgcttcccaaccagccccatactcattgtcctgaagtagattctgatacacaacccaaagctcctggaattgatgacataaagactctagaagaaaagctgcggtctctgttcagtgaacacagctcatctggagctcagcatgcctctgtctcactggagacctcactagtcatagagagcactgtcacaccaggcatcccaactactgctgttgcaccaagcaaactcctgacttctaccacaagtacttgcttaccaccaaccaatttaccactaggaacagttgctttgccagttacaccagtggtcacacctgggcaagtttctaccccagtcagcactactacatcaggagtgaaacctggaactgctccctccaagccacctctaactaaggctccggtgctgccagtgggtactgaacttccagcaggtactctacccagcgagcagctgccaccttttccaggaccttctctaacccagtcccagcaacctctagaggatcttgatgctcaattgagaagaacacttagtccagagatgatcacagtgacttctgcggttggtcctgtgtccatggcggctccaacagcaatcacagaagcaggaacacagcctcagaagggtgtttctcaagtcaaagaaggccctgtcctagcaactagttcaggagctggtgtttttaagatgggacgatttcaggtttctgttgcagcagacggtgcccagaaagagggtaaaaataagtcagaagatgcaaagtctgttcattttgaatccagcacctcagagtcctcagtgctatcaagtagtagtccagagagtaccttggtgaaaccagagccgaatggcataaccatccctggtatctcttcagatgtgccagagagtgcccacaaaactactgcctcagaggcaaagtcagacactgggcagcctaccaaggttggacgttttcaggtgacaactacagcaaacaaagtgggtcgtttctctgtatcaaaaactgaggacaagatcactgacacaaagaaagaaggaccagtggcatctcctccttttatggatttggaacaagctgttcttcctgctgtgataccaaagaaagagaagcctgaactgtcagagccttcacatctaaatgggccgtcttctgacccggaggccgcttttttaagtagggatgtggatgatggttccggtagtccacactcgccccatcagctgagctcaaagagccttcctagccagaatctaagtcaaagccttagtaattcatttaactcctcttacatgagtagcgacaatgagtcagatatcgaagatgaagacttaaagttagagctgcgacgactacgagataaacatctcaaagagattcaggacctgcagagtcgccagaagcatgaaattgaatctttgtataccaaactgggcaaggtgccccctgctgttattattcccccagctgctcccctttcagggagaagacgacgacccactaaaagcaaaggcagcaaatctagtcgaagcagttccttggggaataaaagcccccagctttcaggtaacctgtctggtcagagtgcagcttcagtcttgcacccccagcagaccctccaccctcctggcaacatcccagagtccgggcagaatcagctgttacagccccttaagccatctccctccagtgacaacctctattcagccttcaccagtgatggtgccatttcagtaccaagcctttctgctccaggtcaaggaaccagcagcacaaacactgttggggcaacagtgaacagccaagccgcccaagctcagcctcctgccatgacgtccagcaggaagggcacattcacagatgacttgcacaagttggtagacaattgggcccgagatgccatgaatctctcaggcaggagaggaagcaaagggcacatgaattacgagggccctggaatggcaaggaagttctctgcacctgggcaactgtgcatctccatgacctcgaacctgggtggctctgcccccatctctgcagcatcagctacctctctaggtcacttcaccaagtctatgtgccccccacagcagtatggctttccagctaccccatttggcgctcaatggagtgggacgggtggcccagcaccacagccacttggccagttccaacctgtgggaactgcctccttgcagaatttcaacatcagcaatttgcagaaatccatcagcaaccccccaggctccaacctgcggaccacttag

SEQ ID NO: 34458 - DNA, 11232 bp, Homo sapiens
  source 1..11232: mol_type = unassigned DNA
ccggcccttcgcctctgggcgatgggcgacctgtgaggccggtccccatcgctgggggcgcgtgtgggaggaggcggccgcccgagtgaccgggagccgggccgcggccttccctcgcccgcctcggcccctcccactcctctgccccggggccgccaccgcccgggcgtcggacctggtcccgtgctcgcggtgccgccgccctctgggcctagcccgcccagctcggcgagcggcggcagtgggagccgcgtccgccgcatccgcctcgactcggtgccggcccctggccctcccctcatgactgcggcgcctctgctgccaccgcccgcccggccgccgctcgccgcaggatggatgcggaccgtgcggcgctaacccccgtggctcagctcccgaatcgcccgccttcgagccctcctcgtgagccgcagcagcctcggtgccagcccccgccgcagctgggcccagcggtccgcctgtccctcgttgcggcttgtcggtgctgagtgaggcgtcgtccgggtcggcgcgaacccgcccggccgcggttccctgcagacctctgcgcgggcggctcggcccttcacgcccttttcgttcacgaatccgagcccgctcgcctctctccagcgaaccgaccatgtctggcggcgccgcagagaagcagagcagcactcccggttccctgttcctctcgccgccggctcctgcccccaagaatggctccagctccgattcctccgtgggggagaaactgggagccgcggccgccgacgctgtgaccggcaggaccgaggagtacaggcgccgccgccacactatggacaaggacagccgtggggcggccgcgaccactaccaccactgagcaccgcttcttccgccggagcgtcatctgtgactccaatgccactgcactggagcttcccggccttcctctttccctgccccagcccagcatccccgcggctgtcccgcagagtgctccaccggagccccaccgggaagagaccgtgaccgccaccgccacttcccaggtagcccagcagcctccagccgctgccgcccctggggaacaggccgtcgcgggccctgccccctcgactgtccccagcagtaccagcaaagaccgcccagtgtcccagcctagccttgtggggagcaaagaggagccgccgccggcgagaagtggcagcggcggcggcagcgccaaggagccacaggaggaacggagccagcagcaggatgatatcgaagagctggagaccaaggccgtgggaatgtctaacgatggccgctttctcaagtttgacatcgaaatcggcagaggctcctttaagacggtctacaaaggtctggacactgaaaccaccgtggaagtcgcctggtgtgaactgcaggatcgaaaattaacaaagtctgagaggcagagatttaaagaagaagctgaaatgttaaaaggtcttcagcatcccaatattgttagattttatgattcctgggaatccacagtaaaaggaaagaagtgcattgttttggtgactgaacttatgacgtctggaacacttaaaacgtatctgaaaaggtttaaagtgatgaagatcaaagttctaagaagctggtgccgtcagatccttaaaggtcttcagtttcttcatactcgaactccacctatcattcaccgcgatcttaaatgtgacaacatctttatcaccggccctactggctcagtcaagattggagacctcggtctggcaaccctgaagcgggcttcttttgccaagagtgtgataggtaccccagagttcatggcccctgagatgtatgaggagaaatatgatgaatccgttgacgtttatgcttttgggatgtgcatgcttgagatggctacatctgaatatccttactcggagtgccaaaatgctgcacagatctaccgtcgcgtgaccagtggggtgaagccagccagttttgacaaagtagcaattcctgaagtgaaggaaattattgaaggatgcatacgacaaaacaaagatgaaagatattccatcaaagaccttttgaaccatgccttcttccaagaggaaacaggagtacgggtagaattagcagaagaagatgatggagaaaaaatagccataaaattatggctacgtattgaagatattaagaaattaaagggaaaatacaaagataatgaagctattgagttttcttttgatttagagagagatgtcccagaagatgttgcacaagaaatggtagagtctgggtatgtctgtgaaggtgatcacaagaccatggctaaagctatcaaagacagagtatcattaattaagaggaaacgagagcagcggcagttggtacgggaggagcaagaaaaaaaaaagcaggaagagagcagtctcaaacagcaggtagaacaatccagtgcttcccagacaggaatcaagcagctcccttctgctagcaccggcatacctactgcttctaccacttcagcttcagtttctacacaagtagaacctgaagaacctgaggcagatcaacatcaacaactacagtaccagcaacccagtatatctgtgttatctgatgggacggttgacagtggtcagggatcctctgtcttcacagaatctcgagtgagcagccaacagacagtttcatatggttcccaacatgaacaggcacattctacaggcacagtcccagggcatataccttctactgtccaagcacagtctcagccccatggggtatatccaccctcaagtgtgcctcagtccatggcgcatccgtgtggggggaccccaacatacccagaatcacagatatttttcccaactattcatgaacgtccagtttctttttcaccacctcccacctgcccaccgaaagtagccatttcccagcggcgtaagagcacctccttcctggaagcccaaactcaccacttccaacccctgctgaggactgttggccaaagtcttcttccacctggtggcagcccaactaactggacaccagaggccgtagttatgttgggtactacagccagtagagtaactggagagtcatgtgagatacaggtccatcctatgtttgaaccatctcaagtttacagtgactatagacctggactagtacttccagaagaagctcactattttattcctcaggaagcagtgtatgtagctggggtacattaccaggcccgggtggcagaacagtatgagggcattccatacaactcatcagtactgtcaagtcctatgaaacagatacctgaacagaagccagtacaagggggccctacttcaagttctgtctttgaatttccatctggacaggctttcctggtaggacaccttcagaatctaagattagattctggattgggtccgggatctcccctctctagtatttctgcacctatcagtacagatgctacacgtttgaaatttcaccctgtctttgttcctcattctgcgcctgctgtgttaactcataacaatgagagcagaagcaactgtgtatttgaatttcatgttcacacaccaagctcctcttcaggagaaggaggtggaattttacctcagcgtgtttaccgaaatcggcaggttgcagtggacttgaatcaagaagaactgcctcctcaatcagttggattacatggctacttgcagcctgtgactgaagaaaagcataattaccatgccccagaattgaccgtttctgtggtagagcctatcggacagaactggccaataggaagcccagaatattccagtgattcctcacaaatcacttcttcagaccccagtgattttcagtcacctccccctacagggggagcagctgcaccttttggctctgacgtctcaatgccctttatccatctgcctcagacagtgttacaagaatccccacttttcttctgtttcccccaaggaaccacatctcagcaggtcttaactgcctcattttcttcaggaggatctgcacttcatccacaggcacaggggcagagccagggtcagccatcctcaagtagcttaacaggggtttcatcttcccaacccatacaacatcctcagcagcagcagggaatacagcagacagcccctcctcaacagacagtgcagtattcactttcacagacatcaacctccagtgaggccactactgcacagccagtgagtcagcctcaagctccacaagtcttgcctcaagtatcagctggaaaacagggcttcccacctcgactgccaccacagtacccaggagattcaaatattgctccctcttccaacgtggcttctgtttgcatccattctacagtcctatcccctcccatgccgacagaagtactggctacacctgggtactttcccacagtggtgcagccttatgtggaatcaaatcttttagttcctatgggtggtgtaggaggacaggttcaagtgtcccagccaggagggagtttagcacaagcccccactacatcctcccagcaagcagttttggagagtactcagggagtctctcaggttgctcctgcagagccagttgcagtagcacagacccaagctacccagccgaccactttggcttcctctgtagacagtgcacattcagatgttgcttcaggtatgagtgatggcaatgagaacgtcccatcttccagtggaaggcatgaaggaagaactacaaaacggcattaccgaaaatctgtaaggagtcgctctcgacatgaaaaaacttcacgcccaaaattaagaattttgaatgtttcaaataaaggagaccgagtagtagaatgtcaattagagactcataataggaaaatggttacattcaaatttgacctagatggtgacaaccccgaggagatagcaacaattatggtgaacaatgactttattctagcaatagagagagagtcgtttgtggatcaagtgcgagaaattattgaaaaagctgatgaaatgctcagtgaggatgtcagtgtggaaccagagggtgatcagggattggagagtctacaaggaaaggatgactatggcttttcaggttctcagaaattggaaggagagttcaaacaaccaattcctgcgtcttccatgccacagcaaataggcattcctaccagttctttaactcaagttgttcattctgcgggaaggcggtttatagtgagtcctgtgccagaaagccgattacgagaatcaaaagttttccccagtgaaataacagatacagttgctgcctctacagctcagagccctggaatgaacttgtctcactctgcatcatcccttagtctacaacaggccttttctgaacttagacgtgcccaaatgacagaaggacccaacacagcacctccaaactttagtcatacaggaccaacatttccagtagtacctcctttcttaagtagcattgctggagtcccaaccacagcagcagccacagcaccagtccctgcaacaagcagccctcctaatgacatttccacatcagtaattcagtctgaggttacagtgcccactgaagaggggattgctggagttgccaccagcacaggtgtggtaacttcaggtggtctccccataccacctgtgtctgaatcaccagtactttccagcgtagtttcaagtatcacaatacctgcagttgtctcaatatctactacatccccgtcacttcaagtccccacatccacatctgagatcgttgtttctagtacagcactgtatccttcagtaacagtttcagcaacttcagcctctgcagggggcagtactgctaccccaggtcctaagcctccagctgtagtatctcagcaggcagcaggcagcactactgtgggagccacattaacatcagtttctaccaccacttcattcccaagcacagcttcacagctgtgcattcagcttagcagcagtacttctactcctactttagctgaaaccgtggtagttagcgcacactcactagataagacatctcatagcagtacaactggattggctttctccctctctgcaccatcttcctcttcctctcctggagcaggagtgtctagttatatttctcagcctggtgggctgcatcctttggtcattccatcagtgatagcttctactcctattcttccccaagcagcaggacctacttctacacctttattaccccaagtacctagtatcccacccttggtacagcctgttgccaatgtgcctgctgtacagcagacactaattcatagtcagcctcaaccagctttgcttcccaaccagccccatactcattgtcctgaagtagattctgatacacaacccaaagctcctggaattgatgacataaagactctagaagaaaagctgcggtctctgttcagtgaacacagctcatctggagctcagcatgcctctgtctcactggagacctcactagtcatagagagcactgtcacaccaggcatcccaactactgctgttgcaccaagcaaactcctgacttctaccacaagtacttgcttaccaccaaccaatttaccactaggaacagttgctttgccagttacaccagtggtcacacctgggcaagtttctaccccagtcagcactactacatcaggagtgaaacctggaactgctccctccaagccacctctaactaaggctccggtgctgccagtgggtactgaacttccagcaggtactctacccagcgagcagctgccaccttttccaggaccttctctaacccagtcccagcaacctctagaggatcttgatgctcaattgagaagaacacttagtccagagatgatcacagtgacttctgcggttggtcctgtgtccatggcggctccaacagcaatcacagaagcaggaacacagcctcagaagggtgtttctcaagtcaaagaaggccctgtcctagcaactagttcaggagctggtgtttttaagatgggacgatttcaggtttctgttgcagcagacggtgcccagaaagagggtaaaaataagtcagaagatgcaaagtctgttcattttgaatccagcacctcagagtcctcagtgctatcaagtagtagtccagagagtaccttggtgaaaccagagccgaatggcataaccatccctggtatctcttcagatgtgccagagagtgcccacaaaactactgcctcagaggcaaagtcagacactgggcagcctaccaaggttggacgttttcaggtgacaactacagcaaacaaagtgggtcgtttctctgtatcaaaaactgaggacaagatcactgacacaaagaaagaaggaccagtggcatctcctccttttatggatttggaacaagctgttcttcctgctgtgataccaaagaaagagaagcctgaactgtcagagccttcacatctaaatgggccgtcttctgacccggaggccgcttttttaagtagggatgtggatgatggttccggtagtccacactcgccccatcagctgagctcaaagagccttcctagccagaatctaagtcaaagccttagtaattcatttaactcctcttacatgagtagcgacaatgagtcagatatcgaagatgaagacttaaagttagagctgcgacgactacgagataaacatctcaaagagattcaggacctgcagagtcgccagaagcatgaaattgaatctttgtataccaaactgggcaaggtgccccctgctgttattattcccccagctgctcccctttcagggagaagacgacgacccactaaaagcaaaggcagcaaatctagtcgaagcagttccttggggaataaaagcccccagctttcaggtaacctgtctggtcagagtgcagcttcagtcttgcacccccagcagaccctccaccctcctggcaacatcccagagtccgggcagaatcagctgttacagccccttaagccatctccctccagtgacaacctctattcagccttcaccagtgatggtgccatttcagtaccaagcctttctgctccaggtcaaggaaccagcagcacaaacactgttggggcaacagtgaacagccaagccgcccaagctcagcctcctgccatgacgtccagcaggaagggcacattcacagatgacttgcacaagttggtagacaattgggcccgagatgccatgaatctctcaggcaggagaggaagcaaagggcacatgaattacgagggccctggaatggcaaggaagttctctgcacctgggcaactgtgcatctccatgacctcgaacctgggtggctctgcccccatctctgcagcatcagctacctctctaggtcacttcaccaagtctatgtgccccccacagcagtatggctttccagctaccccatttggcgctcaatggagtgggacgggtggcccagcaccacagccacttggccagttccaacctgtgggaactgcctccttgcagaatttcaacatcagcaatttgcagaaatccatcagcaaccccccaggctccaacctgcggaccacttagacctagagacattaactgaatagatctgggggcaggagatggaatgctgagggggtgggtgggggtgggaagtagcctatatactaactactagtgctgcatttaactggttatttcttgccagaggggaatgtttttaatactgcattgagccctcagaatggagagtctcccccgctccagttattggaatgggagaggaaggaaagaacagcttttttgtcaaggggcagcttcagaccatgctttcctgtttatctatactcagtaatgaggatgagggctaggaaagtcttgttcataaggaagctggagaactcaatgtaaaatcaaacccatctgtaatttcgagtgggtggagctcttgcttttggtacatgccctgaatccctcactccctcaagaatccgaaccacaggacaaaaaccacctactgggctctctcctaccctgccctcctcccttttttttacccctctcttttttattttttctttgctctttagaacccagtgaaaaataccagggtactggggtgcaactctttcttatgataggtcattagtgctttaagcaaaagatattagcagctttgactgcagcattagcaattaggaaaaaaaaaaaattaagttccctgcggacatgtaactttgccatcagttttgatgtggaaacactgtgatatataaaatgttgttggacaacagtagttttaagagtaaaatatgaaacgtttaaaaagttccaaaaaaagctagctctgtcctttacttattgagacactttaactttttcctttgtatttccattgtattagataaataaatgtgaatgtaaaattgtataaattactgtacttgaatacttctgtttcccagtgttgcttgctggacattttagtgccttggacttctattgcttctgccattagcatcaacttaccagaccccagatcaataaagggcatgtggaaggaaatcgtaggtccatgtgaccccagcagtccagcagtggttatgccaaagggaaattgaaaaagtatttttttaagtcattcaacaactttgtctagagcaggtgtaagatgagtagggtgggaagttaggttggcatcagtggttaaaaacagaaagttctgtttcgggaatagtgaggagggggtgttgtaacaaaattggacaacttaaaagaatggtgtgtgctgggtgaaagacaaagactaaagaatgaggaaacaaacgtgatgcctggccagtgactgtcatataaacctttcttatttgagctaggcttgaacagacgtgacctagaagaaactgaacataaagagaagggggtggggggctagttttcaagttggggaacctgatagtgaaaagtcacagatggagaaaattgctctcagaaaaactgtttggattgctttcctcttgttgcacatgtaccatgcatttctcagcttggggtactacattttgtggaaagttaatctatctatctttccacatctgaattaatcattctaggaaagaatacttattcctactcatttcctttatgatgtccaaatggttgcaggatcataatctattgtgccacctttatttctagaagtacaactaatatgttcacattttcaaataaataatactccccgtaagtaataactgcaaccaatcagtgttattcagtgctatgcctccttgtaatgggtagttattaattattttcagagctttccggaaatactgtcctaactggctatgtttaggatctttgttatctctgaagacaaagaaagaagctaggactcttaattttggggtgcttcttgactcttagttgggaaactgaaaatatttccaaccttttacccacgtcaatggcatattctgggaatcaccaccaccaccaccactaccacagaaagaggctggaggctcctgtaccctgttcattccttaagggccctgcttcccttagtaagtaagtaagttggtctacggccctaaatatgcaaatgagagctgaaggtttttaaaaggtagaaaggaaaagggcaagggcttccacccctgctttaaaatgatttatttattctctgcttgtatttcttgtggagagagtaaggatagaaccaacaaggggctgagtagctgagaaaggggccacccaagagtgaaacatactttataccagaggagcagtggagcctcatgcagcacattatcatttgttatttgggtttaataataattttgacatcttttcactcatacacaaaaaaagtcagaactggtgttatttactgttgatttcatcctcctgtgtatgaaataacaagcctagaggaatgaactagtgctactgaactgtttaaattatttttgtgttaatagtacactttgagtatctttttccacattaaaaactttctgaattataaatgttttccttacattatttaacaatgtacactgttaaaaataaaaataaaaattcaaactttgggggtttctcagcagccgttaattgtacattttgcactaactctgggtgttgcgcttcttgtaagattgcgctttgtgcttcagtttgttacctttgtagacttatttaatgaaaccattcaaataaaccaaacttgcttttgttga

SEQ ID NO: 34459 - DNA, 7138 bp, Homo sapiens
  source 1..7138: mol_type = unassigned DNA
atggacggcgatggcggccgccgagacgtccccggcacgctgatggagcccgggcgcggcgcggggcccgcgggcatggcggagcctcgggcgaaggcggcgcggccggggccccagcgctttctgcggcgcagcgtggtagagtcggaccaggaggagccgccgggcttggaggcagccgaggcgccgggcccgcagcccccgcagcccctgcagcgccgggtgcttctgctctgcaagacgcgccgcctcatcgcggagcgcgcccgcggacgccccgccgcccccgcgcccgcagcgctggtagcgcagccgggagcccccggagcccccgcggacgccggccccgagcccgtgggcacgcaggagcccggcccggaccccatcgcagccgctgtcgaaaccgcgcctgcccccgacggcggccccagggaggaggcggcggcgaccgtgaggaaggaggatgagggggcggccgaggcgaagcctgagcccgggcgcactcgccgggacgagcccgaagaggaggaggacgacgaggacgacctcaaggccgtggccacctctctggacggccgcttcctcaagttcgacatcgagctgggccgcggttccttcaagacggtctacaaggggctggacacggagacctgggtggaggtggcctggtgtgagctgcaggaccggaagctcaccaagctggagcggcagcggttcaaggaagaggctgagatgctgaaaggcctgcagcaccccaacatcgtgcgcttctacgacttctgggagtccagcgccaagggcaagcggtgcattgtgctggtgacggagctgatgacctcagggacgctgaagacatacctgaagcggttcaaggtgatgaagcccaaggttctccgcagctggtgccggcagatcctgaagggcctgctgttcctgcacacaaggacgccacccatcatccaccgagacctgaaatgtgacaatattttcatcaccggaccaactgggtctgtgaagattggcgacttgggcctggccactctgaaaagagcgtcatttgccaaaagtgtgataggtactcccgagttcatggcgcccgagatgtacgaggagcactacgatgagtccgtggacgtctatgcctttgggatgtgcatgctggagatggccacctcggagtacccctactcggagtgccagaatgcggcccagatctaccgcaaggtcacctgtggtatcaagccggccagctttgagaaagtgcacgatcctgaaatcaaggagattattggggagtgtatctgcaaaaacaaggaggaaaggtacgagatcaaagacctgctgagccacgccttcttcgcagaggacacaggcgtgagggtggagctcgcggaggaggaccacggcaggaagtccaccatcgccctgaggctctgggtggaagaccccaagaaactgaagggaaagcccaaggacaatggagccatagagttcaccttcgacctggagaaggagacgccggatgaggtggcccaagagatgattgagtctggattcttccacgagagtgacgtcaagatcgtggccaagtccatccgtgaccgcgtggccttgatccagtggcggcgggagaggatctggcccgcgctgcagcccaaggagcagcaggatgtgggcagcccggacaaggccaggggtccgccggtgcccctgcaggtccaggtgacctaccatgcacaggctgggcagcccgggccaccagagcccgaggagccggaggccgaccagcacctcctgccacctacgttgccgaccagcgccacctccctggcctcggacagcaccttcgacagcggccagggctctaccgtgtactcagactcgcagagcagccagcagagcgtgatgcttggctcccttgccgacgcagcgccgtccccggcccagtgtgtgtgcagcccccctgtgagcgaggggcccgtcctgccgcagagcctgccctcgctgggggcctaccagcagcccacggctgcacctggcttgccggtgggctctgtcccggcccccgcctgccctccgtccctccagcagcacttcccggatccggccatgagcttcgcccccgtgctgccgccgcccagcacccccatgcccacgggcccaggccagccagcaccccccggccagcagcctcctccgctggcccagccgacacccctgccgcaggtcctggccccacagcccgtggtccccctccagccggttcccccccacctgccaccgtacctggctccagcctcccaggtgggggcccccgctcagctgaagcccctccagatgccacaggcgcccctgcagccgcttgctcaagtccctccgcagatgcccccgattcctgttgtgccccccatcacgcccctggcgggaatcgacggcctccctccggccctcccagacctgccgaccgcgactgtgcctcccgtgccaccacctcagtatttctctccagccgtgatcttgccgagcctcgctgccccactcccccctgcgtccccagccttgcctctgcaggctgtgaagctgccccacccccctggggcgcccctggccatgccctgccggaccattgtgccaaatgcaccggccactatccccctgctggccgtagccccaccgggcgtggctgccctgtccattcattctgccgtggcccagctcccaggccaacctgtgtacccagcggccttcccacagatggcgcctactgacgtccctccttccccccatcacacggtgcagaatatgagggccacccctccacagccggcactgcctccacaacccacactgcccccacaacccgtgctgcccccgcaacccacgctgccccctcaacctgtgttgcccccgcaacccacacggccccctcaacctgtgctgcccccgcaacccatgctgcccccacaacctgtgctgcccccgcagccggcactgcctgtgcgccctgagcccctccagccccaccttcctgaacaagctgctccagctgctacaccagggagccagattctgcttggccacccagctccctatgctgtggacgtcgccgctcaggtccccaccgtgcctgtgccaccggctgcggtcctctcgccgcctctgccggaagtgctgctgcctgccgcccctgagctcctgcctcagttccccagctccctggccacggtgtctgcctctgtgcagagtgtgcccacccagactgccacacttctgccaccagcaaacccaccgctgcctggcgggcccgggatcgccagcccttgcccaactgtccagctgacggtggaaccagtccaagaggagcaggcctcacaggacaagccgcccggcctcccgcagagctgtgagagctatggaggttctgatgtcacttctggaaaagagctgagtgacagctgtgaaggcgcctttggagggggcaggctggagggcagggcagcccgaaaacaccaccgcaggtccacgcgtgcgcgctcccggcaggagagggccagccggccccggcttaccatcttgaacgtgtgcaacactggggacaagatggtggagtgccagctggagacgcacaaccacaagatggtgaccttcaagttcgacttggacggggacgcacccgatgaaattgccacgtatatggtggagcatgactttatcctgcaggccgagcgggaaacgttcatcgagcagatgaaggatgtcatggacaaggcagaggacatgctcagcgaggacacagacgccgaccgtggctccgacccagggaccagcccgccacacctcagcacctgcggcctgggcaccggggaggagagccgacaatcccaagccaacgcccccgtgtatcagcagaacgtcctgcacaccgggaagaggtggttcatcatctgtccggtggctgagcaccccgcccccgaggcccctgaatcttcgcccccacttcctctaagctccctgccgccagaagccagccaaggtccatgcagggggctcaccctgccctgtctcccatggcgcagagcagcctgtggggctgtgttcctatccttgttttctgctgaatcagctcagtcaaagcagcctccagattcagcgccctataaagaccagctgtcctcgaaggaacaacccagctttctagccagtcagcagctcctgagccaggcgggccccagcaaccctcctggggcacccccagcccctttggccccctcctcccctcctgtgactgctctgccccaagatggagcagctccagccaccagcaccatgccagagccagcgtcaggaactgccagccaggcagggggtccagggacacctcaggggctgaccagtgagctcgagacgtctcagccactagcggagactcacgaggccccgcttgctgtgcagcccctcgtggtgggcctagcaccttgcactccagctccagaggctgcctcaaccagggacgccagtgccccaagggagcccctgccacctcctgcacctgagcccagcccccacagcgggaccccacagcccgccttgggtcaacctgctcccctgcttcctgccgcagtgggggccgtcagcctggccacctcccagctcccaagcccacccctggggcccaccgtccccccacagccaccctcggccctggagtcggatggggaagggccgccccccagggtgggctttgtggacagcaccatcaagagcctggacgagaagctgcggactctgctctaccaggagcacgtgcccacctcctcagcctcagctgggacccctgtggaggtgggcgacagagacttcaccctggagcccctgagaggggaccagccccgctcagaggtctgcgggggggacctggccctgcccccagtgcctaaggaggcggtctcagggcgtgtccagctgccccagcccttggtggagaagtcagaactggcccccactcgaggggccgtgatggagcagggcacgtcctcgtcaatgacagcagagtcgtctcccaggagtatgctaggctatgacagagatggaaggcaggtggcctcagactcccatgtggtccccagcgtcccccaggatgtacctgcttttgtgagacctgcacgtgtggagcccacagacagggatggtggagaagctggagaaagctcggcagagcccccgccgagtgacatgggcacagtggggggccaggctagccacccccagacactcggcgctcgagctttggggtcccctcggaaacgtccagagcagcaggatgtcagctcaccagccaagactgtgggccgtttctcggtggtcagcactcaggacgagtggaccctggcctccccccacagcctgagatactctgccccacccgacgtctacctggacgaggccccctccagccccgacgtgaagctggcagtgcggcgggcgcagacggcctcctccatcgaggtcggcgtgggcgagcccgtgtccagcgactctggggacgagggccctcgggcgagacccccggtgcagaagcaggcgtccctgcccgtgagtggcagcgtggctggcgacttcgtgaagaaggccaccgccttcctgcagaggccttctcgggccggctcgctgggccccgagacacccagcagggtgggcatgaaggtccccacgatcagcgtgacctccttccattcccagtcgtcctacatcagcagcgacaatgattcggagctcgaggatgctgacataaagaaggagctgcagagtctgcgggagaagcacctgaaggagatctcggagctgcagagccagcagaagcaggagatcgaagctctgtaccgccgcctgggcaagccactgccccccaacgtgggcttcttccacacggcaccccccactggccgccggagaaaaaccagcaagagcaagctgaaggcaggcaagctgctaaatcccctggtgcggcagctcaaggtcgtggcctccagcacaggtcacttggctgactccagcagaggccctcccgctaaggaccctgcccaagccagtgtggggctcactgcagacagcacgggcctgagcgggaaggcagtgcagacccagcagccctgctccgtccgggcctccctgtcttcggacatctgctccggcttagccagtgatggaggcggagcgcgtggccaaggctggacggtttaccacccaacgtctgagagagtgacctataagtctagtagcaaacctcgtgctcgattcctcagtggacccgtatctgtgtccatctggtctgccctgaagcgtctctgcctaggcaaagaacacagcagtaggtcctccaccagcagcctggccccaggccctgagccaggcccccagcccgccctgcacgtccaggcgcaggtgaacaacagcaacaacaagaagggtaccttcacggacgacctgcacaagctggtggacgagtggacgagcaagacggtgggggccgcgcagctgaagcccacgctcaaccagctgaagcagacccagaagctgcaagacatggaggcccaggcaggctgggctgcccctggcgaggcgcgggctatgaccgcacctcgagcaggagtggggatgccacgtctgcccccagcgcccggccctctgtccaccacggtcattcccggagccgccccgaccctgtccgtgcccacaccagatggcgccctcggaaccgcccggagaaaccaggtgtggtttggcctccgagtcccccccaccgcctgctgtgggcacagcactcagccgcgagggggacagcgggtgggcagcaagactgcttcctttgcggcttcagaccctgttcgctcctaggttcctgtggtccacgcgccgtctccacacccacttcctatacttgagttgatggttagaaccttgtcgtcaccctgcagaagtacagtgccttgaatgccagcttttccgttccctgatgaaaagatatgttaaaaaaaattatcggaaaaggtttcatttgcaattggcttgtgcattgataatctttatttactgttttaagttgcagagatgtgaatggtttacaaatctgaagctgaag

SEQ ID NO: 34460 - DNA, 6945 bp, Homo sapiens
  source 1..6945: mol_type = unassigned DNA
atggacggcgatggcggccgccgagacgtccccggcacgctgatggagcccgggcgcggcgcggggcccgcgggcatggcggagcctcgggcgaaggcggcgcggccggggccccagcgctttctgcggcgcagcgtggtagagtcggaccaggaggagccgccgggcttggaggcagccgaggcgccgggcccgcagcccccgcagcccctgcagcgccgggtgcttctgctctgcaagacgcgccgcctcatcgcggagcgcgcccgcggacgccccgccgcccccgcgcccgcagcgctggtagcgcagccgggagcccccggagcccccgcggacgccggccccgagcccgtgggcacgcaggagcccggcccggaccccatcgcagccgctgtcgaaaccgcgcctgcccccgacggcggccccagggaggaggcggcggcgaccgtgaggaaggaggatgagggggcggccgaggcgaagcctgagcccgggcgcactcgccgggacgagcccgaagaggaggaggacgacgaggacgacctcaaggccgtggccacctctctggacggccgcttcctcaagttcgacatcgagctgggccgcggttccttcaagacggtctacaaggggctggacacggagacctgggtggaggtggcctggtgtgagctgcaggaccggaagctcaccaagctggagcggcagcggttcaaggaagaggctgagatgctgaaaggcctgcagcaccccaacatcgtgcgcttctacgacttctgggagtccagcgccaagggcaagcggtgcattgtgctggtgacggagctgatgacctcagggacgctgaagacatacctgaagcggttcaaggtgatgaagcccaaggttctccgcagctggtgccggcagatcctgaagggcctgctgttcctgcacacaaggacgccacccatcatccaccgagacctgaaatgtgacaatattttcatcaccggaccaactgggtctgtgaagattggcgacttgggcctggccactctgaaaagagcgtcatttgccaaaagtgtgataggtactcccgagttcatggcgcccgagatgtacgaggagcactacgatgagtccgtggacgtctatgcctttgggatgtgcatgctggagatggccacctcggagtacccctactcggagtgccagaatgcggcccagatctaccgcaaggtcacctgtggtatcaagccggccagctttgagaaagtgcacgatcctgaaatcaaggagattattggggagtgtatctgcaaaaacaaggaggaaaggtacgagatcaaagacctgctgagccacgccttcttcgcagaggacacaggcgtgagggtggagctcgcggaggaggaccacggcaggaagtccaccatcgccctgaggctctgggtggaagaccccaagaaactgaagggaaagcccaaggacaatggagccatagagttcaccttcgacctggagaaggagacgccggatgaggtggcccaagagatgattgagtctggattcttccacgagagtgacgtcaagatcgtggccaagtccatccgtgaccgcgtggccttgatccagtggcggcgggagaggatctggcccgcgctgcagcccaaggagcagcaggatgtgggcagcccggacaaggccaggggtccgccggtgcccctgcaggtccaggtgacctaccatgcacaggctgggcagcccgggccaccagagcccgaggagccggaggccgaccagcacctcctgccacctacgttgccgaccagcgccacctccctggcctcggacagcaccttcgacagcggccagggctctaccgtgtactcagactcgcagagcagccagcagagcgtgatgcttggctcccttgccgacgcagcgccgtccccggcccagtgtgtgtgcagcccccctgtgagcgaggggcccgtcctgccgcagagcctgccctcgctgggggcctaccagcagcccacggctgcacctggcttgccggtgggctctgtcccggcccccgcctgccctccgtccctccagcagcacttcccggatccggccatgagcttcgcccccgtgctgccgccgcccagcacccccatgcccacgggcccaggccagccagcaccccccggccagcagcctcctccgctggcccagccgacacccctgccgcaggtcctggccccacagcccgtggtccccctccagccggttcccccccacctgccaccgtacctggctccagcctcccaggtgggggcccccgctcagctgaagcccctccagatgccacaggcgcccctgcagccgcttgctcaagtccctccgcagatgcccccgattcctgttgtgccccccatcacgcccctggcgggaatcgacggcctccctccggccctcccagacctgccgaccgcgactgtgcctcccgtgccaccacctcagtatttctctccagccgtgatcttgccgagcctcgctgccccactcccccctgcgtccccagccttgcctctgcaggctgtgaagctgccccacccccctggggcgcccctggccatgccctgccggaccattgtgccaaatgcaccggccactatccccctgctggccgtagccccaccgggcgtggctgccctgtccattcattctgccgtggcccagctcccaggccaacctgtgtacccagcggccttcccacagatggcgcctactgacgtccctccttccccccatcacacggtgcagaatatgagggccacccctccacagccggcactgcctccacaacccacactgcccccacaacccgtgctgcccccgcaacccacgctgccccctcaacctgtgttgcccccgcaacccacacggccccctcaacctgtgctgcccccgcaacccatgctgcccccacaacctgtgctgcccccgcagccggcactgcctgtgcgccctgagcccctccagccccaccttcctgaacaagctgctccagctgctacaccagggagccagattctgcttggccacccagctccctatgctgtggacgtcgccgctcaggtccccaccgtgcctgtgccaccggctgcggtcctctcgccgcctctgccggaagtgctgctgcctgccgcccctgagctcctgcctcagttccccagctccctggccacggtgtctgcctctgtgcagagtgtgcccacccagactgccacacttctgccaccagcaaacccaccgctgcctggcgggcccgggatcgccagcccttgcccaactgtccagctgacggtggaaccagtccaagaggagcaggcctcacaggacaagccgcccggcctcccgcagagctgtgagagctatggaggttctgatgtcacttctggaaaagagctgagtgacagctgtgaaggcgcctttggagggggcaggctggagggcagggcagcccgaaaacaccaccgcaggtccacgcgtgcgcgctcccggcaggagagggccagccggccccggcttaccatcttgaacgtgtgcaacactggggacaagatggtggagtgccagctggagacgcacaaccacaagatggtgaccttcaagttcgacttggacggggacgcacccgatgaaattgccacgtatatggtggagcatgactttatcctgcaggccgagcgggaaacgttcatcgagcagatgaaggatgtcatggacaaggcagaggacatgctcagcgaggacacagacgccgaccgtggctccgacccagggaccagcccgccacacctcagcacctgcggcctgggcaccggggaggagagccgacaatcccaagccaacgcccccgtgtatcagcagaacgtcctgcacaccgggaagaggtggttcatcatctgtccggtggctgagcaccccgcccccgaggcccctgaatcttcgcccccacttcctctaagctccctgccgccagaagccagccaaggtccatgcagggggctcaccctgccctgtctcccatggcgcagagcagcctgtggggctgtgttcctatccttgttttctgctgaatcagctcagtcaaagcagcctccagattcagcgccctataaagaccagctgtcctcgaaggaacaacccagctttctagccagtcagcagctcctgagccaggcgggccccagcaaccctcctggggcacccccagcccctttggccccctcctcccctcctgtgactgctctgccccaagatggagcagctccagccaccagcaccatgccagagccagcgtcaggaactgccagccaggcagggggtccagggacacctcaggggctgaccagtgagctcgagacgtctcagccactagcggagactcacgaggccccgcttgctgtgcagcccctcgtggtgggcctagcaccttgcactccagctccagaggctgcctcaaccagggacgccagtgccccaagggagcccctgccacctcctgcacctgagcccagcccccacagcgggaccccacagcccgccttgggtcaacctgctcccctgcttcctgccgcagtgggggccgtcagcctggccacctcccagctcccaagcccacccctggggcccaccgtccccccacagccaccctcggccctggagtcggatggggaagggccgccccccagggtgggctttgtggacagcaccatcaagagcctggacgagaagctgcggactctgctctaccaggagcacgtgcccacctcctcagcctcagctgggacccctgtggaggtgggcgacagagacttcaccctggagcccctgagaggggaccagccccgctcagaggtctgcgggggggacctggccctgcccccagtgcctaaggaggcggtctcagggcgtgtccagctgccccagcccttggtggagaagtcagaactggcccccactcgaggggccgtgatggagcagggcacgtcctcgtcaatgacagcagagtcgtctcccaggagtatgctaggctatgacagagatggaaggcaggtggcctcagactcccatgtggtccccagcgtcccccaggatgtacctgcttttgtgagacctgcacgtgtggagcccacagacagggatggtggagaagctggagaaagctcggcagagcccccgccgagtgacatgggcacagtggggggccaggctagccacccccagacactcggcgctcgagctttggggtcccctcggaaacgtccagagcagcaggatgtcagctcaccagccaagactgtgggccgtttctcggtggtcagcactcaggacgagtggaccctggcctccccccacagcctgagatactctgccccacccgacgtctacctggacgaggccccctccagccccgacgtgaagctggcagtgcggcgggcgcagacggcctcctccatcgaggtcggcgtgggcgagcccgtgtccagcgactctggggacgagggccctcgggcgagacccccggtgcagaagcaggcgtccctgcccgtgagtggcagcgtggctggcgacttcgtgaagaaggccaccgccttcctgcagaggccttctcgggccggctcgctgggccccgagacacccagcagggtgggcatgaaggtccccacgatcagcgtgacctccttccattcccagtcgtcctacatcagcagcgacaatgattcggagctcgaggatgctgacataaagaaggagctgcagagtctgcgggagaagcacctgaaggagatctcggagctgcagagccagcagaagcaggagatcgaagctctgtaccgccgcctgggcaagccactgccccccaacgtgggcttcttccacacggcaccccccactggccgccggagaaaaaccagcaagagcaagctgaaggcaggcaagctgctaaatcccctggtgcggcagctcaaggtcgtggcctccagcacaggtcacttggctgactccagcagaggccctcccgctaaggaccctgcccaagccagtgtggggctcactgcagacagcacgggcctgagcgggaaggcagtgcagacccagcagccctgctccgtccgggcctccctgtcttcggacatctgctccggcttagccagtgatggaggcggagcgcgtggccaaggctggacggtttaccacccaacgtctgagagagtgacctataagtctagtagcaaacctcgtgctcgattcctcagtggacccgtatctgtgtccatctggtctgccctgaagcgtctctgcctaggcaaagaacacagcagtaggtcctccaccagcagcctggccccaggccctgagccaggcccccagcccgccctgcacgtccaggcgcaggtgaacaacagcaacaacaagaagggtaccttcacggacgacctgcacaagctggtggacgagtggacgagcaagacggtgggggccgcgcagctgaagcccacgctcaaccagctgaagcagacccagaagctgcaagacatggaggcccaggcaggctgggctgcccctggcgaggcgcgggctatgaccgcacctcgagcaggagtggggatgccacgtctgcccccagcgcccggccctctgtccaccacggtcattcccggagccgccccgaccctgtccgtgcccacaccagatcctgagagtgagaagcctgactgaccccgcctagacgccaggcccacttcacgccgtctaagtggagaagtgacggaccctcagggccagctgctcctcctgtccagttcacgctgttttgtaaccactttctaagcattttttattcacaattggaaacacaaatgtaatgcaagaataaaaaatattttggggcagaaagga

SEQ ID NO: 34461 - DNA, 6821 bp, Homo sapiens
  source 1..6821: mol_type = unassigned DNA
atggacggcgatggcggccgccgagacgtccccggcacgctgatggagcccgggcgcggcgcggggcccgcgggcatggcggagcctcgggcgaaggcggcgcggccggggccccagcgctttctgcggcgcagcgtggtagagtcggaccaggaggagccgccgggcttggaggcagccgaggcgccgggcccgcagcccccgcagcccctgcagcgccgggtgcttctgctctgcaagacgcgccgcctcatcgcggagcgcgcccgcggacgccccgccgcccccgcgcccgcagcgctggtagcgcagccgggagcccccggagcccccgcggacgccggccccgagcccgtgggcacgcaggagcccggcccggaccccatcgcagccgctgtcgaaaccgcgcctgcccccgacggcggccccagggaggaggcggcggcgaccgtgaggaaggaggatgagggggcggccgaggcgaagcctgagcccgggcgcactcgccgggacgagcccgaagaggaggaggacgacgaggacgacctcaaggccgtggccacctctctggacggccgcttcctcaagttcgacatcgagctgggccgcggttccttcaagacggtctacaaggggctggacacggagacctgggtggaggtggcctggtgtgagctgcaggaccggaagctcaccaagctggagcggcagcggttcaaggaagaggctgagatgctgaaaggcctgcagcaccccaacatcgtgcgcttctacgacttctgggagtccagcgccaagggcaagcggtgcattgtgctggtgacggagctgatgacctcagggacgctgaagacatacctgaagcggttcaaggtgatgaagcccaaggttctccgcagctggtgccggcagatcctgaagggcctgctgttcctgcacacaaggacgccacccatcatccaccgagacctgaaatgtgacaatattttcatcaccggaccaactgggtctgtgaagattggcgacttgggcctggccactctgaaaagagcgtcatttgccaaaagtgtgataggtactcccgagttcatggcgcccgagatgtacgaggagcactacgatgagtccgtggacgtctatgcctttgggatgtgcatgctggagatggccacctcggagtacccctactcggagtgccagaatgcggcccagatctaccgcaaggtcacctgtggtatcaagccggccagctttgagaaagtgcacgatcctgaaatcaaggagattattggggagtgtatctgcaaaaacaaggaggaaaggtacgagatcaaagacctgctgagccacgccttcttcgcagaggacacaggcgtgagggtggagctcgcggaggaggaccacggcaggaagtccaccatcgccctgaggctctgggtggaagaccccaagaaactgaagggaaagcccaaggacaatggagccatagagttcaccttcgacctggagaaggagacgccggatgaggtggcccaagagatgattgagtctggattcttccacgagagtgacgtcaagatcgtggccaagtccatccgtgaccgcgtggccttgatccagtggcggcgggagaggatctggcccgcgctgcagcccaaggagcagcaggatgtgggcagcccggacaaggccaggggtccgccggtgcccctgcaggtccaggtgacctaccatgcacaggctgggcagcccgggccaccagagcccgaggagccggaggccgaccagcacctcctgccacctacgttgccgaccagcgccacctccctggcctcggacagcaccttcgacagcggccagggctctaccgtgtactcagactcgcagagcagccagcagagcgtgatgcttggctcccttgccgacgcagcgccgtccccggcccagtgtgtgtgcagcccccctgtgagcgaggggcccgtcctgccgcagagcctgccctcgctgggggcctaccagcagcccacggctgcacctggcttgccggtgggctctgtcccggcccccgcctgccctccgtccctccagcagcacttcccggatccggccatgagcttcgcccccgtgctgccgccgcccagcacccccatgcccacgggcccaggccagccagcaccccccggccagcagcctcctccgctggcccagccgacacccctgccgcaggtcctggccccacagcccgtggtccccctccagccggttcccccccacctgccaccgtacctggctccagcctcccaggtgggggcccccgctcagctgaagcccctccagatgccacaggcgcccctgcagccgcttgctcaagtccctccgcagatgcccccgattcctgttgtgccccccatcacgcccctggcgggaatcgacggcctccctccggccctcccagacctgccgaccgcgactgtgcctcccgtgccaccacctcagtatttctctccagccgtgatcttgccgagcctcgctgccccactcccccctgcgtccccagccttgcctctgcaggctgtgaagctgccccacccccctggggcgcccctggccatgccctgccggaccattgtgccaaatgcaccggccactatccccctgctggccgtagccccaccgggcgtggctgccctgtccattcattctgccgtggcccagctcccaggccaacctgtgtacccagcggccttcccacagatggcgcctactgacgtccctccttccccccatcacacggtgcagaatatgagggccacccctccacagccggcactgcctccacaacccacactgcccccacaacccgtgctgcccccgcaacccacgctgccccctcaacctgtgttgcccccgcaacccacacggccccctcaacctgtgctgcccccgcaacccatgctgcccccacaacctgtgctgcccccgcagccggcactgcctgtgcgccctgagcccctccagccccaccttcctgaacaagctgctccagctgctacaccagggagccagattctgcttggccacccagctccctatgctgtggacgtcgccgctcaggtccccaccgtgcctgtgccaccggctgcggtcctctcgccgcctctgccggaagtgctgctgcctgccgcccctgagctcctgcctcagttccccagctccctggccacggtgtctgcctctgtgcagagtgtgcccacccagactgccacacttctgccaccagcaaacccaccgctgcctggcgggcccgggatcgccagcccttgcccaactgtccagctgacggtggaaccagtccaagaggagcaggcctcacaggacaagccgcccggcctcccgcagagctgtgagagctatggaggttctgatgtcacttctggaaaagagctgagtgacagctgtgaaggcgcctttggagggggcaggctggagggcagggcagcccgaaaacaccaccgcaggtccacgcgtgcgcgctcccggcaggagagggccagccggccccggcttaccatcttgaacgtgtgcaacactggggacaagatggtggagtgccagctggagacgcacaaccacaagatggtgaccttcaagttcgacttggacggggacgcacccgatgaaattgccacgtatatggtggagcatgactttatcctgcaggccgagcgggaaacgttcatcgagcagatgaaggatgtcatggacaaggcagaggacatgctcagcgaggacacagacgccgaccgtggctccgacccagggaccagcccgccacacctcagcacctgcggcctgggcaccggggaggagagccgacaatcccaagccaacgcccccgtgtatcagcagaacgtcctgcacaccgggaagaggtggttcatcatctgtccggtggctgagcaccccgcccccgaggcccctgaatcttcgcccccacttcctctaagctccctgccgccagaagccagccaagattcagcgccctataaagaccagctgtcctcgaaggaacaacccagctttctagccagtcagcagctcctgagccaggcgggccccagcaaccctcctggggcacccccagcccctttggccccctcctcccctcctgtgactgctctgccccaagatggagcagctccagccaccagcaccatgccagagccagcgtcaggaactgccagccaggcagggggtccagggacacctcaggggctgaccagtgagctcgagacgtctcagccactagcggagactcacgaggccccgcttgctgtgcagcccctcgtggtgggcctagcaccttgcactccagctccagaggctgcctcaaccagggacgccagtgccccaagggagcccctgccacctcctgcacctgagcccagcccccacagcgggaccccacagcccgccttgggtcaacctgctcccctgcttcctgccgcagtgggggccgtcagcctggccacctcccagctcccaagcccacccctggggcccaccgtccccccacagccaccctcggccctggagtcggatggggaagggccgccccccagggtgggctttgtggacagcaccatcaagagcctggacgagaagctgcggactctgctctaccaggagcacgtgcccacctcctcagcctcagctgggacccctgtggaggtgggcgacagagacttcaccctggagcccctgagaggggaccagccccgctcagaggtctgcgggggggacctggccctgcccccagtgcctaaggaggcggtctcagggcgtgtccagctgccccagcccttggtggagaagtcagaactggcccccactcgaggggccgtgatggagcagggcacgtcctcgtcaatgacagagtcgtctcccaggagtatgctaggctatgacagagatggaaggcaggtggcctcagactcccatgtggtccccagcgtcccccaggatgtacctgcttttgtgagacctgcacgtgtggagcccacagacagggatggtggagaagctggagaaagctcggcagagcccccgccgagtgacatgggcacagtggggggccaggctagccacccccagacactcggcgctcgagctttggggtcccctcggaaacgtccagagcagcaggatgtcagctcaccagccaagactgtgggccgtttctcggtggtcagcactcaggacgagtggaccctggcctccccccacagcctgagatactctgccccacccgacgtctacctggacgaggccccctccagccccgacgtgaagctggcagtgcggcgggcgcagacggcctcctccatcgaggtcggcgtgggcgagcccgtgtccagcgactctggggacgagggccctcgggcgagacccccggtgcagaagcaggcgtccctgcccgtgagtggcagcgtggctggcgacttcgtgaagaaggccacctcctgcagaggccttctcgggccgtcgctgggccccgagacacccagcagggtgggcatgaaggtccccacgatcagcgtgacctccttccattcccagtcgtcctacatcagcagcgacaatgattcggagctcgaggatgctgacataaagaaggagctgcagagtctgcgggagaagcacctgaaggagatctcggagctgcagagccagcagaagcaggagatcgaagctctgtaccgccgcctgggcaagccactgccccccaacgtgggcttcttccacacggcaccccccactggccgccggagaaaaaccagcaagagcaagctgaaggcaggcaagctgctaaatcccctggtgcggcagctcaaggtcgtggcctccagcacaggtcacttggctgactccagcagaggccctcccgctaaggaccccaagccagtgtggggctcactgcagacagcacgggcctgagcgggaaggcagtgcagacccagcagccctgctccgtccgggcctccctgtcttcggacatctgctccggcttagccagtgatggaggcggagcgcgtggccaaggctggacggtttaccacccaacgtctgagagagtgacctataagtctagtagcaaacctcgtgctcgattcctcagtggacccgtatctgtgtccatctggtctgccctgaagcgtctctgcctaggcaaagaacacagcagtaggtcctccaccagcagcctggccccaggccctgagccaggcccccagcccgccctgcacgtccaggcgcaggtgaacaacagcaacaacaagaagggtaccttcacggacgacctgcacaagctggtggacgagtggacgagcaagacggtgggggccgcgcagctgaagcccacgctcaaccagctgaagcagacccagaagctgcaagacatggaggcccaggcaggctgggctgcccctggcgaggcgcgggctatgaccgcacctcgagcaggagtggggatgccacgtctgcccccagcgcccggccctctgtccaccacggtcattcccggagccgccccgaccctgtccgtgcccacaccagatcctgagagtgagaagcctgactgaccccgcctagacgccaggcccacttcacgccgtctaagtggagaagtgacggaccctcagggccagctgctcctcctgtccagttcacgctgttttgtaaccactttctaagcattttttattcacaattggaaacacaaatgtaatgcaagaataaaaaatattttggggcagaaagga

SEQ ID NO: 34462 - DNA, 6678 bp, Homo sapiens
  source 1..6678: mol_type = unassigned DNA
atggacggcgatggcggccgccgagacgtccccggcacgctgatggagcccgggcgcggcgcggggcccgcgggcatggcggagcctcgggcgaaggcggcgcggccggggccccagcgctttctgcggcgcagcgtggtagagtcggaccaggaggagccgccgggcttggaggcagccgaggcgccgggcccgcagcccccgcagcccctgcagcgccgggtgcttctgctctgcaagacgcgccgcctcatcgcggagcgcgcccgcggacgccccgccgcccccgcgcccgcagcgctggtagcgcagccgggagcccccggagcccccgcggacgccggccccgagcccgtgggcacgcaggagcccggcccggaccccatcgcagccgctgtcgaaaccgcgcctgcccccgacggcggccccagggaggaggcggcggcgaccgtgaggaaggaggatgagggggcggccgaggcgaagcctgagcccgggcgcactcgccgggacgagcccgaagaggaggaggacgacgaggacgacctcaaggccgtggccacctctctggacggccgcttcctcaagttcgacatcgagctgggccgcggttccttcaagacggtctacaaggggctggacacggagacctgggtggaggtggcctggtgtgagctgcaggaccggaagctcaccaagctggagcggcagcggttcaaggaagaggctgagatgctgaaaggcctgcagcaccccaacatcgtgcgcttctacgacttctgggagtccagcgccaagggcaagcggtgcattgtgctggtgacggagctgatgacctcagggacgctgaagacatacctgaagcggttcaaggtgatgaagcccaaggttctccgcagctggtgccggcagatcctgaagggcctgctgttcctgcacacaaggacgccacccatcatccaccgagacctgaaatgtgacaatattttcatcaccggaccaactgggtctgtgaagattggcgacttgggcctggccactctgaaaagagcgtcatttgccaaaagtgtgataggtactcccgagttcatggcgcccgagatgtacgaggagcactacgatgagtccgtggacgtctatgcctttgggatgtgcatgctggagatggccacctcggagtacccctactcggagtgccagaatgcggcccagatctaccgcaaggtcacctgtggtatcaagccggccagctttgagaaagtgcacgatcctgaaatcaaggagattattggggagtgtatctgcaaaaacaaggaggaaaggtacgagatcaaagacctgctgagccacgccttcttcgcagaggacacaggcgtgagggtggagctcgcggaggaggaccacggcaggaagtccaccatcgccctgaggctctgggtggaagaccccaagaaactgaagggaaagcccaaggacaatggagccatagagttcaccttcgacctggagaaggagacgccggatgaggtggcccaagagatgattgagtctggattcttccacgagagtgacgtcaagatcgtggccaagtccatccgtgaccgcgtggccttgatccagtggcggcgggagaggatctggcccgcgctgcagcccaaggagcagcaggatgtgggcagcccggacaaggccaggggtccgccggtgcccctgcaggtccaggtgacctaccatgcacaggctgggcagcccgggccaccagagcccgaggagccggaggccgaccagcacctcctgccacctacgttgccgaccagcgccacctccctggcctcggacagcaccttcgacagcggccagggctctaccgtgtactcagactcgcagagcagccagcagagcgtgatgcttggctcccttgccgacgcagcgccgtccccggcccagtgtgtgtgcagcccccctgtgagcgaggggcccgtcctgccgcagagcctgccctcgctgggggcctaccagcagcccacggctgcacctcctccgctggcccagccgacacccctgccgcaggtcctggccccacagcccgtggtccccctccagccggttcccccccacctgccaccgtacctggctccagcctcccaggtgggggcccccgctcagctgaagcccctccagatgccacaggcgcccctgcagccgcttgctcaagtccctccgcagatgcccccgattcctgttgtgccccccatcacgcccctggcgggaatcgacggcctccctccggccctcccagacctgccgaccgcgactgtgcctcccgtgccaccacctcagtatttctctccagccgtgatcttgccgagcctcgctgccccactcccccctgcgtccccagccttgcctctgcaggctgtgaagctgccccacccccctggggcgcccctggccatgccctgccggaccattgtgccaaatgcaccggccactatccccctgctggccgtagccccaccgggcgtggctgccctgtccattcattctgccgtggcccagctcccaggccaacctgtgtacccagcggccttcccacagatggcgcctactgacgtccctccttccccccatcacacggtgcagaatatgagggccacccctccacagccggcactgcctccacaacccacactgcccccacaacccgtgctgcccccgcaacccacgctgccccctcaacctgtgttgcccccgcaacccacacggccccctcaacctgtgctgcccccgcaacccatgctgcccccacaacctgtgctgcccccgcagccggcactgcctgtgcgccctgagcccctccagccccaccttcctgaacaagctgctccagctgctacaccagggagccagattctgcttggccacccagctccctatgctgtggacgtcgccgctcaggtccccaccgtgcctgtgccaccggctgcggtcctctcgccgcctctgccggaagtgctgctgcctgccgcccctgagctcctgcctcagttccccagctccctggccacggtgtctgcctctgtgcagagtgtgcccacccagactgccacacttctgccaccagcaaacccaccgctgcctggcgggcccgggatcgccagcccttgcccaactgtccagctgacggtggaaccagtccaagaggagcaggcctcacaggacaagccgcccggcctcccgcagagctgtgagagctatggaggttctgatgtcacttctggaaaagagctgagtgacagctgtgaaggcgcctttggagggggcaggctggagggcagggcagcccgaaaacaccaccgcaggtccacgcgtgcgcgctcccggcaggagagggccagccggccccggcttaccatcttgaacgtgtgcaacactggggacaagatggtggagtgccagctggagacgcacaaccacaagatggtgaccttcaagttcgacttggacggggacgcacccgatgaaattgccacgtatatggtggagcatgactttatcctgcaggccgagcgggaaacgttcatcgagcagatgaaggatgtcatggacaaggcagaggacatgctcagcgaggacacagacgccgaccgtggctccgacccagggaccagcccgccacacctcagcacctgcggcctgggcaccggggaggagagccgacaatcccaagccaacgcccccgtgtatcagcagaacgtcctgcacaccgggaagaggtggttcatcatctgtccggtggctgagcaccccgcccccgaggcccctgaatcttcgcccccacttcctctaagctccctgccgccagaagccagccaagattcagcgccctataaagaccagctgtcctcgaaggaacaacccagctttctagccagtcagcagctcctgagccaggcgggccccagcaaccctcctggggcacccccagcccctttggccccctcctcccctcctgtgactgctctgccccaagatggagcagctccagccaccagcaccatgccagagccagcgtcaggaactgccagccaggcagggggtccagggacacctcaggggctgaccagtgagctcgagacgtctcagccactagcggagactcacgaggccccgcttgctgtgcagcccctcgtggtgggcctagcaccttgcactccagctccagaggctgcctcaaccagggacgccagtgccccaagggagcccctgccacctcctgcacctgagcccagcccccacagcgggaccccacagcccgccttgggtcaacctgctcccctgcttcctgccgcagtgggggccgtcagcctggccacctcccagctcccaagcccacccctggggcccaccgtccccccacagccaccctcggccctggagtcggatggggaagggccgccccccagggtgggctttgtggacagcaccatcaagagcctggacgagaagctgcggactctgctctaccaggagcacgtgcccacctcctcagcctcagctgggacccctgtggaggtgggcgacagagacttcaccctggagcccctgagaggggaccagccccgctcagaggtctgcgggggggacctggccctgcccccagtgcctaaggaggcggtctcagggcgtgtccagctgccccagcccttggtggagaagtcagaactggcccccactcgaggggccgtgatggagcagggcacgtcctcgtcaatgacagcagagtcgtctcccaggagtatgctaggctatgacagagatggaaggcaggtggcctcagactcccatgtggtccccagcgtcccccaggatgtacctgcttttgtgagacctgcacgtgtggagcccacagacagggatggtggagaagctggagaaagctcggcagagcccccgccgagtgacatgggcacagtggggggccaggctagccacccccagacactcggcgctcgagctttggggtcccctcggaaacgtccagagcagcaggatgtcagctcaccagccaagactgtgggccgtttctcggtggtcagcactcaggacgagtggaccctggcctccccccacagcctgagatactctgccccacccgacgtctacctggacgaggccccctccagccccgacgtgaagctggcagtgcggcgggcgcagacggcctcctccatcgaggtcggcgtgggcgagcccgtgtccagcgactctggggacgagggccctcgggcgagacccccggtgcagaagcaggcgtccctgcccgtgagtggcagcgtggctggcgacttcgtgaagaaggccaccgccttcctgcagaggccttctcgggccggctcgctgggccccgagacacccagcagggtgggcatgaaggtccccacgatcagcgtgacctccttccattcccagtcgtcctacatcagcagcgacaatgattcggagctcgaggatgctgacataaagaaggagctgcagagtctgcgggagaagcacctgaaggagatctcggagctgcagagccagcagaagcaggagatcgaagctctgtaccgccgcctgggcaagccactgccccccaacgtgggcttcttccacacggcaccccccactggccgccggagaaaaaccagcaagagcaagctgaaggcaggcaagctgctaaatcccctggtgcggcagctcaaggtcgtggcctccagcacaggtcacttggctgactccagcagaggccctcccgctaaggaccctgcccaagccagtgtggggctcactgcagacagcacgggcctgagcgggaaggcagtgcagacccagcagccctgctccgtccgggcctccctgtcttcggacatctgctccggcttagccagtgatggaggcggagcgcgtggccaaggctggacggtttaccacccaacgtctgagagagtgacctataagtctagtagcaaacctcgtgctcgattcctcagtggacccgtatctgtgtccatctggtctgccctgaagcgtctctgcctaggcaaagaacacagcagtaggtcctccaccagcagcctggccccaggccctgagccaggcccccagcccgccctgcacgtccaggcgcaggtgaacaacagcaacaacaagaagggtaccttcacggacgacctgcacaagctggtggacgagtggacgagcaagacggtgggggccgcgcagctgaagcccacgctcaaccagctgaagcagacccagaagctgcaagacatggaggcccaggcaggctgggctgcccctggcgaggcgcgggctatgaccgcacctcgagcaggagtggggatgccacgtctgcccccagcgcccggccctctgtccaccacggtcattcccggagccgccccgaccctgtccgtgcccacaccagatcctgagagtgagaagcctgactgaccccgcctagacgccaggcccacttcacgccgtctaagtggagaagtgacggaccctcagggccagctgctcctcctgtccagttcacgctgttttgtaaccactttctaagcattttttattcacaattggaaacacaaatgtaatgcaagaataaaaaatattttggggcagaaagga

SEQ ID NO: 34463 - DNA, 6834 bp, Homo sapiens
  source 1..6834: mol_type = unassigned DNA
atggacggcgatggcggccgccgagacgtccccggcacgctgatggagcccgggcgcggcgcggggcccgcgggcatggcggagcctcgggcgaaggcggcgcggccggggccccagcgctttctgcggcgcagcgtggtagagtcggaccaggaggagccgccgggcttggaggcagccgaggcgccgggcccgcagcccccgcagcccctgcagcgccgggtgcttctgctctgcaagacgcgccgcctcatcgcggagcgcgcccgcggacgccccgccgcccccgcgcccgcagcgctggtagcgcagccgggagcccccggagcccccgcggacgccggccccgagcccgtgggcacgcaggagcccggcccggaccccatcgcagccgctgtcgaaaccgcgcctgcccccgacggcggccccagggaggaggcggcggcgaccgtgaggaaggaggatgagggggcggccgaggcgaagcctgagcccgggcgcactcgccgggacgagcccgaagaggaggaggacgacgaggacgacctcaaggccgtggccacctctctggacggccgcttcctcaagttcgacatcgagctgggccgcggttccttcaagacggtctacaaggggctggacacggagacctgggtggaggtggcctggtgtgagctgcaggaccggaagctcaccaagctggagcggcagcggttcaaggaagaggctgagatgctgaaaggcctgcagcaccccaacatcgtgcgcttctacgacttctgggagtccagcgccaagggcaagcggtgcattgtgctggtgacggagctgatgacctcagggacgctgaagacatacctgaagcggttcaaggtgatgaagcccaaggttctccgcagctggtgccggcagatcctgaagggcctgctgttcctgcacacaaggacgccacccatcatccaccgagacctgaaatgtgacaatattttcatcaccggaccaactgggtctgtgaagattggcgacttgggcctggccactctgaaaagagcgtcatttgccaaaagtgtgataggtactcccgagttcatggcgcccgagatgtacgaggagcactacgatgagtccgtggacgtctatgcctttgggatgtgcatgctggagatggccacctcggagtacccctactcggagtgccagaatgcggcccagatctaccgcaaggtcacctgtggtatcaagccggccagctttgagaaagtgcacgatcctgaaatcaaggagattattggggagtgtatctgcaaaaacaaggaggaaaggtacgagatcaaagacctgctgagccacgccttcttcgcagaggacacaggcgtgagggtggagctcgcggaggaggaccacggcaggaagtccaccatcgccctgaggctctgggtggaagaccccaagaaactgaagggaaagcccaaggacaatggagccatagagttcaccttcgacctggagaaggagacgccggatgaggtggcccaagagatgattgagtctggattcttccacgagagtgacgtcaagatcgtggccaagtccatccgtgaccgcgtggccttgatccagtggcggcgggagaggatctggcccgcgctgcagcccaaggagcagcaggatgtgggcagcccggacaaggccaggggtccgccggtgcccctgcaggtccaggtgacctaccatgcacaggctgggcagcccgggccaccagagcccgaggagccggaggccgaccagcacctcctgccacctacgttgccgaccagcgccacctccctggcctcggacagcaccttcgacagcggccagggctctaccgtgtactcagactcgcagagcagccagcagagcgtgatgcttggctcccttgccgacgcagcgccgtccccggcccagtgtgtgtgcagcccccctgtgagcgaggggcccgtcctgccgcagagcctgccctcgctgggggcctaccagcagcccacggctgcacctggcttgccggtgggctctgtcccggcccccgcctgccctccgtccctccagcagcacttcccggatccggccatgagcttcgcccccgtgctgccgccgcccagcacccccatgcccacgggcccaggccagccagcaccccccggccagcagcctcctccgctggcccagccgacacccctgccgcaggtcctggccccacagcccgtggtccccctccagccggttcccccccacctgccaccgtacctggctccagcctcccaggtgggggcccccgctcagctgaagcccctccagatgccacaggcgcccctgcagccgcttgctcaagtccctccgcagatgcccccgattcctgttgtgccccccatcacgcccctggcgggaatcgacggcctccctccggccctcccagacctgccgaccgcgactgtgcctcccgtgccaccacctcagtatttctctccagccgtgatcttgccgagcctcgctgccccactcccccctgcgtccccagccttgcctctgcaggctgtgaagctgccccacccccctggggcgcccctggccatgccctgccggaccattgtgccaaatgcaccggccactatccccctgctggccgtagccccaccgggcgtggctgccctgtccattcattctgccgtggcccagctcccaggccaacctgtgtacccagcggccttcccacagatggcgcctactgacgtccctccttccccccatcacacggtgcagaatatgagggccacccctccacagccggcactgcctccacaacccacactgcccccacaacccgtgctgcccccgcaacccacgctgccccctcaacctgtgttgcccccgcaacccacacggccccctcaacctgtgctgcccccgcaacccatgctgcccccacaacctgtgctgcccccgcagccggcactgcctgtgcgccctgagcccctccagccccaccttcctgaacaagctgctccagctgctacaccagggagccagattctgcttggccacccagctccctatgctgtggacgtcgccgctcaggtccccaccgtgcctgtgccaccggctgcggtcctctcgccgcctctgccggaagtgctgctgcctgccgcccctgagctcctgcctcagttccccagctccctggccacggtgtctgcctctgtgcagagtgtgcccacccagactgccacacttctgccaccagcaaacccaccgctgcctggcgggcccgggatcgccagcccttgcccaactgtccagctgacggtggaaccagtccaagaggagcaggcctcacaggacaagccgcccggcctcccgcagagctgtgagagctatggaggttctgatgtcacttctggaaaagagctgagtgacagctgtgaaggcgcctttggagggggcaggctggagggcagggcagcccgaaaacaccaccgcaggtccacgcgtgcgcgctcccggcaggagagggccagccggccccggcttaccatcttgaacgtgtgcaacactggggacaagatggtggagtgccagctggagacgcacaaccacaagatggtgaccttcaagttcgacttggacggggacgcacccgatgaaattgccacgtatatggtggagcatgactttatcctgcaggccgagcgggaaacgttcatcgagcagatgaaggatgtcatggacaaggcagaggacatgctcagcgaggacacagacgccgaccgtggctccgacccagggaccagcccgccacacctcagcacctgcggcctgggcaccggggaggagagccgacaatcccaagccaacgcccccgtgtatcagcagaacgtcctgcacaccgggaagaggtggttcatcatctgtccggtggctgagcaccccgcccccgaggcccctgaatcttcgcccccacttcctctaagctccctgccgccagaagccagccaagattcagcgccctataaagaccagctgtcctcgaaggaacaacccagctttctagccagtcagcagctcctgagccaggcgggccccagcaaccctcctggggcacccccagcccctttggccccctcctcccctcctgtgactgctctgccccaagatggagcagctccagccaccagcaccatgccagagccagcgtcaggaactgccagccaggcagggggtccagggacacctcaggggctgaccagtgagctcgagacgtctcagccactagcggagactcacgaggccccgcttgctgtgcagcccctcgtggtgggcctagcaccttgcactccagctccagaggctgcctcaaccagggacgccagtgccccaagggagcccctgccacctcctgcacctgagcccagcccccacagcgggaccccacagcccgccttgggtcaacctgctcccctgcttcctgccgcagtgggggccgtcagcctggccacctcccagctcccaagcccacccctggggcccaccgtccccccacagccaccctcggccctggagtcggatggggaagggccgccccccagggtgggctttgtggacagcaccatcaagagcctggacgagaagctgcggactctgctctaccaggagcacgtgcccacctcctcagcctcagctgggacccctgtggaggtgggcgacagagacttcaccctggagcccctgagaggggaccagccccgctcagaggtctgcgggggggacctggccctgcccccagtgcctaaggaggcggtctcagggcgtgtccagctgccccagcccttggtggagaagtcagaactggcccccactcgaggggccgtgatggagcagggcacgtcctcgtcaatgacagcagagtcgtctcccaggagtatgctaggctatgacagagatggaaggcaggtggcctcagactcccatgtggtccccagcgtcccccaggatgtacctgcttttgtgagacctgcacgtgtggagcccacagacagggatggtggagaagctggagaaagctcggcagagcccccgccgagtgacatgggcacagtggggggccaggctagccacccccagacactcggcgctcgagctttggggtcccctcggaaacgtccagagcagcaggatgtcagctcaccagccaagactgtgggccgtttctcggtggtcagcactcaggacgagtggaccctggcctccccccacagcctgagatactctgccccacccgacgtctacctggacgaggccccctccagccccgacgtgaagctggcagtgcggcgggcgcagacggcctcctccatcgaggtcggcgtgggcgagcccgtgtccagcgactctggggacgagggccctcgggcgagacccccggtgcagaagcaggcgtccctgcccgtgagtggcagcgtggctggcgacttcgtgaagaaggccaccgccttcctgcagaggccttctcgggccggctcgctgggccccgagacacccagcagggtgggcatgaaggtccccacgatcagcgtgacctccttccattcccagtcgtcctacatcagcagcgacaatgattcggagctcgaggatgctgacataaagaaggagctgcagagtctgcgggagaagcacctgaaggagatctcggagctgcagagccagcagaagcaggagatcgaagctctgtaccgccgcctgggcaagccactgccccccaacgtgggcttcttccacacggcaccccccactggccgccggagaaaaaccagcaagagcaagctgaaggcaggcaagctgctaaatcccctggtgcggcagctcaaggtcgtggcctccagcacaggtcacttggctgactccagcagaggccctcccgctaaggaccctgcccaagccagtgtggggctcactgcagacagcacgggcctgagcgggaaggcagtgcagacccagcagccctgctccgtccgggcctccctgtcttcggacatctgctccggcttagccagtgatggaggcggagcgcgtggccaaggctggacggtttaccacccaacgtctgagagagtgacctataagtctagtagcaaacctcgtgctcgattcctcagtggacccgtatctgtgtccatctggtctgccctgaagcgtctctgcctaggcaaagaacacagcagtaggtcctccaccagcagcctggccccaggccctgagccaggcccccagcccgccctgcacgtccaggcgcaggtgaacaacagcaacaacaagaagggtaccttcacggacgacctgcacaagctggtggacgagtggacgagcaagacggtgggggccgcgcagctgaagcccacgctcaaccagctgaagcagacccagaagctgcaagacatggaggcccaggcaggctgggctgcccctggcgaggcgcgggctatgaccgcacctcgagcaggagtggggatgccacgtctgcccccagcgcccggccctctgtccaccacggtcattcccggagccgccccgaccctgtccgtgcccacaccagatcctgagagtgagaagcctgactgaccccgcctagacgccaggcccacttcacgccgtctaagtggagaagtgacggaccctcagggccagctgctcctcctgtccagttcacgctgttttgtaaccactttctaagcattttttattcacaattggaaacacaaatgtaatgcaagaataaaaaatattttggggcagaaagga

SEQ ID NO: 34464 - DNA, 6675 bp, Homo sapiens
  source 1..6675: mol_type = unassigned DNA
atggacggcgatggcggccgccgagacgtccccggcacgctgatggagcccgggcgcggcgcggggcccgcgggcatggcggagcctcgggcgaaggcggcgcggccggggccccagcgctttctgcggcgcagcgtggtagagtcggaccaggaggagccgccgggcttggaggcagccgaggcgccgggcccgcagcccccgcagcccctgcagcgccgggtgcttctgctctgcaagacgcgccgcctcatcgcggagcgcgcccgcggacgccccgccgcccccgcgcccgcagcgctggtagcgcagccgggagcccccggagcccccgcggacgccggccccgagcccgtgggcacgcaggagcccggcccggaccccatcgcagccgctgtcgaaaccgcgcctgcccccgacggcggccccagggaggaggcggcggcgaccgtgaggaaggaggatgagggggcggccgaggcgaagcctgagcccgggcgcactcgccgggacgagcccgaagaggaggaggacgacgaggacgacctcaaggccgtggccacctctctggacggccgcttcctcaagttcgacatcgagctgggccgcggttccttcaagacggtctacaaggggctggacacggagacctgggtggaggtggcctggtgtgagctgcaggaccggaagctcaccaagctggagcggcagcggttcaaggaagaggctgagatgctgaaaggcctgcagcaccccaacatcgtgcgcttctacgacttctgggagtccagcgccaagggcaagcggtgcattgtgctggtgacggagctgatgacctcagggacgctgaagacatacctgaagcggttcaaggtgatgaagcccaaggttctccgcagctggtgccggcagatcctgaagggcctgctgttcctgcacacaaggacgccacccatcatccaccgagacctgaaatgtgacaatattttcatcaccggaccaactgggtctgtgaagattggcgacttgggcctggccactctgaaaagagcgtcatttgccaaaagtgtgataggtactcccgagttcatggcgcccgagatgtacgaggagcactacgatgagtccgtggacgtctatgcctttgggatgtgcatgctggagatggccacctcggagtacccctactcggagtgccagaatgcggcccagatctaccgcaaggtcacctgtggtatcaagccggccagctttgagaaagtgcacgatcctgaaatcaaggagattattggggagtgtatctgcaaaaacaaggaggaaaggtacgagatcaaagacctgctgagccacgccttcttcgcagaggacacaggcgtgagggtggagctcgcggaggaggaccacggcaggaagtccaccatcgccctgaggctctgggtggaagaccccaagaaactgaagggaaagcccaaggacaatggagccatagagttcaccttcgacctggagaaggagacgccggatgaggtggcccaagagatgattgagtctggattcttccacgagagtgacgtcaagatcgtggccaagtccatccgtgaccgcgtggccttgatccagtggcggcgggagaggatctggcccgcgctgcagcccaaggagcagcaggatgtgggcagcccggacaaggccaggggtccgccggtgcccctgcaggtccaggtgacctaccatgcacaggctgggcagcccgggccaccagagcccgaggagccggaggccgaccagcacctcctgccacctacgttgccgaccagcgccacctccctggcctcggacagcaccttcgacagcggccagggctctaccgtgtactcagactcgcagagcagccagcagagcgtgatgcttggctcccttgccgacgcagcgccgtccccggcccagtgtgtgtgcagcccccctgtgagcgaggggcccgtcctgccgcagagcctgccctcgctgggggcctaccagcagcccacggctgcacctggcttgccggtgggctctgtcccggcccccgcctgccctccgtccctccagcagcacttcccggatccggccatgagcttcgcccccgtgctgccgccgcccagcacccccatgcccacgggcccaggccagccagcaccccccggccagcagcctcctccgctggcccagccgacacccctgccgcaggtcctggccccacagcccgtggtccccctccagccggttcccccccacctgccaccgtacctggctccagcctcccaggtgggggcccccgctcagctgaagcccctccagatgccacaggcgcccctgcagccgcttgctcaagtccctccgcagatgcccccgattcctgttgtgccccccatcacgcccctggcgggaatcgacggcctccctccggccctcccagacctgccgaccgcgactgtgcctcccgtgccaccacctcagtatttctctccagccgtgatcttgccgagcctcgctgccccactcccccctgcgtccccagccttgcctctgcaggctgtgaagctgccccacccccctggggcgcccctggccatgccctgccggaccattgtgccaaatgcaccggccactatccccctgctggccgtagccccaccgggcgtggctgccctgtccattcattctgccgtggcccagctcccaggccaacctgtgtacccagcggccttcccacagatggcgcctactgacgtccctccttccccccatcacacggtgcagaatatgagggccacccctccacagccggcactgcctccacaacccacactgcccccacaacccgtgctgcccccgcaacccacgctgccccctcaacctgtgttgcccccgcaacccacacggccccctcaacctgtgctgcccccgcaacccatgctgcccccacaacctgtgctgcccccgcagccggcactgcctgtgcgccctgagcccctccagccccaccttcctgaacaagctgctccagctgctacaccagggagccagattctgcttggccacccagctccctatgctgtggacgtcgccgctcaggtccccaccgtgcctgtgccaccggctgcggtcctctcgccgcctctgccggaagtgctgctgcctgccgcccctgagctcctgcctcagttccccagctccctggccacggtgtctgcctctgtgcagagtgtgcccacccagactgccacacttctgccaccagcaaacccaccgctgcctggcgggcccgggatcgccagcccttgcccaactgtccagctgacggtggaaccagtccaagaggagcaggcctcacaggacaagccgcccggcctcccgcagagctgtgagagctatggaggttctgatgtcacttctggaaaagagctgagtgacagctgtgaaggcgcctttggagggggcaggctggagggcagggcagcccgaaaacaccaccgcaggtccacgcgtgcgcgctcccggcaggagagggccagccggccccggcttaccatcttgaacgtgtgcaacactggggacaagatggtggagtgccagctggagacgcacaaccacaagatggtgaccttcaagttcgacttggacggggacgcacccgatgaaattgccacgtatatggtggagcatgactttatcctgcaggccgagcgggaaacgttcatcgagcagatgaaggatgtcatggacaaggcagaggacatgctcagcgaggacacagacgccgaccgtggctccgacccagggaccagcccgccacacctcagcacctgcggcctgggcaccggggaggagagccgacaatcccaagccaacgcccccgtgtatcagcagaacgtcctgcacaccgggaagaggtggttcatcatctgtccggtggctgagcaccccgcccccgaggcccctgaatcttcgcccccacttcctctaagctccctgccgccagaagccagccaagattcagcgccctataaagaccagctgtcctcgaaggaacaacccagctttctagccagtcagcagctcctgagccaggcgggccccagcaaccctcctggggcacccccagcccctttggccccctcctcccctcctgtgactgctctgccccaagatggagcagctccagccaccagcaccatgccagagccagcgtcaggaactgccagccaggcagggggtccagggacacctcaggggctgaccagtgagctcgagacgtctcagccactagcggagactcacgaggccccgcttgctgtgcagcccctcgtggtgggcctagcaccttgcactccagctccagaggctgcctcaaccagggacgccagtgccccaagggagcccctgccacctcctgcacctgagcccagcccccacagcgggaccccacagcccgccttgggtcaacctgctcccctgcttcctgccgcagtgggggccgtcagcctggccacctcccagctcccaagcccacccctggggcccaccgtccccccacagccaccctcggccctggagtcggatggggaagggccgccccccagggtgggctttgtggacagcaccatcaagagcctggacgagaagctgcggactctgctctaccaggagcacgtgcccacctcctcagcctcagctgggacccctgtggaggtgggcgacagagacttcaccctggagcccctgagaggggaccagccccgctcagaggtctgcgggggggacctggccctgcccccagtgcctaaggaggcggtctcagggcgtgtccagctgccccagcccttggtggagaagtcagaactggcccccactcgaggggccgtgatggagcagggcacgtcctcgtcaatgacagcagagtcgtctcccaggagtatgctaggctatgacagagatggaaggcaggtggcctcagactcccatgtggtccccagcgtcccccaggatgtacctgcttttgtgagacctgcacgtgtggagcccacagacagggatggtggagaagctggagaaagctcggcagagcccccgccgagtgacatgggcacagtggggggccaggctagccacccccagacactcggcgctcgagctttggggtcccctcggaaacgtccagagcagcaggatgtcagctcaccagccaagactgtgggccgtttctcggtggtcagcactcaggacgagtggaccctggcctccccccacagcctgagatactctgccccacccgacgtctacctggacgaggccccctccagccccgacgtgaagctggcagtgcggcgggcgcagacggcctcctccatcgaggtcggcgtgggcgagcccgtgtccagcgactctggggacgagggccctcgggcgagacccccggtgcagaagcaggcgtccctgcccgtgagtggcagcgtggctggcgacttcgtgaagaaggccaccgccttcctgcagaggccttctcgggccggctcgctgggccccgagacacccagcagggtgggcatgaaggtccccacgatcagcgtgacctccttccattcccagtcgtcctacatcagcagcgacaatgattcggagctcgaggatgctgacataaagaaggagctgcagagtctgcgggagaagcacctgaaggagatctcggagctgcagagccagcagaagcaggagatcgaagctctgtaccgccgcctgggcaagccactgccccccaacgtgggcttcttccacacggcaccccccactggccgccggagaaaaaccagcaagagcaagctgaaggcaggcaagctgctaaatcccctggtgcggcagctcaaggtcgtggcctccagcacaggtcacttggctgactccagcagaggccctcccgctaaggaccctgcccaagccagtgtggggctcactgcagacagcacgggcctgagcgggaaggcagtgcagacccagcagccctgctccgtccgggcctccctgtcttcggacatctgctccggcttagccagtgatggaggcggagcgcgtggccaaggctggacggtttaccacccaacgtctgagagagtgacctataagtctagtagcaaacctcgtgctcgattcctcagtggacccgtatctgtgtccatctggtctgccctgaagcgtctctgcctaggcaaagaacacagcagtaggtcctccaccagcagcctggccccaggccctgagccaggcccccagcccgccctgcacgtccaggcgcaggtgaacaacagcaacaacaagaagggtaccttcacggacgacctgcacaagctggtggacgagtggacgagcaagacggtgggggccgcgcagctgaagcccacgctcaaccagctgaagcagacccagaagctgcaagacatggaggcccaggcaggctgggctgcccctggcgaggcgcgggctatgaccgcacctcgagcaggagtggggatgccacgtctgcccccagcgcccggccctctgtccaccacggtcattcccggagccgccccgaccctgtccgtgcccacaccaggttcctgtggtccacgcgccgtctccacacccacttcctatacttga

SEQ ID NO: 34465 - DNA, 11341 bp, Homo sapiens
  source 1..11341: mol_type = unassigned DNA
ctcagctccgggccgagcgcgagcttgggctcgtaccccgctcccctctctccgcccgctctttacctaccggccgtagctggcccggtgggctcgcggggagacgctcgcgcgcgcaagcgcacacgacgcggagcggagctcgagacatcgaggagaggagtaagaagcatcggaggaggcgatcgaggaggaggcggtgtgtgtgtatgtgtctattctacggtgtggctcgtcgtggggcgagaggaggctcgagagagggcgagggagaagcgaaaagagtaagagagtcttcctttgcgagagcctctaatctggttgctatggaaatacatgaccacgcaaaaggaagtccattctgataattctgatacctgagatgtaactggactgaagagtagaaacaggaaaaattttagtgccaactttaattacaatggccactgattcaggggatccagccagcacagaagattctgagaaacctgatggaatttcatttgaaaacagagttccccaggtcgctgcaactttgacagtagaagctagactaaaggagaaaaacagtaccttctctgcttctggggaaactgtagaaaggaagagatttttccgaaagagtgttgaaatgacggaagatgacaaagttgccgaatcatcccccaaagatgagagaattaaggctgcaatgaatattccaagagtagataagcttccttcaaatgtgttgagaggtggacaagaagttaaatatgaacagtgttcaaagtcaacctcagaaatctcaaaagattgtttcaaggagaaaaatgaaaaggaaatggaagaagaagcagaaatgaaggctgtagctacttctcctagtggcagattcctgaaatttgacatagaactaggaagaggagcatttaaaacagtatataaaggactggacactgaaacatgggttgaggttgcttggtgtgagctgcaggaccgaaagttaaccaaagctgagcagcaaagattcaaggaagaagcagagatgttgaagggtctccagcaccccaatatagttcgattttatgattcctgggaatctatattaaaaggaaagaaatgtattgtattagtgactgaactaatgacatctgggaccttaaagacgtacttaaaacgatttaaagtcatgaaaccaaaggtcttaaggagctggtgcaggcaaattttaaaggggttgcagttcttgcacactaggactcctcctattattcaccgggatctgaagtgtgacaatattttcatcacgggacccactggatctgtgaagattggtgatctaggattagccaccttaatgcgtacctcatttgctaagagtgtcattggaactcctgagtttatggctccagagatgtatgaagaacactatgatgaatccgtagatgtttatgcttttggaatgtgtatgctggaaatggccacatcggagtatccttattctgagtgtcagaatgcagctcaaatataccggaaagtaactagtggcataaaaccagccagcttcaataaagtcactgatcctgaagtcaaagaaatcattgaaggatgtattcgtcaaaacaaatctgaaaggttgtctatcagggacctattaaaccatgcattttttgctgaggatacaggactgagggtggagttagcagaagaagatgattgctcaaattcatcccttgctttaagactctgggttgaagaccctaaaaaattgaaaggcaaacacaaagacaatgaagctattgaatttagtttcaacttagaaacagatacacctgaggaagtagcatatgaaatggtcaagtctgggttcttccatgaaagtgattccaaagctgttgctaaatccattagagaccgggtgacgccaataaagaagacaagagagaagaagcctgctggctgtttggaagaacgcagggattctcagtgcaagtctatggggaatgtattccctcagccccagaatacaactttaccccttgctcccgctcagcaaactggggctgaatgtgaagaaactgaagttgatcaacatgttagacaacagcttctacaaagaaaaccacagcagcactgctcctctgttacaggtgacaatttgtctgaggcaggagctgcatcagttatacattcagatacttcaagtcagcccagtgtagcctattcctcaaatcaaacgatgggctctcaaatggtttctaatatcccgcaggctgaagtaaatgttccagggcaaatttattcatctcagcaactagtaggacattaccagcaagtttcagggttacagaagcattcaaagctgactcagccgcagattttgcctttggttcaaggtcagtccactgttttacctgtacatgtccttggaccgacagttgtttcacaaccccaggtttccccattaactgttcagaaggtcccacagataaagcctgtatcccaaccagttggagctgaacaacaagcagctcttctaaaaccagatttagttcgaagcttgaatcaagatgtggcaactacgaaggaaaacgtcagtagccctgataacccaagtggaaatggcaaacaggatcggatcaaacagagaagagcttcctgtccccgaccagagaaggggactaaatttcagcttaccgtccttcaggtatcaacctctggagataacatggtagagtgtcagctggagacacacaacaacaagatggtcaccttcaagtttgatgttgatggtgatgcgccagaggatattgcagactatatggttgaagataactttgtgctggaaagtgagaaagaaaaatttgtagaagaattgagagctattgtaggtcaagcccaggagatccttcatgtccactttgccacagaaagagccactggagttgattctattactgtggactccaacagtagccagacagggtcatctgaacaagtacagataaattctacatctactcaaaccagcaatgaatctgctcctcagtcatccccagttggtcggtggcgattctgtatcaatcagacgataagaaaccgtgagactcagtctcctccttctcttcagcattccatgtctgcggttcctggccgacatccacttcctagtccaaaaaacacaagtaataaggaaatatcacgggacacattgctcactatagaaaataatccatgccaccgtgcacttttcacctccaaatcagaacacaaggatgtggttgatggtaagatttctgaatgtgctagtgtagaaaccaagcagccagctatactttatcaagtggaagataacaggcagataatggcaccagttactaatagttccagttactctactacttcagttcgtgcagttccagctgaatgtgagggactcaccaaacaagcaagcatattcatacctgtgtatccatgtcaccaaactgccagtcaggctgatgcacttatgtcccatcctggcgaatcaactcagacttctggtaactctcttacaactctggcatttgatcaaaagcctcaaaccttatcagtacagcagccagctatggatgcagagtttatttctcaagaaggagaaactacagtgaacactgaagcaagttctcctaagacagtcattcccactcagacccctggccttgaaccaactacccttcaacccactactgtcctggaatcagatggagaaagacctccaaaactggagtttgcagacaaccgaattaaaactctggatgaaaaattaagaaacttgctctatcaggagcacagcatctctagcatctatcccgagagtcagaaggatacccaaagcatagactctccattttcttcctctgctgaagataccctctcctgtccagtgacagaagtcatagccatcagtcactgtggaattaaagatagccctgtacaatcccctaatttccaacagacaggctctaagcttctgtccaatgtggctgcaagtcagcctgctaatatatcagtgttcaaaagggacctgaatgtgataacttctgtacccagcgaattgtgtttacatgagatgtcctcagatgcttcacttccaggggatccagaggcctatcctgctgctgtgtcaagcggtggagccattcatctgcagacaggaggtggatattttggcctaagctttacttgtcctagtctcaaaaatcctattagcaagaaatcctggactcgcaaattaaaaagctgggcatacaggctacggcagtcaaccagctttttcaagagatcaaaagtccgtcaagtggaaacagaagagatgagatcagcaattgctcctgatcccattcctctgacacgggagtccacagctgatactagggctttgaatagatgtaaagcgatgagtggatcatttcagcggggtcggttccaggtgattacaattcctcagcagcagtcagcaaaaatgacatcttttggaatagaacacatatcagtgttcagtgagacaaaccattctagtgaagaagcctttattaaaacagcaaagtctcagttggtagaaatagaacctgccacacaaaatccaaaaacttcgttttcttatgagaagttacaagctcttcaggaaacctgtaaagaaaataaaggagttcccaaacaaggtgacaacttcttatctttcagcgcagcttgtgagactgatgtatcttcagtgaccccagaaaaggaatttgaagaaacttcagccacaggaagtagcatgcagtctggatctgaactgttgcttaaagagagagagatattgactgctgggaaacagcctagctctgatagtgaattttcagccagtcttgctggcagtggaaagtcagtggcaaagactggtccagagagtaatcagtgcttaccacaccacgaagaacaagcttatgctcaaacacagagttcactcttctattcgccatcttccccaatgagcagtgatgatgaatcagaaatagaggatgaggacttgaaggtggagcttcaaagattacgagaaaaacacattcaggaggtggtaaatcttcaaacccagcagaataaggagctgcaggagctctatgaacgccttcggtcaattaaagatagcaaaacccaatctactgagattcctttgccacctgcatcaccacgtcgaccaagatctttcaaaagcaaacttcgaagccgcccccagtccttgacacatgtggacaatggcatagttgctacagggaaaagctgccttataaatgagttggaaaatccactgtgtgtggagagtaatgcagcatcatgccaacagtctccagccagtaaaaaagggatgttcacagatgacttacacaagctggtggatgactggacaaaggaagcagtaggaaattctcttattaagccaagtttaaaccaacttaaacaaagtcaacacaaactagagacagaaaactggaataaagtatctgaaaatactccgtctactatgggctacacatcaacatggatttcttctctgtcccaaatccgtggagctgtcccaacttccttgccacaaggactctcactcccttcatttcctgggccattatcatcatatggaatgcctcacgtttgtcagtataatgctgtggcgggggcggggtatccagtacagtgggtaggaatttcaggaacaacacaacaatctgtagtaattcccgcccaatctgggggaccattccagccagggatgaatatgcaggcatttccaacttcatcagtgcagaatcctgccacaatccctcctggtcctaaatgaatcagagtagatggtgataaaaagggaggttttttcagaattattttcaggacacccaagatattaaagtttcttcctcttgggttctgtcatattttccctcatttgagtttactttagactatatattttttgttccagtgtggtatttgatacagctcatcattctgtagaaatgtgcagtttgcagatagaacactgcacacagaaatgttttttcacttcaaattctatcctctttgatacttgattttttaaaaatactgttcagaatgctttaataagctcagcttgagcattaccatttccaggacactttccatgaattgttgagaagctccccatcccccgccttttttttttttttttttaactgctgctatctgcagctggatactcttctttaaaaatgtttaaaaattatttagattgattctccccaaatgtggatgaactgagaccctccatcagccagagtcttatgggatcttcacttcacatgtttgtcttaggtttacctttcacagaaggcagggtaacttgctgcaggaaacgttttggtgtataaaattagaatcacttttttttttttttttgagatggagtctctctctgtcacccaggttggagtgcagtggtgtgatcttggctcactgctgcaacctccccctcctgggttcaagcgattctcctgcctcagcctcctgagtagctgggactacaggcgccagccaccatgcctggctaatttttgtatttttagtagaggatggggtttcactatgttggccagactggtctcaaactcctaaccttgtgatccgccctccttagcccccccaaaaaattacaataattttgtcaaccaatacagaacatgagccctttttaaatgtgatttcccgtcatcacagcagtaggatgaagccttgttttgggtgagacagagggaaagggaaaaaacagaattgtaacagttccttgattctgcagatactgctgctgttttacgatttcagtaataattcaaagcagctgtctccttgtttctcacatgcatactacattggttttgagcatctgagaggcattggtttgtcttgcattcttttgcaaggcatatattgcagctgatatgaatctcgtttggggggaatccttgtattcctaacaagggggattaaagctacacctcaatccattcttctgaagtgaaatttacttgacacagtaggtttcgagacttacatatgaaacactggctttacagggttctcagagatgtggggtatacactgtcctgcagtgagatagtagaccctagaaggatactatttaagttgtccttagctctttttaattacaatttttagttgttagaatttctttttagtatctatagtatcttagatgattttagatcttaaatgagtttggcagcctctttagaatctgagagagatcactgtcaagttgcactttactgggttttatccagttttaggaggaggggaggcaatgtcaaaatgtacacctttggtttttaagaaggttaactataataatgttaaaggctagtcacagggttacctaatgctcagtctgtgaaacctaaatagaattcttaaaatgttatttaccaactaagtattcatgttcaaattacttaccttccactctgaagactttaaggtcatttctaatacacatttacctaattaggagttctgtctactagtaaacattccaaattgctacccaacattactgttaacagattttcctccgtattcttctaaaaattataccccatgggcttgccaggtaatgacgaaaacttaatgggtgtacttttttttttttttgcacagtctactttgtgacattaagtacctcttttccaaaaaaaaaaaaaaatgtgttttatgttgcttacctgaggatcacatccattatcaagaagattctgtcgctataatttgaggcatctagggcagcattttgagaattgctgttgataagatccactgtttcttttcatagaacatgatctgttttgtatgagtctttccaaatgttaagtacagattcttcaaatttcttgtacagtattggtttgcagtttaaagtgattttaggacattagtgtaatgcaaatgcttgcattgcactgttttccatatgtataaaaacaatgctcctaaaatccctaattctttaaaactgcctgtgtttcattataaaaagttggctttgtgtaattacaccgagccatacaacctataaagtgaaaatactgcagattttaggaccccttcttctctagtcacaatcattttaaacagtgtaccccaggatgaaaaaagctccatggctgacatgtacaattacatgtattaatgactgctctacatcctatgttctgcctttggccaccacctctattccacatataattcatcattcttgtttgcctgcagactcttgcagtgccttgtaatatttacaatcttttcaggtttttgctggaaagaaaagtagtcttctaaagtttgaagatggtgaatagtgtactgctgtctccatgctgactgcagtaaccgggttatcatatatgttatgtatacattatgtatatataacatgtgtacatttaaaaatacagaaaaaagtgagcttgtgcagaaatggagaaaacaatgttattctcatcactgtggggttttattaaaattattttttcccatgacttacatgtttggttcagattatagtcactttgactgtaaatactggctagttttctatccagggcttttgcattatttcataattttgctaaatcatataatagtgctattttcatccttgtctgaggtacttttcctccccagaaataattaacttgaggtaaagctcagaaattcccttcttaacaaagagcctactatataaaaagggccttcctttccaaaaaacacacaaacctgtccttttcattttccttcttgtagaggagaaaatggttgtacttaaccatcctgcttgtaaagtttattcagaggatagtctgtatgtccagccaccatgtttacttctcaaagtgcaagtctgatgaatagtactgtatctccatatgtggtaatgtgagcatttcatcatgaagtacctgctgctatgtctgtgaagttgggtgtaacatcataagaatatgaaaccagtattggtgtaaatctaatgaaaataaccctatgtatatttgtagcagtcttgaatctctatttaaggtaatttgctgtaatataacaaatattcattctgtttttcatcccttccttgccagttttatatcaagcatgaattccaatggtttgacagcaaaattatctgtgaaagtttaaaaggcacttttctgctgtgatttttggattgagtgtggagtgttatgtacagtttgatgggatatatcattttagaaccccagatttaattctagtccaattaattttgtttaactacctcgttttcagtgctgttttgggtgcacaagtaaacactacctgtgaaacttgcttttttgccttgattctcagtattctttcagattataaatctggtctgcctcttttttcccagtgctagccaacagtttgagatgagagggatcatcactctcatctgtgtttaagtggagagccatgtgcttctgtgaaatatgctttggggatttgggggtggagagcagaagaataattgaaattggtggcaatataggatttaggtgtaggagttagttataaaataaacaaatggtaagaaagtacctgaattagacaatccagtgcctataactttgcattttttattagagatgcatttctcgtctgtgtgcctaaagggcaatgggttgaaattgctttaactaccacagcgaaatatttgacaaatccttcagcaatggcctatcattcaacatatattagcacagtgctaggtatttgcagtggtattttgttaccttaaaacggccaaatgcatttagttgaaatgtagttgatagtaagggttttatataactttatccaatctctaaagtttatggaagcattgactttcttctttgctgtcttttctgagtgatgaaaatgatgcattccttttttttccttgaaaactcagcaaatgtttgtaaccagatgttccttgtttcacatgtttactgtgtaacactacagcatatttaatattggtaaatactgtatttcagtcattatgcataagtacattcctgaggtatatttgccatcattttgggattcagttattttatcttctgtttgggtcagaaaaacttgaactatctgaggtggtatgcaggccattttctagaagattgttttttgaatctgtagtttatcaaggacttgttccccccctccctttgtttagaagaggaatcagaaaaggggggtggtgtgtagaaaaggcctttgatttgataggtgtaatttctaagattgaaattttaaaaatgcagatcgtaagatagtaacactcaaacttgataaaatcctttgaattgaaattagtatgaaatttttatggaaccaaatgccttcaggtcaccctggaaatagtctttgtatgtgaaagatcaacacaaacattggtcaggaaccctgacagccaatatatgaaggagcctgggatagtaactaggttacactaaagttattttcaactaagatagctagacgagtgtacaaaccaatagctcctattctggaaggttttctttttattaaaaaaaattcaaacaaggttaaaagtcaagcaagaagggaagagagaaactgggttctgagaaaaaaatgtgccagtataaaataaactcctaaatgcgtgcttgtcatcctctagtttttttttaagttgaatttcttttccactgtaacttaagatttgagattgaggtttgcggtccagaacataccctcagcagatacagtgactaactggaaagtgcagttgttcaaggtctgtcatgctcaatcacctaaagctataatttgtttgatatattaagcatgtagacctagtgcagcatgggagccactcaggaagtttatgcaattaataaactttcagcataatttactatgaagtatgcagaatttcaccctcttctccacacttaacatttagttgtatatgtgaactctcctttcttaattggggaatgtagcattatatagaatgttgttaaagttaattttaatcctttttgacattaacctttttttttttttggtaaaccaagtgatctgcctttcagcaactgtcttattttggttctttgaaactgtgatttttatttcatttgtacccaaccattgtaagtattttgttttgtttcctggaaattctgttttgaaacagaaaataaaggctgtgttaaatgagtatgttatcttattaaaatgctgccatagtcactgc

SEQ ID NO: 34466 - DNA, 5403 bp, Homo sapiens
  source 1..5403: mol_type = unassigned DNA
atggccactgattcaggggatccagccagcacagaagattctgagaaacctgatggaatttcatttgaaaacagagttccccaggtcgctgcaactttgacagtagaagctagactaaaggagaaaaacagtaccttctctgcttctggggaaactgtagaaaggaagagatttttccgaaagagtgttgaaatgacggaagatgacaaagttgccgaatcatcccccaaagatgagagaattaaggctgcaatgaatattccaagagtagataagcttccttcaaatgtgttgagaggtggacaagaagttaaatatgaacagtgttcaaagtcaacctcagaaatctcaaaagattgtttcaaggagaaaaatgaaaaggaaatggaagaagaagcagaaatgaaggctgtagctacttctcctagtggcagattcctgaaatttgacatagaactaggaagaggagcatttaaaacagtatataaaggactggacactgaaacatgggttgaggttgcttggtgtgagctgcaggaccgaaagttaaccaaagctgagcagcaaagattcaaggaagaagcagagatgttgaagggtctccagcaccccaatatagttcgattttatgattcctgggaatctatattaaaaggaaagaaatgtattgtattagtgactgaactaatgacatctgggaccttaaagacgtacttaaaacgatttaaagtcatgaaaccaaaggtcttaaggagctggtgcaggcaaattttaaaggggttgcagttcttgcacactaggactcctcctattattcaccgggatctgaagtgtgacaatattttcatcacgggacccactggatctgtgaagattggtgatctaggattagccaccttaatgcgtacctcatttgctaagagtgtcattggaactcctgagtttatggctccagagatgtatgaagaacactatgatgaatccgtagatgtttatgcttttggaatgtgtatgctggaaatggccacatcggagtatccttattctgagtgtcagaatgcagctcaaatataccggaaagtaactagtggcataaaaccagccagcttcaataaagtcactgatcctgaagtcaaagaaatcattgaaggatgtattcgtcaaaacaaatctgaaaggttgtctatcagggacctattaaaccatgcattttttgctgaggatacaggactgagggtggagttagcagaagaagatgattgctcaaattcatcccttgctttaagactctgggttgaagaccctaaaaaattgaaaggcaaacacaaagacaatgaagctattgaatttagtttcaacttagaaacagatacacctgaggaagtagcatatgaaatggtcaagtctgggttcttccatgaaagtgattccaaagctgttgctaaatccattagagaccgggtgacgccaataaagaagacaagagagaagaagcctgctggctgtttggaagaacgcagggattctcagtgcaagtctatggggaatgtattccctcagccccagaatacaactttaccccttgctcccgctcagcaaactggggctgaatgtgaagaaactgaagttgatcaacatgttagacaacagcttctacaaagaaaaccacagcagcactgctcctctgttacaggtgacaatttgtctgaggcaggagctgcatcagttatacattcagatacttcaagtcagcccagtgtagcctattcctcaaatcaaacgatgggctctcaaatggtttctaatatcccgcaggctgaagtaaatgttccagggcaaatttattcatctcagcaactagtaggacattaccagcaagtttcagggttacagaagcattcaaagctgactcagccgcagattttgcctttggttcaaggtcagtccactgttttacctgtacatgtccttggaccgacagttgtttcacaaccccaggtttccccattaactgttcagaaggtcccacagataaagcctgtatcccaaccagttggagctgaacaacaagcagctcttctaaaaccagatttagttcgaagcttgaatcaagatgtggcaactacgaaggaaaacgtcagtagccctgataacccaagtggaaatggcaaacaggatcggatcaaacagagaagagcttcctgtccccgaccagagaaggggactaaatttcagcttaccgtccttcaggtatcaacctctggagataacatggtagagtgtcagctggagacacacaacaacaagatggtcaccttcaagtttgatgttgatggtgatgcgccagaggatattgcagactatatggttgaagataactttgtgctggaaagtgagaaagaaaaatttgtagaagaattgagagctattgtaggtcaagcccaggagatccttcatgtccactttgccacagaaagagccactggagttgattctattactgtggactccaacagtagccagacagggtcatctgaacaagtacagataaattctacatctactcaaaccagcaatgaatctgctcctcagtcatccccagttggtcggtggcgattctgtatcaatcagacgataagaaaccgtgagactcagtctcctccttctcttcagcattccatgtctgcggttcctggccgacatccacttcctagtccaaaaaacacaagtaataaggaaatatcacgggacacattgctcactatagaaaataatccatgccaccgtgcacttttcacctccaaatcagaacacaaggatgtggttgatggtaagatttctgaatgtgctagtgtagaaaccaagcagccagctatactttatcaagtggaagataacaggcagataatggcaccagttactaatagttccagttactctactacttcagttcgtgcagttccagctgaatgtgagggactcaccaaacaagcaagcatattcatacctgtgtatccatgtcaccaaactgccagtcaggctgatgcacttatgtcccatcctggcgaatcaactcagacttctggtaactctcttacaactctggcatttgatcaaaagcctcaaaccttatcagtacagcagccagctatggatgcagagtttatttctcaagaaggagaaactacagtgaacactgaagcaagttctcctaagacagtcattcccactcagacccctggccttgaaccaactacccttcaacccactactgtcctggaatcagatggagaaagacctccaaaactggagtttgcagacaaccgaattaaaactctggatgaaaaattaagaaacttgctctatcaggagcacagcatctctagcatctatcccgagagtcagaaggatacccaaagcatagactctccattttcttcctctgctgaagataccctctcctgtccagtgacagaagtcatagccatcagtcactgtggaattaaagatagccctgtacaatcccctaatttccaacagacaggctctaagcttctgtccaatgtggctgcaagtcagcctgctaatatatcagtgttcaaaagggacctgaatgtgataacttctgtacccagcgaattgtgtttacatgagatgtcctcagatgcttcacttccaggggatccagaggcctatcctgctgctgtgtcaagcggtggagccattcatctgcagacaggaggtggatattttggcctaagctttacttgtcctagtctcaaaaatcctattagcaagaaatcctggactcgcaaattaaaaagctgggcatacaggctacggcagtcaaccagctttttcaagagatcaaaagtccgtcaagtggaaacagaagagatgagatcagcaattgctcctgatcccattcctctgacacgggagtccacagctgatactagggctttgaatagatgtaaagcgatgagtggatcatttcagcggggtcggttccaggtgattacaattcctcagcagcagtcagcaaaaatgacatcttttggaatagaacacatatcagtgttcagtgagacaaaccattctagtgaagaagcctttattaaaacagcaaagtctcagttggtagaaatagaacctgccacacaaaatccaaaaacttcgttttcttatgagaagttacaagctcttcaggaaacctgtaaagaaaataaaggagttcccaaacaaggtgacaacttcttatctttcagcgcagcttgtgagactgatgtatcttcagtgaccccagaaaaggaatttgaagaaacttcagccacaggaagtagcatgcagtctggatctgaactgttgcttaaagagagagagatattgactgctgggaaacagcctagctctgatagtgaattttcagccagtcttgctggcagtggaaagtcagtggcaaagactggtccagagagtaatcagtgcttaccacaccacgaagaacaagcttatgctcaaacacagagttcactcttctattcgccatcttccccaatgagcagtgatgatgaatcagaaatagaggatgaggacttgaaggtggagcttcaaagattacgagaaaaacacattcaggaggtggtaaatcttcaaacccagcagaataaggagctgcaggagctctatgaacgccttcggtcaattaaagatagcaaaacccaatctactgagattcctttgccacctgcatcaccacgtcgaccaagatctttcaaaagcaaacttcgaagccgcccccagtccttgacacatgtggacaatggcatagttgctacagggaaaagctgccttataaatgagttggaaaatccactgtgtgtggagagtaatgcagcatcatgccaacagtctccagccagtaaaaaagggatgttcacagatgacttacacaagctggtggatgactggacaaaggaagcagtaggaaattctcttattaagccaagtttaaaccaacttaaacaaagtcaacacaaactagagacagaaaactggaataaagtatctgaaaatactccgtctactatgggctacacatcaacatggatttcttctctgtcccaaatccgtggagctgtcccaacttccttgccacaaggactctcactcccttcatttcctgggccattatcatcatatggaatgcctcacgtttgtcagtataatgctgtggcgggggcggggtatccagtacagtgggtaggaatttcaggaacaacacaacaatctgtagtaattcccgcccaatctgggggaccattccagccagggatgaatatgcaggcatttccaacttcatcagtgcagaatcctgccacaatccctcctggtcctaaatga

SEQ ID NO: 34467 - DNA, 11172 bp, Homo sapiens
  source 1..11172: mol_type = unassigned DNA
ctcagctccgggccgagcgcgagcttgggctcgtaccccgctcccctctctccgcccgctctttacctaccggccgtagctggcccggtgggctcgcggggagacgctcgcgcgcgcaagcgcacacgacgcggagcggagctcgagacatcgaggagaggagtaagaagcatcggaggaggcgatcgaggaggaggcggtgtgtgtgtatgtgtctattctacggtgtggctcgtcgtggggcgagaggaggctcgagagagggcgagggagaagcgaaaagagtaagagagtcttcctttgcgagagcctctaatctggttgctatggaaatacatgaccacgcaaaaggaagtccattctgataattctgatacctgagatgtaactggactgaagagtagaaacaggaaaaattttagtgccaactttaattacaatggccactgattcaggggatccagccagcacagaagattctgagaaacctgatggaatttcatttgaaaacagagttccccaggtcgctgcaactttgacagtagaagctagactaaaggagaaaaacagtaccttctctgcttctggggaaactgtagaaaggaagagatttttccgaaagagtgttgaaatgacggaagatgacaaagttgccgaatcatcccccaaagatgagagaattaaggctgcaatgaatattccaagagtagataagcttccttcaaatgtgttgagaggtggacaagaagttaaatatgaacagtgttcaaagtcaacctcagaaatctcaaaagattgtttcaaggagaaaaatgaaaaggaaatggaagaagaagcagaaatgaaggctgtagctacttctcctagtggcagattcctgaaatttgacatagaactaggaagaggagcatttaaaacagtatataaaggactggacactgaaacatgggttgaggttgcttggtgtgagctgcaggaccgaaagttaaccaaagctgagcagcaaagattcaaggaagaagcagagatgttgaagggtctccagcaccccaatatagttcgattttatgattcctgggaatctatattaaaaggaaagaaatgtattgtattagtgactgaactaatgacatctgggaccttaaagacgtacttaaaacgatttaaagtcatgaaaccaaaggtcttaaggagctggtgcaggcaaattttaaaggggttgcagttcttgcacactaggactcctcctattattcaccgggatctgaagtgtgacaatattttcatcacgggacccactggatctgtgaagattggtgatctaggattagccaccttaatgcgtacctcatttgctaagagtgtcattggaactcctgagtttatggctccagagatgtatgaagaacactatgatgaatccgtagatgtttatgcttttggaatgtgtatgctggaaatggccacatcggagtatccttattctgagtgtcagaatgcagctcaaatataccggaaagtaactagtggcataaaaccagccagcttcaataaagtcactgatcctgaagtcaaagaaatcattgaaggatgtattcgtcaaaacaaatctgaaaggttgtctatcagggacctattaaaccatgcattttttgctgaggatacaggactgagggtggagttagcagaagaagatgattgctcaaattcatcccttgctttaagactctgggttgaagaccctaaaaaattgaaaggcaaacacaaagacaatgaagctattgaatttagtttcaacttagaaacagatacacctgaggaagtagcatatgaaatggtcaagtctgggttcttccatgaaagtgattccaaagctgttgctaaatccattagagaccgggtgacgccaataaagaagacaagagagaagaagcctgctggctgtttggaagaacgcagggattctcagtgcaagtctatggggaatgtattccctcagccccagaatacaactttaccccttgctcccgctcagcaaactggggctgaatgtgaagaaactgaagttgatcaacatgttagacaacagcttctacaaagaaaaccacagcagcactgctcctctgttacaggtgacaatttgtctgaggcaggagctgcatcagttatacattcagatacttcaagtcagcccagtgtagcctattcctcaaatcaaacgatgggctctcaaatggtttctaatatcccgcaggctgaagtaaatgttccagggcaaatttattcatctcagcaactagtaggacattaccagcaagtttcagggttacagaagcattcaaagctgactcagccgcagattttgcctttggttcaaggtcagtccactgttttacctgtacatgtccttggaccgacagttgtttcacaaccccaggtttccccattaactgttcagaaggtcccacagataaagcctgtatcccaaccagttggagctgaacaacaagcagctcttctaaaaccagatttagttcgaagcttgaatcaagatgtggcaactacgaaggaaaacgtcagtagccctgataacccaagtggaaatggcaaacaggatcggatcaaacagagaagagcttcctgtccccgaccagagaaggggactaaatttcagcttaccgtccttcaggtatcaacctctggagataacatggtagagtgtcagctggagacacacaacaacaagatggtcaccttcaagtttgatgttgatggtgatgcgccagaggatattgcagactatatggttgaagataactttgtgctggaaagtgagaaagaaaaatttgtagaagaattgagagctattgtaggtcaagcccaggagatccttcatgtccactttgccacagaaagagccactggagttgattctattactgtggactccaacagtagccagacagggtcatctgaacaagtacagataaattctacatctactcaaaccagcaatgaatctgctcctcagtcatccccagttggtcggtggcgattctgtatcaatcagacgataagaaaccgtgagactcagtctcctccttctcttcagcattccatgtctgcggttcctggccgacatccacttcctagtccaaaaaacacaagtaataaggaaatatcacgggacacattgctcactatagaaaataatccatgccaccgtgcacttttcacctccaaatcagaacacaaggatgtggttgatggtaagatttctgaatgtgctagtgtagaaaccaagcagccagctatactttatcaagtggaagataacaggcagataatggcaccagttactaatagttccagttactctactacttcagttcgtgcagttccagctgaatgtgagggactcaccaaacaagcaagcatattcatacctgtgtatccatgtcaccaaactgccagtcaggctgatgcacttatgtcccatcctggcgaatcaactcagacttctggtaactctcttacaactctggcatttgatcaaaagcctcaaaccttatcagtacagcagccagctatggatgcagagtttatttctcaagaaggagaaactacagtgaacactgaagcaagttctcctaagacagtcattcccactcagacccctggccttgaaccaactacccttcaacccactactgtcctggaatcagatggagaaagacctccaaaactggagtttgcagacaaccgaattaaaactctggatgaaaaattaagaaacttgctctatcaggagcacagcatctctagcatctatcccgagagtcagaaggatacccaaagcatagactctccattttcttcctctgctgaagataccctctcctgtccagtgacagaagtcatagccatcagtcactgtggaattaaagatagccctgtacaatcccctaatttccaacagacaggctctaagcttctgtccaatgtggctgcaagtcagcctgctaatatatcagtgttcaaaagggacctgaatgtgataacttctgtacccagcgaattgtgtttacatgagatgtcctcagatgcttcacttccaggggatccagaggcctatcctgctgctgtgtcaagcggtggagccattcatctgcagacaggagtggaaacagaagagatgagatcagcaattgctcctgatcccattcctctgacacgggagtccacagctgatactagggctttgaatagatgtaaagcgatgagtggatcatttcagcggggtcggttccaggtgattacaattcctcagcagcagtcagcaaaaatgacatcttttggaatagaacacatatcagtgttcagtgagacaaaccattctagtgaagaagcctttattaaaacagcaaagtctcagttggtagaaatagaacctgccacacaaaatccaaaaacttcgttttcttatgagaagttacaagctcttcaggaaacctgtaaagaaaataaaggagttcccaaacaaggtgacaacttcttatctttcagcgcagcttgtgagactgatgtatcttcagtgaccccagaaaaggaatttgaagaaacttcagccacaggaagtagcatgcagtctggatctgaactgttgcttaaagagagagagatattgactgctgggaaacagcctagctctgatagtgaattttcagccagtcttgctggcagtggaaagtcagtggcaaagactggtccagagagtaatcagtgcttaccacaccacgaagaacaagcttatgctcaaacacagagttcactcttctattcgccatcttccccaatgagcagtgatgatgaatcagaaatagaggatgaggacttgaaggtggagcttcaaagattacgagaaaaacacattcaggaggtggtaaatcttcaaacccagcagaataaggagctgcaggagctctatgaacgccttcggtcaattaaagatagcaaaacccaatctactgagattcctttgccacctgcatcaccacgtcgaccaagatctttcaaaagcaaacttcgaagccgcccccagtccttgacacatgtggacaatggcatagttgctacagatccactgtgtgtggagagtaatgcagcatcatgccaacagtctccagccagtaaaaaagggatgttcacagatgacttacacaagctggtggatgactggacaaaggaagcagtaggaaattctcttattaagccaagtttaaaccaacttaaacaaagtcaacacaaactagagacagaaaactggaataaagtatctgaaaatactccgtctactatgggctacacatcaacatggatttcttctctgtcccaaatccgtggagctgtcccaacttccttgccacaaggactctcactcccttcatttcctgggccattatcatcatatggaatgcctcacgtttgtcagtataatgctgtggcgggggcggggtatccagtacagtgggtaggaatttcaggaacaacacaacaatctgtagtaattcccgcccaatctgggggaccattccagccagggatgaatatgcaggcatttccaacttcatcagtgcagaatcctgccacaatccctcctggtcctaaatgaatcagagtagatggtgataaaaagggaggttttttcagaattattttcaggacacccaagatattaaagtttcttcctcttgggttctgtcatattttccctcatttgagtttactttagactatatattttttgttccagtgtggtatttgatacagctcatcattctgtagaaatgtgcagtttgcagatagaacactgcacacagaaatgttttttcacttcaaattctatcctctttgatacttgattttttaaaaatactgttcagaatgctttaataagctcagcttgagcattaccatttccaggacactttccatgaattgttgagaagctccccatcccccgccttttttttttttttttttaactgctgctatctgcagctggatactcttctttaaaaatgtttaaaaattatttagattgattctccccaaatgtggatgaactgagaccctccatcagccagagtcttatgggatcttcacttcacatgtttgtcttaggtttacctttcacagaaggcagggtaacttgctgcaggaaacgttttggtgtataaaattagaatcacttttttttttttttttgagatggagtctctctctgtcacccaggttggagtgcagtggtgtgatcttggctcactgctgcaacctccccctcctgggttcaagcgattctcctgcctcagcctcctgagtagctgggactacaggcgccagccaccatgcctggctaatttttgtatttttagtagaggatggggtttcactatgttggccagactggtctcaaactcctaaccttgtgatccgccctccttagcccccccaaaaaattacaataattttgtcaaccaatacagaacatgagccctttttaaatgtgatttcccgtcatcacagcagtaggatgaagccttgttttgggtgagacagagggaaagggaaaaaacagaattgtaacagttccttgattctgcagatactgctgctgttttacgatttcagtaataattcaaagcagctgtctccttgtttctcacatgcatactacattggttttgagcatctgagaggcattggtttgtcttgcattcttttgcaaggcatatattgcagctgatatgaatctcgtttggggggaatccttgtattcctaacaagggggattaaagctacacctcaatccattcttctgaagtgaaatttacttgacacagtaggtttcgagacttacatatgaaacactggctttacagggttctcagagatgtggggtatacactgtcctgcagtgagatagtagaccctagaaggatactatttaagttgtccttagctctttttaattacaatttttagttgttagaatttctttttagtatctatagtatcttagatgattttagatcttaaatgagtttggcagcctctttagaatctgagagagatcactgtcaagttgcactttactgggttttatccagttttaggaggaggggaggcaatgtcaaaatgtacacctttggtttttaagaaggttaactataataatgttaaaggctagtcacagggttacctaatgctcagtctgtgaaacctaaatagaattcttaaaatgttatttaccaactaagtattcatgttcaaattacttaccttccactctgaagactttaaggtcatttctaatacacatttacctaattaggagttctgtctactagtaaacattccaaattgctacccaacattactgttaacagattttcctccgtattcttctaaaaattataccccatgggcttgccaggtaatgacgaaaacttaatgggtgtacttttttttttttttgcacagtctactttgtgacattaagtacctcttttccaaaaaaaaaaaaaaatgtgttttatgttgcttacctgaggatcacatccattatcaagaagattctgtcgctataatttgaggcatctagggcagcattttgagaattgctgttgataagatccactgtttcttttcatagaacatgatctgttttgtatgagtctttccaaatgttaagtacagattcttcaaatttcttgtacagtattggtttgcagtttaaagtgattttaggacattagtgtaatgcaaatgcttgcattgcactgttttccatatgtataaaaacaatgctcctaaaatccctaattctttaaaactgcctgtgtttcattataaaaagttggctttgtgtaattacaccgagccatacaacctataaagtgaaaatactgcagattttaggaccccttcttctctagtcacaatcattttaaacagtgtaccccaggatgaaaaaagctccatggctgacatgtacaattacatgtattaatgactgctctacatcctatgttctgcctttggccaccacctctattccacatataattcatcattcttgtttgcctgcagactcttgcagtgccttgtaatatttacaatcttttcaggtttttgctggaaagaaaagtagtcttctaaagtttgaagatggtgaatagtgtactgctgtctccatgctgactgcagtaaccgggttatcatatatgttatgtatacattatgtatatataacatgtgtacatttaaaaatacagaaaaaagtgagcttgtgcagaaatggagaaaacaatgttattctcatcactgtggggttttattaaaattattttttcccatgacttacatgtttggttcagattatagtcactttgactgtaaatactggctagttttctatccagggcttttgcattatttcataattttgctaaatcatataatagtgctattttcatccttgtctgaggtacttttcctccccagaaataattaacttgaggtaaagctcagaaattcccttcttaacaaagagcctactatataaaaagggccttcctttccaaaaaacacacaaacctgtccttttcattttccttcttgtagaggagaaaatggttgtacttaaccatcctgcttgtaaagtttattcagaggatagtctgtatgtccagccaccatgtttacttctcaaagtgcaagtctgatgaatagtactgtatctccatatgtggtaatgtgagcatttcatcatgaagtacctgctgctatgtctgtgaagttgggtgtaacatcataagaatatgaaaccagtattggtgtaaatctaatgaaaataaccctatgtatatttgtagcagtcttgaatctctatttaaggtaatttgctgtaatataacaaatattcattctgtttttcatcccttccttgccagttttatatcaagcatgaattccaatggtttgacagcaaaattatctgtgaaagtttaaaaggcacttttctgctgtgatttttggattgagtgtggagtgttatgtacagtttgatgggatatatcattttagaaccccagatttaattctagtccaattaattttgtttaactacctcgttttcagtgctgttttgggtgcacaagtaaacactacctgtgaaacttgcttttttgccttgattctcagtattctttcagattataaatctggtctgcctcttttttcccagtgctagccaacagtttgagatgagagggatcatcactctcatctgtgtttaagtggagagccatgtgcttctgtgaaatatgctttggggatttgggggtggagagcagaagaataattgaaattggtggcaatataggatttaggtgtaggagttagttataaaataaacaaatggtaagaaagtacctgaattagacaatccagtgcctataactttgcattttttattagagatgcatttctcgtctgtgtgcctaaagggcaatgggttgaaattgctttaactaccacagcgaaatatttgacaaatccttcagcaatggcctatcattcaacatatattagcacagtgctaggtatttgcagtggtattttgttaccttaaaacggccaaatgcatttagttgaaatgtagttgatagtaagggttttatataactttatccaatctctaaagtttatggaagcattgactttcttctttgctgtcttttctgagtgatgaaaatgatgcattccttttttttccttgaaaactcagcaaatgtttgtaaccagatgttccttgtttcacatgtttactgtgtaacactacagcatatttaatattggtaaatactgtatttcagtcattatgcataagtacattcctgaggtatatttgccatcattttgggattcagttattttatcttctgtttgggtcagaaaaacttgaactatctgaggtggtatgcaggccattttctagaagattgttttttgaatctgtagtttatcaaggacttgttccccccctccctttgtttagaagaggaatcagaaaaggggggtggtgtgtagaaaaggcctttgatttgataggtgtaatttctaagattgaaattttaaaaatgcagatcgtaagatagtaacactcaaacttgataaaatcctttgaattgaaattagtatgaaatttttatggaaccaaatgccttcaggtcaccctggaaatagtctttgtatgtgaaagatcaacacaaacattggtcaggaaccctgacagccaatatatgaaggagcctgggatagtaactaggttacactaaagttattttcaactaagatagctagacgagtgtacaaaccaatagctcctattctggaaggttttctttttattaaaaaaaattcaaacaaggttaaaagtcaagcaagaagggaagagagaaactgggttctgagaaaaaaatgtgccagtataaaataaactcctaaatgcgtgcttgtcatcctctagtttttttttaagttgaatttcttttccactgtaacttaagatttgagattgaggtttgcggtccagaacataccctcagcagatacagtgactaactggaaagtgcagttgttcaaggtctgtcatgctcaatcacctaaagctataatttgtttgatatattaagcatgtagacctagtgcagcatgggagccactcaggaagtttatgcaattaataaactttcagcataatttactatgaagtatgcagaatttcaccctcttctccacacttaacatttagttgtatatgtgaactctcctttcttaattggggaatgtagcattatatagaatgttgttaaagttaattttaatcctttttgacattaacctttttttttttttggtaaaccaagtgatctgcctttcagcaactgtcttattttggttctttgaaactgtgatttttatttcatttgtacccaaccattgtaagtattttgttttgtttcctggaaattctgttttgaaacagaaaataaaggctgtgttaaatgagtatgttatcttattaaaatgctgccatagtcactgcaa

SEQ ID NO: 34468 - DNA, 715 bp, Homo sapiens
  source 1..715: mol_type = unassigned DNA
gggggcgggggagacatgccgtggctgttgcccccgcaacgtaactgggaggccagtatttgtaaatcggtgcttcgacttctaatcccaaagccggcaggttgctatggaaatacatgaccacgcaaaaggaagtccattctgataattctgatacctgagatgtaactggactgaagagtagaaacaggaaaaattttagtgccaactttaattacaatggccactgattcaggggatccagccagcacagaagattctgagaaacctgatggaatttcatttgaaaacagagttccccaggtcgctgcaactttgacagtagaagctagactaaaggagaaaaacagtaccttctctgcttctggggaaactgtagaaaggaagagatttttccgaaagagtgttgaaatgacggaagatgacaaagttgccgaatcatcccccaaagatgagagaattaaggctgcaatgaatattccaagagtagataagcttccttcaaatgtgttgagaggtggacaagaagttaaatatgaacagtgttcaaagtcaacctcagaaatctcaaaagattgtttcaaggagaaaaatgaaaaggaaatggaagaagaagcagaaatgaaggctgtagctacttctcctagtggcagattcctgaaatttgacatagaactaggaagaggagcatttaaaacagtatataaaggactgg

SEQ ID NO: 34469 - DNA, 4155 bp, Homo sapiens
  source 1..4155: mol_type = unassigned DNA
gtccgtctgtcaggccgcctcctctccggccgtctgattttctacccttcggcgccctgctcttcctcatgttggcatccccggccacggagaccaccgtcctcatgtcccagactgaggccgacctggccctgcggcccccgcctcctcttggcaccgcggggcagccccgcctcgggccccctcctcgccgagcgcgccgcttctccgggaaggctgagccccggccgcgctcttctcgtctcagccgccgtagctcagtcgacttggggctgctgagctcttggtccctgccagcctcacccgctccggacccccccgatcctccggactccgctggtcctggccccgcgaggagcccaccgcctagctccaaagaaccccccgagggcacgtggaccgagggagcccctgtgaaggctgcggaagactccgcgcgtcccgagctcccggactctgcagtgggcccggggtccagggagccgctaagggtccctgaagctgtggccctagagcggcggcgggagcaggaagaaaaggaggacatggagacccaggctgtggcaacgtcccccgatggccgatacctcaagtttgacatcgagattggacgtggctccttcaagacggtgtatcgagggctagacaccgacaccacagtggaggtggcctggtgtgagctgcagactcggaaactgtctagagctgagcggcagcgcttctcagaggaggtggagatgctcaaggggctgcagcaccccaacatcgtccgcttctatgattcgtggaagtcggtgctgaggggccaggtttgcatcgtgctggtcaccgaactcatgacctcgggcacgctcaagacgtacctgaggcggttccgggagatgaagccgcgggtccttcagcgctggagccgccaaatcctgcggggacttcatttcctacactcccgggttcctcccatcctgcaccgggatctcaagtgcgacaatgtctttatcacgggacctactggctctgtcaaaatcggggacctgggcctggccacgctcaagcgcgcctcctttgccaagagtgtcatcgggaccccggaattcatggcccccgagatgtacgaggaaaagtacgatgaggccgtggacgtgtacgcgttcggcatgtgcatgctggagatggccacctctgagtacccgtactccgagtgccagaatgccgcgcaaatctaccgcaaggtcacttcgggcagaaagccgaacagcttccacaaggtgaagatacccgaggtgaaggagatcattgaaggctgcatccgcacggataagaacgagaggttcaccatccaggacctcctggcccacgccttcttccgcgaggagcgcggtgtgcacgtggaactagcggaggaggacgacggcgagaagccgggcctcaagctctggctgcgcatggaggacgcgcggcgcggggggcgcccacgggacaaccaggccatcgagttcctgttccagctgggccgggacgcggccgaggaggtggcacaggagatggtggctctgggcttggtctgtgaagccgattaccagccagtggcccgtgcagtacgtgaacgggttgctgccatccagcgaaagcgtgagaagctgcgtaaagcaagggaattggaggcactcccaccagagccaggacctccaccagcaactgtgcccatggcccccggtccccccagtgtcttcccccctgagcctgaggagccagaggcagaccagcaccagcccttccttttccgccacgccagctactcatctaccacttcggattgcgagactgatggctacctcagctcctccggcttcctggatgcctcagaccctgcccttcagccccctgggggggtgccatccagcctggctgagtcccatctctgcctgccctcggcttttgccctatccattccacgttctggccctggaagtgacttttcccccggggacagctatgcctcagatgcagcttcaggccttagcgatgtgggagaagggatgggacaaatgaggagacccccagggaggaatctccggcgcagaccccgatcccggctgcgggtcactagtgtctcagaccagaatgacagagtggttgagtgccagctacagacccataacagcaagatggtgaccttccgatttgatctggatggggacagcccggaagagattgcagctgccatggtatataacgagttcattctgccttcggagcgagatggatttctcagacggattcgggagattatccagcgagtggagaccctgttgaagagagacactggccccatggaggctgctgaagacaccctaagcccccaggaggagccagcaccattacctgccctgcccgtccccctcccagacccatccaatgaagagctccagagcagcacctccctggagcacaggagctggacagccttctccacctcctcatcttctcctggaactcctttgtctcctggaaacccattttcccctggaacccccatttccccaggtcccatcttccccatcacttctcccccatgtcatcccagcccctccccattctcccccatttcttcccaggtctcctcaaatccctctccacaccccaccagctctccacttccattctcctccagcacacccgagtttccggtcccactctctcagtgtccctggagttctctccccacgacttctccacctacgttctctcccacttgttctcaggtcactcttagttcccctttctttcctccgtgcccctccacttcttccttcccctccaccacagcagcccctctcctttctctggctagtgccttctcactggctgtgatgactgtggcccagtccctgctgtccccctcacctgggctcctttcccagtctcctccagcccctcctagtcccctccctagcctgccccttccccctcccgttgctcctggtggccaggaaagcccttcaccccacacagctgaggtggagagtgaggcctcaccacctcctgctcggcccctcccaggggaagccaggctggcgcccatctctgaagagggaaagccgcagcttgttgggcgtttccaagtgacttcatccaaggaaccggctgagcctcttcccttgcagccaacatcccccactctctctggttctccaaaaccttcaacccctcagctcacttcagagagctcagatacagaggacagtgctggaggcgggccagagaccagggaagctctggctgagagcgaccgtgcagctgagggtctgggggctggagttgaggaggaaggagatgatgggaaggaaccccaagttgggggcagcccccaacccctgagccatcccagcccagtgtggatgaactactcctacagcagcctgtgtttgagcagcgaggagtcagaaagcagtggggaagatgaggagttctgggctgagctgcagagtcttcggcagaagcacttgtcagaggtggaaacactacagacactacagaaaaaagaaattgaagatttgtacagccggctggggaagcagcccccaccgggtattgtggccccagctgctatgctgtccagccgccagcgccgcctctccaagggcagcttccccacctcccgccgcaacagcctacagcgctctgagcccccaggccctggcatcatgcgaaggaactctctgagtggcagcagcaccggctcccaggagcagcgggcaagcaagggggtgacattcgccggggatgttggcaggatgtgaattcagaacagaagccatgtatctcccccacaccagggcccaccatggagcttgtgttctcagaatctgatgctttctgatcaacaaaactgagcaaggaagatcccaacactgaaggggtagaaggccaggggggcatggagagtgcagctccattatagtgaagagccaaacatatgtgaactgtttgctgtgtggaggtgttagttctgctgcctaccatcttcatctctagcacctcccctgccaagagtcaaccactaagcaatcccacccaagcctggatgcttctagaggggcccactcccagctgggagagtgtaggggatatgctcacaccacattagcagcaacc

SEQ ID NO: 34470 - DNA, 2213 bp, Homo sapiens
  source 1..2213: mol_type = unassigned DNA
cattcaagatgcaacacaaaagtatttcctctccgaagctctccctcatgcttggggcagttagtcatcccttcctgcgctcccacagcaccttggccgaggccctatctatcaatttacttcccaacccgtttggtaacgtcatgtctatccaccatgccccctgactcagtttctccctggggccgggcagacataggctaggagaatgctggcagaagatgcggaggcggcagcagggtgcggcaggggggaacttcccagtggggggctccttcccggaggacgtgtccccccaccaggactctggctatgcgccctcccccaggtacctgaggcggttccgggagatgaagccgcgggtccttcagcgctggagccgccaaatcctgcggggacttcatttcctacactcccgggttcctcccatcctgcaccgggatctcaagtgcgacaatgtctttatcacgggacctactggctctgtcaaaatcggggacctgggcctggccacgctcaagcgcgcctcctttgccaagagtgtcatcgggaccccggaattcatggcccccgagatgtacgaggaaaagtacgatgaggccgtggacgtgtacgcgttcggcatgtgcatgctggagatggccacctctgagtacccgtactccgagtgccagaatgccgcgcaaatctaccgcaaggtcacttcgggcagaaagccgaacagcttccacaaggtgaagatacccgaggtgaaggagatcattgaaggctgcatccgcacggataagaacgagaggttcaccatccaggacctcctggcccacgccttcttccgcgaggagcgcggtgtgcacgtggaactagcggaggaggacgacggcgagaagccgggcctcaagctctggctgcgcatggaggacgcgcggcgcggggggcgcccacgggacaaccaggccatcgagttcctgttccagctgggccgggacgcggccgaggaggtggcacaggagatggtggctctgggcttggtctgtgaagccgattaccagccagtggcccgtgcagtacgtgaacgggttgctgccatccagcgaaagcgtgagaagctgcgtaaagcaagggaattggaggcactcccaccagagccaggacctccaccagcaactgtgcccatggcccccggtccccccagtgtcttcccccctgagcctgaggagccagaggcagaccagcaccagcccttccttttccgccacgccagctactcatctaccacttcggattgcgagactgatggctacctcagctcctccggcttcctggatgcctcagaccctgcccttcagccccctgggggggtgccatccagcctggctgagtcccatctctgcctgccctcggcttttgccctatccattccacgttctggccctggaagtgacttttcccccggggacagctatgcctcagatgcagcttcaggccttagcgatgtgggagaagggatgggacaaatgaggagacccccagggaggaatctccggcgcagaccccgatcccggctgcgggtcactagtgtctcagaccagaatgacagagtggttgagtgccagctacagacccataacagcaagatggtgaccttccgatttgatctggatggggacagcccggaagagattgcagctgccatggtatataacgagttcattctgccttcggagcgagatggatttctcagacggattcgggagattatccagcgagtggagaccctgttgaagagagacactggccccatggaggctgctgaagacaccctaagcccccaggaggagccagcaccattacctgccctgcccgtccccctcccagacccatccaatgaagagctccagagcagcacctccctggagcacaggagctggacagccttctccacctcctcatcttctcctggaactcctttgtctcctggaaacccattttcccctggaacccccatttccccaggtcccatcgccctacagagggaaagccgcagcttctcacttcagagagctcagatacagaggacagtgctggaggcgggccagagaccagggaagctctggctgagagcgaccgtgcagctgagggtctgggggctggagttgaggaggaaggagatgatgggaaggaaccccaagttgggggcagcccccaacccctga

SEQ ID NO: 34471 - DNA, 1613 bp, Homo sapiens
  source 1..1613: mol_type = unassigned DNA
gaactagcggaggaggacgacggcgagaagccgggcctcaagctctggctgcgcatggaggacgcgcggcgcggggggcgcccacgggacaaccaggccatcgagttcctgttccagctgggccgggacgcggccgaggaggtggcacaggagatggtggctctgggcttggtctgtgaagccgattaccagccagtggcccgtgcagtacgtgaacgggttgctgccatccagcgaaagcgtgagaagctgcgtaaagcaagggaattggaggcactcccaccagagccaggacctccaccagcaactgtgcccatggcccccggtccccccagtgtcttcccccctgagcctgaggagccagaggcagaccagcaccagcccttccttttccgccacgccagctactcatctaccacttgcttttgccctatccattccacgttctggccctggaagtgacttttcccccggggacagctatgcctcagatgcagcttcaggccttagcgatgtgggagaagggatgggacaaatgaggagacccccagggaggaatctccggcgcagaccccgatcccggctgcgggtcactagtgtctcagaccagaatgacagagtggttgagtgccagctacagacccataacagcaagatggtgaccttccgatttgatctggatggggacagcccggaagagattgcagctgccatggtatataacgagttcattctgccttcggagcgagatggatttctcagacggattcgggagattatccagcgagtggagaccctgttgaagagagacactggccccatggaggctgctgaagacaccctaagcccccaggtcagaccccttggtggacacttccaggggaaatggactctctgctccagggtttattactctctgccctcagcggtccccttggatttaactcctcttcatctctgggaccctaaaacagtggcgcttttttttttttttgagatggagtctcactctgtcgcccaggctggagtgcagtggcacgatctcggctcactgcaagctccgcctcccgggttcacgccattctcctgtcccagcctcccgagtagctgggactacaggcgctcgccaccacacccggctaattttttttgtatttttagtagagacagggtttcaccgtgttagccaggctggtctcgatctcctgacctcgtgatccgccctcctcggcctcccaaagtgctgggattacaggtgtgagccaccgtgcctggcctaaaacagtggctcttagcccatttgagaatatgatgaaagccatggactcttgttctagaaaacttgttcaatacatacttttcttttaactcattattttgaaataatttcagacttgtggagagaagttgcaagaattatataaagaaccactggataccctttgcccagatttgccacttgttagtgttttgccaccttagcgtcatcattgtctcttcctctcccctctgtatgtgtgcatacataatatatttttcggaaccacttaagagtaagttgcagacatcatgcccttttacctctatacatttcagcacatatgcttctgaat

SEQ ID NO: 34472 - DNA, 1205 bp, Homo sapiens
  source 1..1205: mol_type = unassigned DNA
gtccaggcatgaggtggttcctgccctggacgctggcagcagtgacagcagcagccgccagcaccgtcctggccacggccctctctccagcccctacgaccatggactttaccccagctccactggaggacacctcctcacgcccccaattctgcaagtggccatgtgagtgcccgccatccccaccccgctgcccgctgggggtcagcctcatcacagatggctgtgagtgctgtaagatgtgcgctcagcagcttggggacaactgcacggaggctgccatctgtgacccccaccggggcctctactgtgactacagcggggaccgcccgaggtacgcaataggagtgtgtgcacatgctgtgggtgaggtggaggcatggcacaggaactgcatagcctacacaagcccctggagcccttgctccaccagctgcggcctgggggtctccactcggatctccaatgttaacgcccagtgctggcctgagcaagagagccgcctctgcaacttgcggccatgcgatgtggacatccatacactcattaaggcagggaagaagtgtctggctgtgtaccagccagaggcatccatgaacttcacacttgcgggctgcatcagcacacgctcctatcaacccaagtactgtggagtttgcatggacaataggtgctgcatcccctacaagtctaagactatcgacgtgtccttccagtgtcctgatgggcttggcttctcccgccaggtcctatggattaatgcctgcttctgtaacctgagctgtaggaatcccaatgacatctttgctgacttggaatcctaccctgacttctcagaaattgccaactaggcaggcacaaatcttgggtcttggggactaacccaatgcctgtgaagcagtcagcccttatggccaataacttttcaccaatgagccttagttaccctgatctggacccttggcctccatttctgtctctaaccattcaaatgacgcctgatggtgctgctcaggcccatgctatgagttttctccttgatatcattcagcatctactctaaagaaaaatgcctgtctctagctgttctggactacacccaagcctgatccagcctttccaagtcactagaagtcctgctggatcttgcctaaatcccaagaaatggaatcaggtagacttttaatatcactaatttcttcttt

SEQ ID NO: 34473 - DNA, 1564 bp, Homo sapiens
  source 1..1564: mol_type = unassigned DNA
atatctggtgctcctgatgggccggccagtctgggcccagctcccccgagaggtggtcggatcctctgggctgctcggtcgatgcctgtgccactgacgtccaggcatgaggtggttcctgccctggacgctggcagcagtgacagcagcagccgccagcaccgtcctggccacggccctctctccagcccctacgaccatggactttaccccagctccactggaggacacctcctcacgcccccaattctgcaagtggccatgtgagtgcccgccatccccaccccgctgcccgctgggggtcagcctcatcacagatggctgtgagtgctgtaagatgtgcgctcagcagcttggggacaactgcacggaggctgccatctgtgacccccaccggggcctctactgtgactacagcggggaccgcccgaggtacgcaataggagtgtgtgcacaggtggtcggtgtgggctgcgtcctggatggggtgcgctacaacaacggccagtccttccagcctaactgcaagtacaactgcacgtgcatcgacggcgcggtgggctgcacaccactgtgcctccgagtgcgccccccgcgtctctggtgcccccacccgcggcgcgtgagcatacctggccactgctgtgagcagtgggtatgtgaggacgacgccaagaggccacgcaagaccgcaccccgtgacacaggagccttcgatgctgtgggtgaggtggaggcatggcacaggaactgcatagcctacacaagcccctggagcccttgctccaccagctgcggcctgggggtctccactcggatctccaatgttaacgcccagtgctggcctgagcaagagagccgcctctgcaacttgcggccatgcgatgtggacatccatacactcattaaggcagggaagaagtgtctggctgtgtaccagccagaggcatccatgaacttcacacttgcgggctgcatcagcacacgctcctatcaacccaagtactgtggagtttgcatggacaataggtgctgcatcccctacaagtctaagactatcgacgtgtccttccagtgtcctgatgggcttggcttctcccgccaggtcctatggattaatgcctgcttctgtaacctgagctgtaggaatcccaatgacatctttgctgacttggaatcctaccctgacttctcagaaattgccaactaggcaggcacaaatcttgggtcttggggactaacccaatgcctgtgaagcagtcagcccttatggccaataacttttcaccaatgagccttagttaccctgatctggacccttggcctccatttctgtctctaaccattcaaatgacgcctgatggtgctgctcaggcccatgctatgagttttctccttgatatcattcagcatctactctaaagaaaaatgcctgtctctagctgttctggactacacccaagcctgatccagcctttccaagtcactagaagtcctgctggatcttgcctaaatcccaagaaatggaatcaggtagacttttaatatcactaatttcttcttt

SEQ ID NO: 34474 - DNA, 630 bp, Homo sapiens
  source 1..630: mol_type = unassigned DNA
ccgagaggtggtcggatcctctgggctgctcggtcgatgcctgtgccactgacgtccaggcatgaggtggttcctgccctggacgctggcagcagtgacagcagcagccgccagcaccgtcctggccacgatgctgtgggtgaggtggaggcatggcacaggaactgcatagcctacacaagcccctggagcccttgctccaccagctgcggcctgggggtctccactcggatctccaatgttaacgcccagtgctggcctgagcaagagagccgcctctgcaacttgcggccatgcgatgtggacatccatacactcattaaggcagggaagaagtgtctggctgtgtaccagccagaggcatccatgaacttcacacttgcgggctgcatcagcacacgctcctatcaacccaagtactgtggagtttgcatggacaataggtgctgcatcccctacaagtctaagactatcgacgtgtccttccagtgtcctgatgggcttggcttctcccgccaggtcctatggattaatgcctgcttctgtaacctgagctgtaggaatcccaatgacatctttgctgacttggaatcctaccctgacttctcagaaattgccaactaggcaggc

SEQ ID NO: 34475 - DNA, 716 bp, Homo sapiens
  source 1..716: mol_type = unassigned DNA
ccgagaggtggtcggatcctctgggctgctcggtcgatgcctgtgccactgacgtccaggcatgaggtggttcctgccctggacgctggcagcagtgacagcagcagccgccagcaccgtcctggccacggccctctctccagcccctacgaccatggactttaccccagctccactggaggacacctcctcacgcccccaattctgcaagtggccatgtgagtgcccgccatccccaccccgctgcccgctgggggtcagcctcatcacagatggctgtgagtgctgtaagatgtgcgctcagcagcttggggacaactgcacggaggctgccatctgtgacccccaccggggcctctactgtgactacagcggggaccgcccgaggtacgcaataggagtgtgtgcacgcagggaagaagtgtctggctgtgtaccagccagaggcatccatgaacttcacacttgcgggctgcatcagcacacgctcctatcaacccaagtactgtggagtttgcatggacaataggtgctgcatcccctacaagtctaagactatcgacgtgtccttccagtgtcctgatgggcttggcttctcccgccaggtcctatggattaatgcctgcttctgtaacctgagctgtaggaatcccaatgacatctttgctgacttggaatcctaccctgacttctcagaaattgccaactaggcaggc

SEQ ID NO: 34476 - DNA, 545 bp, Homo sapiens
  source 1..545: mol_type = unassigned DNA
ctgggcccagctcccccgagaggtggtcggatcctctgggctgctcggtcgatgcctgtgccactgacgtccaggcatgaggtggttcctgccctggacgctggcagcagtgacagcagcagccgccagcaccgtcctggccacggcagggaagaagtgtctggctgtgtaccagccagaggcatccatgaacttcacacttgcgggctgcatcagcacacgctcctatcaacccaagtactgtggagtttgcatggacaataggtgctgcatcccctacaagtctaagactatcgacgtgtccttccagtgtcctgatgggcttggcttctcccgccaggtcctatggattaatgcctgcttctgtaacctgagctgtaggaatcccaatgacatctttgctgacttggaatcctaccctgacttctcagaaattgccaactaggcaggcacaaatcttgggtcttggggactaacccaatgcctgtgaagcagtcagcccttatggccaataacttttcaccaatgagccttagttaccctga

SEQ ID NO: 34477 - DNA, 1403 bp, Homo sapiens
  source 1..1403: mol_type = unassigned DNA
gtgtgtgtgtgtgtgtgagcgcgcgcgcgcgcgcgcgtgtgtactcgtgcgtgtgcctgtgtgtgcctgggagtgacctcacagctgccggaacataaagactcacaggtccgcctcccaggctcaaagctggctctgcaggggacatgagaggcacaccgaagacccacctcctggccttctccctcctctgcctcctctcaaaggtgcgtacccagctgtgcccgacaccatgtacctgcccctggccacctccccgatgcccgctgggagtacccctggtgctggatggctgtggctgctgccgggtatgtgcacggcggctgggggagccctgcgaccaactccacgtctgcgacgccagccagggcctggtctgccagcccggggcaggacccggtggccggggggccctgtgcctcttggcagaggacgacagcagctgtgaggtgaacggccgcctgtatcgggaaggggagaccttccagccccactgcagcatccgctgccgctgcgaggacggcggcttcacctgcgtgccgctgtgcagcgaggatgtgcggctgcccagctgggactgcccccaccccaggagggtcgaggtcctgggcaagtgctgccctgagtgggtgtgcggccaaggagggggactggggacccagccccttccagcccaaggaccccagttttctggccttgtctcttccctgccccctggtgtcccctgcccagaatggagcacggcctggggaccctgctcgaccacctgtgggctgggcatggccacccgggtgtccaaccagaaccgcttctgccgactggagacccagcgccgcctgtgcctgtccaggccctgcccaccctccaggggtcgcagtccacaaaacagtgccttctagagccgggctgggaatggggacacggtgtccaccatccccagctggtggccctgtgcctgggccctgggctgatggaagatggtccgtgcccaggcccttggctgcaggcaacactttagcttgggtccaccatgcagaacaccaatattaacacgctgcctggtctgtctggatcccgaggtatggcagaggtgcaagacctagtcccctttcctctaactcactgcctaggaggctggccaaggtgtccagggtcctctagcccactccctgcctacacacacagcctatatcaaacatgcacacgggcgagctttctctccgacttcccctgggcaagagatgggacaagcagtcccttaatattgaggctgcagcaggtgctgggctggactggccatttttctgggggtaggatgaagagaaggcacacagagattctggatctcctgctgccttttctggagtttgtaaaattgttcctgaatacaagcctatgcgtga

SEQ ID NO: 34478 - DNA, 1518 bp, Homo sapiens
  source 1..1518: mol_type = unassigned DNA
ggagaccttgggtcagctctgcaaaggggttgtttactgaatgcttctggtatctgcagccccgctggggttcggacagggggtctggaatagggcttcacaactacagcagggctaggaccctcttgggctggaaggagctggagaggcctctgcaagctgtcacaggctcttggtgctggcactggctcaggctttcacacacacacacgcgcacacacacacacacacacacacggacaggcacccccttggtggccttcacagtttcaccttcaggtaaatgggctcatcctttgagccatgaggatgggaagcgaagcaaggaatgaaaaagctagtgtgtttgtgtgtgtgtgtgtgtgtgtgtgtgtgtgtgagcgcgcgcgcgcgcgcgcgtgtgtactcgtgcgtgtgcctgtgtgtgcctgggagtgacctcacagctgccggaacataaagactcacaggtccgcctcccaggctcaaagctggctctgcaggggacatgagaggcacaccgaagacccacctcctggccttctccctcctctgcctcctctcaaaggtgcgtacccagctgtgcccgacaccatgtacctgcccctggccacctccccgatgcccgctgggagtacccctggtgctggatggctgtggctgctgccgggtatgtgcacggcggctgggggagccctgcgaccaactccacgtctgcgacgccagccagggcctggtctgccagcccggggcaggacccggtggccggggggccctgtgcctctgtaagcaggaccccagttttctggccttgtctcttccctgccccctggtgtcccctgcccagaatggagcacggcctggggaccctgctcgaccacctgtgggctgggcatggccacccgggtgtccaaccagaaccgcttctgccgactggagacccagcgccgcctgtgcctgtccaggccctgcccaccctccaggggtcgcagtccacaaaacagtgccttctagagccgggctgggaatggggacacggtgtccaccatccccagctggtggccctgtgcctgggccctgggctgatggaagatggtccgtgcccaggcccttggctgcaggcaacactttagcttgggtccaccatgcagaacaccaatattaacacgctgcctggtctgtctggatcccgaggtatggcagaggtgcaagacctagtcccctttcctctaactcactgcctaggaggctggccaaggtgtccagggtcctctagcccactccctgcctacacacacagcctatatcaaacatgcacacgggcgagctttctctccgacttcccctgggcaagagatgggacaagcagtcccttaatattgaggctgcagcaggtgctgggctggactggccatttttctgggggtaggatgaagagaaggcacacagagattctggatctcctgctgccttttctggagtttgtaaaattgttcctgaatacaagcctatgcgtga

SEQ ID NO: 34479 - DNA, 1600 bp, Homo sapiens
  source 1..1600: mol_type = unassigned DNA
ctgggccgcggctacccagagtcagggccacggagcttaggagaccttgggtcagctctgcaaaggggttgtttactgaatgcttctggtatctgcagccccgctggggttcggacagggggtctggaatagggcttcacaactacagcagggctaggaccctcttgggctggaaggagctggagaggcctctgcaagctgtcacaggctcttggtgctggcactggctcaggctttcacacacacacacgcgcacacacacacacacacacacacggacaggcacccccttggtggccttcacagtttcaccttcaggctcaaagctggctctgcaggggacatgagaggcacaccgaagacccacctcctggccttctccctcctctgcctcctctcaaaggtgcgtacccagctgtgcccgacaccatgtacctgcccctggccacctccccgatgcccgctgggagtacccctggtgctggatggctgtggctgctgccgggtatgtgcacggcggctgggggagccctgcgaccaactccacgtctgcgacgccagccagggcctggtctgccagcccggggcaggacccggtggccggggggccctgtgcctcttggcagaggacgacagcagctgtgaggtgaacggccgcctgtatcgggaaggggagaccttccagccccactgcagcatccgctgccgctgcgaggacggcggcttcacctgcgtgccgctgtgcagcgaggatgtgcggctgcccagctgggactgcccccaccccaggagggtcgaggtcctgggcaagtgctgccctgagtgggtgtgcggccaaggagggggactggggacccagccccttccagcccaaggaccccagttttctggccttgtctcttccctgccccctggtgtcccctgcccagaatggagcacggcctggggaccctgctcgaccacctgtgggctgggcatggccacccgggtgtccaaccagaaccgcttctgccgactggagacccagcgccgcctgtgcctgtccaggccctgcccaccctccaggggtcgcagtccacaaaacagtgccttctagagccgggctgggaatggggacacggtgtccaccatccccagctggtggccctgtgcctgggccctgggctgatggaagatggtccgtgcccaggcccttggctgcaggcaacactttagcttgggtccaccatgcagaacaccaatattaacacgctgcctggtctgtctggatcccgaggtatggcagaggtgcaagacctagtcccctttcctctaactcactgcctaggaggctggccaaggtgtccagggtcctctagcccactccctgcctacacacacagcctatatcaaacatgcacacgggcgagctttctctccgacttcccctgggcaagagatgggacaagcagtcccttaatattgaggctgcagcaggtgctgggctggactggccatttttctgggggtaggatgaagagaaggcacacagagattctggatctcctgctgccttttctggagtttgtaaaattgttcctgaatacaagcctatgcgtga

SEQ ID NO: 34480 - DNA, 1235 bp, Homo sapiens
  source 1..1235: mol_type = unassigned DNA
cctgagtcccgggaggaaagtgctcgcccattcctgacctgtgacacgctcactgcgaaggcaggttattagaagagtcccatgaaaggtggctccacggtcccagcgacatgcaggggctcctcttctccactcttctgcttgctggcctggcacagttctgctgcagggtacagggcactggaccattagatacaacacctgaaggaaggcctggagaagtgtcagatgcacctcagcgtaaacagttttgtcactggccctgcaaatgccctcagcagaagccccgttgccctcctggagtgagcctggtgagagatggctgtggatgctgtaaaatctgtgccaagcaaccaggggaaatctgcaatgaagctgacctctgtgacccacacaaagggctgtattgtgactactcagtagacaggcctaggtacgagactggagtgtgtgcataccttgtagctgttgggtgcgagttcaaccaggtacattatcataatggccaagtgtttcagcccaaccccttgttcagctgcctctgtgtgagtggggccattggatgcacacctctgttcataccaaagctggctggcagtcactgctctggagctaaaggtggaaagaagtctgatcagtcaaactgtagcctggaaccattactacagcagctttcaacaagctacaaaacaatgccagcttatagaaatctcccacttatttggaaaaaaaaatgtcttgtgcaagcaacaaaatggactccctgctccagaacatgtgggatgggaatatctaacagggtgaccaatgaaaacagcaactgtgaaatgagaaaagagaaaagactgtgttacattcagccttgcgacagcaatatattaaagacaataaagattcccaaaggaaaaacatgccaacctactttccaactctccaaagctgaaaaatttgtcttttctggatgctcaagtactcagagttacaaacccactttttgtggaatatgcttggataagagatgctgtatccctaataagtctaaaatgattactattcaatttgattgcccaaatgaggggtcatttaaatggaagatgctgtggattacatcttgtgtgtgtcagagaaactgcagagaacctggagatatattttctgagctcaagattctgtaaaaccaagcaaatgggggaaaagttagtcaatcctgtcatataataaaaaaattagtgagt

SEQ ID NO: 34481 - DNA, 2512 bp, Homo sapiens
  source 1..2512: mol_type = unassigned DNA
gtggggtttgcagaggagacaggggagctttgtgtacccggagcaatgaacaagcggcgacttctctacccctcagggtggctccacggtcccagcgacatgcaggggctcctcttctccactcttctgcttgctggcctggcacagttctgctgcagggtacagggcactggaccattagatacaacacctgaaggaaggcctggagaagtgtcagatgcacctcagcgtaaacagttttgtcactggccctgcaaatgccctcagcagaagccccgttgccctcctggagtgagcctggtgagagatggctgtggatgctgtaaaatctgtgccaagcaaccaggggaaatctgcaatgaagctgacctctgtgacccacacaaagggctgtattgtgactactcagtagacaggcctaggtacgagactggagtgtgtgcataccttgtagctgttgggtgcgagttcaaccaggtacattatcataatggccaagtgtttcagcccaaccccttgttcagctgcctctgtgtgagtggggccattggatgcacacctctgttcataccaaagctggctggcagtcactgctctggagctaaaggtggaaagaagtctgatcagtcaaactgtagcctggaaccattactacagcagctttcaacaagctacaaaacaatgccagcttatagaaatctcccacttatttggaaaaaaaaatgtcttgtgcaagcaacaaaatggactccctgctccagaacatgtgggatgggaatatctaacagggtgaccaatgaaaacagcaactgtgaaatgagaaaagagaaaagactgtgttacattcagccttgcgacagcaatatattaaagacaataaagattcccaaaggaaaaacatgccaacctactttccaactctccaaagctgaaaaatttgtcttttctggatgctcaagtactcagagttacaaacccactttttgtggaatatgcttggataagagatgctgtatccctaataagtctaaaatgattactattcaatttgattgcccaaatgaggggtcatttaaatggaagatgctgtggattacatcttgtgtgtgtcagagaaactgcagagaacctggagatatattttctgagctcaagattctgtaaaaccaagcaaatgggggaaaagttagtcaatcctgtcatataataaaaaaattagtgagtataaaatggtggcaaatctactttgtttaaaacagtatgaatgcctattctcagatcactacatttaaggcattagaaacttttaaaaagttatcttaaaaatatacataaaatttgaacaacttaaaaattgaactaatttctaaaatatatcctataattatataatacacagacatttgttaccatctaagcattttgtatatgaaaaaattatgcaatttacaagaaaatattttacaaaataatctggaatacttgctaaagctgtataaaaagtatactaaattttaggctgggcgcagtggttcatgtctgtaatcccagcacttcgggaggccaaggtgggcagatcatttgaggtcaggagtttgagaccagcctggccaacatggtgaaaccctgtctgtaattaaaaaaatacaaaaattagccaagtgtggtggcatgcgcctgtaatcccagctactcgggaggctgagtcagaagaattgcttgaacccaggtggtggaggttgcagtgggtcaagattgcaccactgcactggcacggagaagcgagactcctttgggggagaaaaaaacatactcaatttaaaaaatttaatctatatttgacaatgtagcctaaggtgcccattagttgatacatcattatagggcaagtgaaattctagattaattcttgaacagaaataagattaagctgtaaatatatttagacttttcactgcctgatcttgaatatcagtttcttttggaaaggagaaaatgcaacttttctggccactgttaacaactgcaatctaaaattttttacatcaaatattgtaaaaagttaaatttccaagacaaagaccaagaacagtatcattactttgcaaaggaaagaaatataaagaatacaacttaaaattaacctgtggatctgaaatataaaatgttattaaaaataaattaatgttaaggctagaactgaagattatagtaaccggaacaattatagccatttattgcaaagtttggaagatatcaagcttagtaacattctgttcatttgcataaatgtcatgcagaacaataacaagtagcactgttgaaaaatatagacatttattataaaatcaattggtttgataagaaagcaattatttaaaaagtttaatacaaatacatgttaagtgtacaaattaggattcttttgggcaaacaagttgttatctaaagaagaagcaaaacctccttaacagttgtaataaaacctatgcctgaaaagttggtggctatt

SEQ ID NO: 34482 - DNA, 1062 bp, Homo sapiens
  source 1..1062: mol_type = unassigned DNA
atgaagatatctaggggcagagtgtgcttggagtcagagaacaaggacgctggtgtggctggtcgtaaacagttttgtcactggccctgcaaatgccctcagcagaagccccgttgccctcctggagtgagcctggtgagagatggctgtggatgctgtaaaatctgtgccaagcaaccaggggaaatctgcaatgaagctgacctctgtgacccacacaaagggctgtattgtgactactcagtagacaggcctaggtacgagactggagtgtgtgcatgtaagtctgttgggtgcgagttcaaccaggtacattatcataatggccaagtgtttcagcccaaccccttgttcagctgcctctgtgtgagtggggccattggatgcacacctctgttcataccaaagctggctggcagtcactgctctggagctaaaggtggaaagaagtctgatcagtcaaactgtagcctggaaccattactacagcagctttcaacaagctacaaaacaatgccagcttatagaaatctcccacttatttggaaaaaaaaatgtcttgtgcaagcaacaaaatggactccctgctccagaacatgtgggatgggaatatctaacagggtgaccaatgaaaacagcaactgtgaaatgagaaaagagaaaagactgtgttacattcagccttgcgacagcaatatattaaagacaataaagattcccaaaggaaaaacatgccaacctactttccaactctccaaagctgaaaaatttgtcttttctggatgctcaagtactcagagttacaaacccactttttgtggaatatgcttggataagagatgctgtatccctaataagtctaaaatgattactattcaatttgattgcccaaatgaggggtcatttaaatggaagatgctgtggattacatcttgtgtgtgtcagagaaactgcagagaacctggagatatattttctgagctcaagattctgtaaaaccaagcaaatgggggaaaagttagtcaatcctgtcatataataaaaaaattagtgagtataaaa

SEQ ID NO: 34483 - DNA, 1417 bp, Homo sapiens
  source 1..1417: mol_type = unassigned DNA
cctcctgagtcccgggaggaaagtgctcgcccattcctgacctgtgacacgctcactgcgaaggcaggttattagaagagtcccatgaaagtaaacagggtattaaaacggatccttaaaaatgaaagtgcaggctgaaagttggtagtgtgggaggtagagggtgtgtgttcttgtgcagaggagcgtggggtttgcagaggagacaggggagctttgtgtacccggagcaatgaacaagcggcgacttctctacccctcagggtggctccacggtcccagcgacatgcaggggctcctcttctccactcttctgcttgctggcctggcacagttctgctgcagggtacagggcactggaccattagatacaacacctgaaggaaggcctggagaagtgtcagatgcacctcagcgtaaacagttttgtcactggccctgcaaatgccctcagcagaagccccgttgccctcctggagtgagcctggtgagagatggctgtggatgctgtaaaatctgtgccaagcaaccaggggaaatctgcaatgaagctgacctctgtgacccacacaaagggctgtattgtgactactcagtagacaggcctaggtacgagactggagtgtgtgcataccttgtagctgttgggtgcgagttcaaccaggtacattatcataatggccaagtgtttcagcccaaccccttgttcagctgcctctgtgtgagtggggccattggatgcacacctctgttcataccaaagctggctggcagtcactgctctggagctaaaggtggaaagaagtctgatcagtcaaactgtagcctggaaccattactacagcagctttcaacaagctacaaaacaatgccagcttatagaaatctcccacttatttggaaaaaaaaatgtcttgtgcaagcaacaaaatggactccctgctccagaacatgtgggatgggaatatctaacagggtgaccaatgaaaacagcaactgtgaaatgagaaaagagaaaagactgtgttacattcagccttgcgacagcaatatattaaagacaataaagattcccaaaggaaaaacatgccaacctactttccaactctccaaagctgaaaaatttgtcttttctggatgctcaagtactcagagttacaaacccactttttgtggaatatgcttggataagagatgctgtatccctaataagtctaaaatgattactattcaatttgattgcccaaatgaggggtcatttaaatggaagatgctgtggattacatcttgtgtgtgtcagagaaactgcagagaacctggagatatattttctgagctcaagattctgtaaaaccaagcaaatgggggaaaagttagtcaatcctgtcatataataaaaaaattagtgagtataaaa

SEQ ID NO: 34484 - DNA, 1089 bp, Homo sapiens
  source 1..1089: mol_type = unassigned DNA
acatgcaggggctcctcttctccactcttctgcttgctggcctggcacagttctgctgcagggtacagggcactggaccattagatacaacacctgaaggaaggcctggagaagtgtcagatgcacctcagcgtaaacagttttgtcactggccctgcaaatgccctcagcagaagccccgttgccctcctggagtgagcctggtgagagatggctgtggatgctgtaaaatctgtgccaagcaaccaggggaaatctgcaatgaagctgacctctgtgacccacacaaagggctgtattgtgactactcagtagacaggcctaggtacgagactggagtgtgtgcataccttgtagctgttgggtgcgagttcaaccaggtacattatcataatggccaagtgtttcagcccaaccccttgttcagctgcctctgtgtgagtggggccattggatgcacacctctgttcataccaaagctggctggcagtcactgctctggagctaaaggtggaaagaagtctgatcagtcaaactgtagcctggaaccattactacagcagctttcaacaagctacaaaacaatgccagcttatagaaatctcccacttatttggaaaaaaaatgtcttgtgcaagcaacaaaatggactccctgctccagaacatgtgggatgggaatatctaacagggtgaccaatgaaaacagcaactgtgaaatgagaaaagagaaaagactgtgttacattcagccttgcgacagcaatatattaaagacaataaagattcccaaaggaaaaacatgccaacctactttccaactctccaaagctgaaaaatttgtcttttctggatgctcaagtactcagagttacaaacccactttttgtggaatatgcttggataagagatgctgtatccctaataagtctaaaatgattactattcaatttgattgcccaaatgaggggtcatttaaatggaagatgctgtggattacatcttgtgtgtgtcagagaaactgcagagaacctggagatatattttctgagctcaagattctgtaaaaccaagcaaatgggggaaaagt

SEQ ID NO: 34485 - DNA, 953 bp, Homo sapiens
  source 1..953: mol_type = unassigned DNA
tgtgggaggtagagggtgtgtgcatgtaagtgtcttcttctggacctgctggaaaagattgagtctagacagaatttttttttcctgcaattgttagcttggagtgatcagcttagtttggctaaatatgagaccttgtagctgttgggtgcgagttcaaccaggtacattatcataatggccaagtgtttcagcccaaccccttgttcagctgcctctgtgtgagtggggccattggatgcacacctctgttcataccaaagctggctggcagtcactgctctggagctaaaggtggaaagaagtctgatcagtcaaactgtagcctggaaccattactacagcagctttcaacaagctacaaaacaatgccagatgtgtgccaagcttctaatctgcttcctgcattgaggtctttaaactgttgtctaccttccagcttatagaaatctcccacttatttggaaaaaaaaatgtcttgtgcaagcaacaaaatggactccctgctccagaacatgtgggatgggaatatctaacagggtgaccaatgaaaacagcaactgtgaaatgagaaaagagaaaagactgtgttacattcagccttgcgacagcaatatattaaagacaataaagattcccaaaggaaaaacatgccaacctactttccaactctccaaagctgaaaaatttgtcttttctggatgctcaagtactcagagttacaaacccactttttgtggaatatgcttggataagagatgctgtatccctaataagtctaaaatgattactattcaatttgattgcccaaatgaggggtcatttaaatggaagatgctgtggattacatcttgtgtgtgtcagagaaactgcagagaacctggagatatattttctgagctcaagattctgtaaaaccaagcaaatgggggaaaagttagtcaatcctgtca

SEQ ID NO: 34486 - DNA, 2748 bp, Homo sapiens
  source 1..2748: mol_type = unassigned DNA
ctttaagcgtccacaggcggcggagcggccacaatcacagctccgggcattgggggaacccgagccggctgcgccgggggaatccgtgcgggcgccttccgtcccggtcccatcctcgccgcgctccagcacctctgaagttttgcagcgcccagaaaggaggcgaggaaggagggagtgtgtgagaggagggagcaaaaagctcaccctaaaacatttatttcaaggagaaaagaaaaagggggggcgcaaaaatggctggggcaattatagaaaacatgagcaccaagaagctgtgcattgttggtgggattctgctcgtgttccaaatcatcgcctttctggtgggaggcttgattgctccagggcccacaacggcagtgtcctacatgtcggtgaaatgtgtggatgcccgtaagaaccatcacaagacaaaatggttcgtgccttggggacccaatcattgtgacaagatccgagacattgaagaggcaattccaagggaaattgaagccaatgacatcgtgttttctgttcacattcccctcccccacatggagatgagtccttggttccaattcatgctgtttatcctgcagctggacattgccttcaagctaaacaaccaaatcagagaaaatgcagaagtctccatggacgtttccctggcttaccgtgatgacgcgtttgctgagtggactgaaatggcccatgaaagagtaccacggaaactcaaatgcaccttcacatctcccaagactccagagcatgagggccgttactatgaatgtgatgtccttcctttcatggaaattgggtctgtggcccataagttttaccttttaaacatccggctgcctgtgaatgagaagaagaaaatcaatgtgggaattggggagataaaggatatccggttggtggggatccaccaaaatggaggcttcaccaaggtgtggtttgccatgaagaccttccttacgcccagcatcttcatcattatggtgtggtattggaggaggatcaccatgatgtcccgacccccagtgcttctggaaaaagtcatctttgcccttgggatttccatgacctttatcaatatcccagtggaatggttttccatcgggtttgactggacctggatgctgctgtttggtgacatccgacagggcatcttctatgcgatgcttctgtccttctggatcatcttctgtggcgagcacatgatggatcagcacgagcggaaccacatcgcagggtattggaagcaagtcggacccattgccgttggctccttctgcctcttcatatttgacatgtgtgagagaggggtacaactcacgaatcccttctacagtatctggactacagacattggaacagagctggccatggccttcatcatcgtggctggaatctgcctctgcctctacttcctgtttctatgcttcatggtatttcaggtgtttcggaacatcagtgggaagcagtccagcctgccagctatgagcaaagtccggcggctacactatgaggggctaatttttaggttcaagttcctcatgcttatcaccttggcctgcgctgccatgactgtcatcttcttcatcgttagtcaggtaacggaaggccattggaaatggggcggcgtcacagtccaagtgaacagtgcctttttcacaggcatctatgggatgtggaatctgtatgtctttgctctgatgttcttgtatgcaccatcccataaaaactatggagaagaccagtccaatggcgatctgggtgtccatagtggggaagaactccagctcaccaccactatcacccatgtggacggacccactgagatctacaagttgacccgcaaggaggcccaggagtaggaggctgcagcgcccggctgggacggtctctccataccccagcccctctaactagagtggggagcatgccagagagagctcaatgtacaaatgaatgcctcatggctcttagctgtggtttcttggaccagcggcatggacatttgtcagtttgccttctgacggtagcttttggaggaagattcctgcagccactaatgcattgtgtatgataacaaaaactctggtatgacacattttctgtgatcattgttaattagtgacatagtaacatctgtagcagctggttagtaaacctcatgtgggggtggggtgggggtgtattccttgggggatggtttgggccgaatggggagtggaatatttgacatttttcctgttttaaattctaggatagattttaacatcctttgcggtcccagtccaaggtaggctggtgtcatagtcttctcactcctaatccatgaccactgtttttttcctatttatatcaccaggtagcccactgagttaatatttaagttgtcaatagataagtgtccctgttttgtggcataatataactgaatttcatgagaagatttattccaccaggggtatttcagctttgaaaccaaatctgtgtatctaatactaaccaatctgttggatgtgggttttaaaaaatgtttgctaaactacccaagtaagatttactgtattaaatggccttcgggtctgaaaagcttttttaacttcttgcttaaaatgcgttttattttgataagatacttcaaatagcctccaaaagtgtagatccaatcatttaaataaacctgtatgtatatgcatatgtgtacatgcatatcccctcctgctaaaactcata

SEQ ID NO: 34487 - DNA, 2037 bp, Homo sapiens
  source 1..2037: mol_type = unassigned DNA
gtccacaggcggcggagcggccacaatcacagctccgggcattgggggaacccgagccggctgcgccgggggaatccgtgcgggcgccttccgtcccggtcccatcctcgccgcgctccagcacctctgaagttttgcagcgcccagaaaggaggcgaggaaggagggagtgtgtgagaggagggagcaaaaagctcaccctaaaacatttatttcaaggagaaaagaaaaagggggggcgcaaaaatggctggggcaattatagaaaacatgagcaccaagaagctgtgcattgttggtgggattctgctcgtgttccaaatcatcgcctttctggtgggaggcttgattgggcccacaacggcagtgtcctacatgtcggtgaaatgtgtggatgcccgtaagaaccatcacaagacaaaatggttcgtgccttggggacccaatcattgtgacaagatccgagacattgaagaggcaattccaagggaaattgaagccaatgacatcgtgttttctgttcacattcccctcccccacatggagatgagtccttggttccaattcatgctgtttatcctgcagctggacattgccttcaagctaaacaaccaaatcagagaaaatgcagaagtctccatggacgtttccctggcttaccgtgatgacgcgtttgctgagtggactgaaatggcccatgaaagagtaccacggaaactcaaatgcaccttcacatctcccaagactccagagcatgagggccgttactatgaatgtgatgtccttcctttcatggaaattgggtctgtggcccataagttttaccttttaaacatccggctgcctgtgaatgagaagaagaaaatcaatgtgggaattggggagataaaggatatccggttggtggggatccaccaaaatggaggcttcaccaaggtgtggtttgccatgaagaccttccttacgcccagcatcttcatcattatggtgtggtattggaggaggatcaccatgatgtcccgacccccagtgcttctggaaaaagtcatctttgcccttgggatttccatgacctttatcaatatcccagtggaatggttttccatcgggtttgactggacctggatgctgctgtttggtgacatccgacagggcatcttctatgcgatgcttctgtccttctggatcatcttctgtggcgagcacatgatggatcagcacgagcggaaccacatcgcagggtattggaagcaagtcggacccattgccgttggctccttctgcctcttcatatttgacatgtgtgagagaggggtacaactcacgaatcccttctacagtatctggactacagacattggaacagagctggccatggccttcatcatcgtggctggaatctgcctctgcctctacttcctgtttctatgcttcatggtatttcaggtgtttcggaacatcagtgggaagcagtccagcctgccagctatgagcaaagtccggcggctacactatgaggggctaatttttaggttcaagttcctcatgcttatcaccttggcctgcgctgccatgactgtcatcttcttcatcgttagtcaggtaacggaaggccattggaaatggggcggcgtcacagtccaagtgaacagtgcctttttcacaggcatctatgggatgtggaatctgtatgtctttgctctgatgttcttgtatgcaccatcccataaaaactatggagaagaccagtccaatggaatgcaactcccatgtaaatcgagggaagattgtgctttgtttgtttcggaactttatcaagaattgttcagcgcttcgaaatattccttcatcaatgacaacgcagcttctggtatttgagtcaacaaggcaacacatgtttatcagctttgcatttgcagttgtcacagtcacattgattgtacttgtatacgcacacaaatacactcatttagcctttatctcaaaatgttaaatataaggaaaaaagcgtcaacaataaatattctttgagtattg

SEQ ID NO: 34488 - DNA, 2332 bp, Homo sapiens
  source 1..2332: mol_type = unassigned DNA
tccacaggcggcggagcggccacaatcacagctccgggcattgggggaacccgagccggctgcgccgggggaatccgtgcgggcgccttccgtcccggtcccatcctcgccgcgctccagcacctctgaagttttgcagcgcccagaaaggaggcgaggaaggagggagtgtgtgagaggagggagcaaaaagctcaccctaaaacatttatttcaaggagaaaagaaaaagggggggcgcaaaaatggctggggcaattatagaaaacatgagcaccaagaagctgtgcattgttggtgggattctgctcgtgttccaaatcatcgcctttctggtgggaggcttgattggagaaaatgcagaagtctccatggacgtttccctggcttaccgtgatgacgcgtttgctgagtggactgaaatggcccatgaaagagtaccacggaaactcaaatgcaccttcacatctcccaagactccagagcatgagggccgttactatgaatgtgatgtccttcctttcatggaaattgggtctgtggcccataagttttaccttttaaacatccggctgcctgtgaatgagaagaagaaaatcaatgtgggaattggggagataaaggatatccggttggtggggatccaccaaaatggaggcttcaccaaggtgtggtttgccatgaagaccttccttacgcccagcatcttcatcattatggtgtggtattggaggaggatcaccatgatgtcccgacccccagtgcttctggaaaaagtcatctttgcccttgggatttccatgacctttatcaatatcccagtggaatggttttccatcgggtttgactggacctggatgctgctgtttggtgacatccgacagggcatcttctatgcgatgcttctgtccttctggatcatcttctgtggcgagcacatgatggatcagcacgagcggaaccacatcgcagggtattggaagcaagtcggacccattgccgttggctccttctgcctcttcatatttgacatgtgtgagagaggggtacaactcacgaatcccttctacagtatctggactacagacattggaacagagctggccatggccttcatcatcgtggctggaatctgcctctgcctctacttcctgtttctatgcttcatggtatttcaggtgtttcggaacatcagtgggaagcagtccagcctgccagctatgagcaaagtccggcggctacactatgaggggctaatttttaggttcaagttcctcatgcttatcaccttggcctgcgctgccatgactgtcatcttcttcatcgttagtcaggtaacggaaggccattggaaatggggcggcgtcacagtccaagtgaacagtgcctttttcacaggcatctatgggatgtggaatctgtatgtctttgctctgatgttcttgtatgcaccatcccataaaaactatggagaagaccagtccaatggcgatctgggtgtccatagtggggaagaactccagctcaccaccactatcacccatgtggacggacccactgagatctacaagttgacccgcaaggaggcccaggagtaggaggctgcagcgcccggctgggacggtctctccataccccagcccctctaactagagtggggagcatgccagagagagctcaatgtacaaatgaatgcctcatggctcttagctgtggtttcttggaccagcggcatggacatttgtcagtttgccttctgacggtagcttttggaggaagattcctgcagccactaatgcattgtgtatgataacaaaaactctggtatgacacattttctgtgatcattgttaattagtgacatagtaacatctgtagcagctggttagtaaacctcatgtgggggtggggtgggggtgtattccttgggggatggtttgggccgaatggggagtggaatatttgacatttttcctgttttaaattctaggatagattttaacatcctttgcggtcccagtccaaggtaggctggtgtcatagtcttctcactcctaatccatgaccactgtttttttcctatttatatcaccaggtagcccactgagttaatatttaagttgtcaatagataagtgtccctgttttgtggcataatataactgaatttcatgagaagatttattccaccaggggtatttcagctttgaaaccaaatctgtgtatctaatactaaccaatctgttggatgtgggttttaaaaaatgtttgctaaactacccaagtaagatttactgtattaaatggccttcgggtctgaaaagcttttttaa

SEQ ID NO: 34489 - DNA, 2095 bp, Homo sapiens
  source 1..2095: mol_type = unassigned DNA
ggcggcgtcatgtgatccgcttccctgctcctttaagcgtccacaggcggcggagcggccacaatcacagctccgggcattgggggaacccgagccggctgcgccgggggaatccgtgcgggcgccttccgtcccggtcccatcctcgccgcgctccagcacctctgaagttttgcagcgcccagaaaggaggcgaggaaggagggagtgtgtgagaggagggagcaaaaagctcaccctaaaacatttatttcaaggagaaaagaaaaagggggggcgcaaaaatggctggggcaattatagaaaacatgagcaccaagaagctgtgcattgttggtgggattctgctcgtgttccaaatcatcgcctttctggtgggaggcttgattgctccagggcccacaacggcagtgtcctacatgtcggtgaaatgtgtggatgcccgtaagaaccatcacaagacaaaatggttcgtgccttggggacccaatcattgtgacaagatccgagacattgaagaggcaattccaagggaaattgaagccaatgacatcgtgttttctgttcacattcccctcccccacatggagatgagtccttggttccaattcatgctgtttatcctgcagctggacattgccttcaagctaaacaaccaaatcagagaaaatgcagaagtctccatggacgtttccctggcttaccgtgatgacgcgtttgctgagtggactgaaatggcccatgaaagagtaccacggaaactcaaatgcaccttcacatctcccaagactccagagcatgagggccgttactatgaatgtgatgtccttcctttcatggaaattgggtctgtggcccataagttttaccttttaaacatccggctgcctgtgaatgagaagaagaaaatcaatgtgggaattggggagataaaggatatccggttggtggggatccaccaaaatggaggcttcaccaaggtgtggtttgccatgaagaccttccttacgcccagcatcttcatcattatggtgtggtattggaggaggatcaccatgatgtcccgacccccagtgcttctggaaaaagtcatctttgcccttgggatttccatgacctttatcaatatcccagtggaatggttttccatcgggtttgactggacctggatgctgctgtttggtgacatccgacagggcatcttctatgcgatgcttctgtccttctggatcatcttctgtggcgagcacatgatggatcagcacgagcggaaccacatcgcagggtattggaagcaagtcggacccattgccgttggctccttctgcctcttcatatttgacatgtgtgagagaggggtacaactcacgaatcccttctacagtatctggactacagacattggaacagagctggccatggccttcatcatcgtggctggaatctgcctctgcctctacttcctgtttctatgcttcatggtatttcaggtgtttcggaacatcagtgggaagcagtccagcctgccagctatgagcaaagtccggcggctacactatgaggggctaatttttaggttcaagttcctcatgcttatcaccttggcctgcgctgccatgactgtcatcttcttcatcgttagtcaggtaacggaaggccattggaaatggggcggcgtcacagtccaagtgaacagtgcctttttcacaggcatctatgggatgtggaatctgtatgtctttgctctgatgttcttgtatgcaccatcccataaaaactatggagaagaccagtccaatggaatgcaactcccatgtaaatcgagggaagattgtgctttgtttgtttcggaactttatcaagaattgttcagcgcttcgaaatattccttcatcaatgacaacgcagcttctggtatttgagtcaacaaggcaacacatgtttatcagctttgcatttgcagttgtcacagtcacattgattgtacttgtatacgcacacaaatacactcatttagcctttatctcaaaatgttaaatataaggaaaaaagcgtcaacaataaatattctttgagtattgtcttacttctctta

SEQ ID NO: 34490 - DNA, 2666 bp, Homo sapiens
  source 1..2666: mol_type = unassigned DNA
cagctgtgtgagaagccgggcagcctcctgctctgtgaaggaccctgctgcggagctttccacctcgcctgccttgggctttcccggaggccagaagggaggttcacctgcagcgagtgtgcctcaggtgtcgcccggcacagtctggggtctgtgaggatgatgagaggacacctgcacagccgtggcccttcctgcctactcaccgggcccaaggagtctcctatctcacgtcagaacacttcctgggtcaggaagacacctggagagtctcccaggccatggcagccccacagcagcacctcacttatgggagtgtctgtctgcctgcccagaatgataagtgactgctccaccactggccagctgctctcaaggaggaaaggcctcttttcataggagccccttctttcaagcttcttgccagttagactgggcctccccagccaggctgcctagtaagattctcctgtatttcaggtgaagctggagctcagatcgcagcaaggtaatccttgatggctggatctttttgctggagaatgcttggactagtgagcaaggttggaaacagggccaggtgctttagcagcatggctgcctctgaagaggagttgcttgattttagtggctcagaactgcaatttaattcttgttctttgcacctctctctccaccccttctttaactttttgttagggattcactcatgtttcgtgtgtaaagagagcaagacagatgttaagcgctgtgtggtaactcagtgtggaaaattttaccatgaggcttgtgtgaaaaaataccctctgactgtatttgagagccgaggtttccgctgccccctccacagctgtgtgagctgccatgcttccaacccttcaaacccaaggccgtcaaaaggtaaaatgatgcggtgtgtccgctgccccgttgcctatcacagcggggatgcttgtctggcagcaggatgctcagtgatcgcctccaacagcatcatctgcactgcccacttcactgctcggaaggggaagcgacaccacgcccacgtcaacgtgagctggtgcttcgtgtgctccaaaggggggagccttctgtgctgtgagtcctgcccagcggccttccaccctgactgcctgaacatcgagatgcctgacggcagctggttctgcaatgactgcagggctgggaagaagctgcacttccaggatatcatttgggtgaaacttgggaactacagatggtggccggcagaagtttgccatcccaaaaatgttcccccaaatattcagaaaatgaagcacgagattggagaattccctgtgtttttctttgggtctaaagattattactggacgcatcaggcgcgagtgttcccgtacatggagggggaccggggcagccgctaccagggggtcagagggatcggaagagtcttcaaaaacgcactgcaagaagctgaagctcgttttcgtgaaattaagcttcagagggaagcccgagaaacacaggagagcgagcgcaagcccccaccatacaagcacatcaaggtgaataagccttacgggaaagtccagatctacacagcggatatttcagaaatccctaagtgcaactgcaagcccacagatgagaatccttgtggctttgattcggagtgtctgaacaggatgctgatgtttgagtgccacccgcaggtgtgtcccgcgggcgagttctgccagaaccagtgcttcaccaagcgccagtacccagagaccaagatcatcaagacagatggcaaagggtggggcctggtcgccaagagggacatcagaaagggagaatttgttaacgagtacgttggggagctgatcgacgaggaggagtgcatggcgagaatcaagcacgcacacgagaacgacatcacccacttctacatgctcactatagacaaggaccgtataatagacgctggccccaaaggaaactactctcgatttatgaatcacagctgccagcccaactgtgagaccctcaagtggacagtgaatggggacactcgtgtgggcctgtttgccgtctgtgacattcctgcagggacggagctgacttttaactacaacctcgattgtctgggcaatgaaaaaacggtctgccggtgtggagcctccaattgcagtggattcctcggggatagaccaaagacctcgacgaccctttcatcagaggaaaagggcaaaaagaccaagaagaaaacgaggcggcgcagagcaaaaggggaagggaagaggcagtcagaggacgagtgcttccgctgcggtgatggcgggcagctggtgctgtgtgaccgcaagttctgcaccaaggcctaccacctgtcctgcctgggccttggcaagcggcccttcgggaagtgggaatgtccttggcatcattgtgacgtgtgtggcaaaccttcgacttcattttgccacctctgccccaattcgttctgtaaggagcaccaggacgggacagccttcagctgcaccccggacgggcggtcctactgctgtgagcatgacttaggggcggcatcggtcagaagcaccaagactgagaagccccccccagagccagggaagccgaaggggaagaggcggcggcggaggggctggcggagagtcacagagggcaaatagcgccag

SEQ ID NO: 34491 - DNA, 7534 bp, Homo sapiens
  source 1..7534: mol_type = unassigned DNA
tggtcttgaactcctgaccttgtgatccgctcgcctcagcctcccaaagtgctgggattacaggcatgagccaccgtgcctgtcctagaaccactggtaactcttaactgtgttctaagaacggaagcatctgggctggatggaatttagcatcaagcagagtcccctttctgttcagagtgttgtaaagtgcataaagatgaagcaggcaccagaaatcctcggcagtgccaacgggaagactccgagctgcgaggtgaaccgcgagtgttctgtgttcctcagcaaagcccagctctccagtagcctgcaggagggggtcatgcagaagtttaacggccacgacgccctgccctttattccagccgacaagctgaaagatcttacttcccgggtgtttaatggagaacccggcgcacacgatgccaaactgcgttttgagtcccaggaaatgaaagggattgggacaccccctaacactacccctatcaaaaatggctctccagaaattaagctgaaaatcaccaaaacatacatgaatgggaagcctctctttgaatcttccatttgtggtgacagtgctgctgatgtgtctcagtcagaagaaaatggacaaaaaccagaaaacaaggcgagaaggaacaggaagaggagcataaaatatgactccttgctggagcagggccttgtcgaagcagctcttgtgtctaagatctcaagtccttcagataaaaagattccagctaagaaagagtcttgtccaaacactggaagagacaaagaccacctgttgaaatacaacgttggtgatttggtgtggtccaaagtgtcgggttacccttggtggccttgcatggtttctgcagatccactccttcacagctataccaaacttaaaggtcagaaaaagagtgcacgccagtatcacgtacagttctttggtgacgccccagaaagagcttggatatttgagaagagcctcgtagcttttgaaggagaaggacagtttgaaaaattatgccaggaaagtgccaagcaggcacccacgaaagctgagaaaattaagctattgaaaccaatttcagggaaattgagggcccagtgggaaatgggcattgttcaagcagaagaagctgcaagcatgtcagtggaggagcggaaagccaagttcacctttctctatgtgggggaccagcttcatctcaaccctcaagtagccaaggaggctggcattgctgcagagtctttgggagaaatggcagaatcctcaggagtcagtgaagaagctgctgaaaaccccaagtctgtgagagaagagtgcattcccatgaagagaaggcggagggccaaactgtgtagctctgcagagaccctggagagtcaccccgacatagggaagagtactcctcaaaagacggcagaggctgaccccagaagaggagtagggtctcctcctgggaggaagaagaccacagtctccatgccacgaagcaggaagggagatgcagcatcccagtttttggtcttctgtcaaaaacacagggatgaggtggtagctgagcacccagatgcttcaggtgaggagattgaagagctgctcaggtcacagtggagtctgctgagtgagaagcagagagcacgctacaacaccaagtttgccctggtggcccctgtccaggctgaagaagactctggtaatgtaaatgggaaaaaaagaaaccacacaaagaggatacaggaccctacagaagatgctgaagctgaggacacacccaggaaaagactcaggacggacaagcacagtcttcggaagagagacacaatcactgacaaaacggccagaacaagctcttacaaggccatggaggcagcctcctcgctcaagagccaggcagcaacgaaaaatctgtctgatgcatgtaaaccactgaagaagcgaaatcgggcttccacggcagcatcttcagctcttgggtttagcaaaagttcatctccttctgcatccttaactgagaatgaggtctcggacagcccgggagacgagccctcggagtccccatacgaaagtgcagacgaaacacaaactgaagtatctgtctcatccaaaaagtctgagcgaggagtgactgccaaaaaggagtatgtgtgccagctgtgtgagaagccgggcagcctcctgctctgtgaaggaccctgctgcggagctttccacctcgcctgccttgggctttcccggaggccagaagggaggttcacctgcagcgagtgtgcctcagggattcactcatgtttcgtgtgtaaagagagcaagacagatgttaagcgctgtgtggtaactcagtgtggaaaattttaccatgaggcttgtgtgaaaaaataccctctgactgtatttgagagccgaggtttccgctgccccctccacagctgtgtgagctgccatgcttccaacccttcaaacccaaggccgtcaaaaggtaaaatgatgcggtgtgtccgctgccccgttgcctatcacagcggggatgcttgtctggcagcaggatgctcagtgatcgcctccaacagcatcatctgcactgcccacttcactgctcggaaggggaagcgacaccacgcccacgtcaacgtgagctggtgcttcgtgtgctccaaaggggggagccttctgtgctgtgagtcctgcccagcggccttccaccctgactgcctgaacatcgagatgcctgacggcagctggttctgcaatgactgcagggctgggaagaagctgcacttccaggatatcatttgggtgaaacttgggaactacagatggtggccggcagaagtttgccatcccaaaaatgttcccccaaatattcagaaaatgaagcacgagattggagaattccctgtgtttttctttgggtctaaagattattactggacgcatcaggcgcgagtgttcccgtacatggagggggaccggggcagccgctaccagggggtcagagggatcggaagagtcttcaaaaacgcactgcaagaagctgaagctcgttttcgtgaaattaagcttcagagggaagcccgagaaacacaggagagcgagcgcaagcccccaccatacaagcacatcaaggtgaataagccttacgggaaagtccagatctacacagcggatatttcagaaatccctaagtgcaactgcaagcccacagatgagaatccttgtggctttgattcggagtgtctgaacaggatgctgatgtttgagtgccacccgcaggtgtgtcccgcgggcgagttctgccagaaccagtgcttcaccaagcgccagtacccagagaccaagatcatcaagacagatggcaaagggtggggcctggtcgccaagagggacatcagaaagggagaatttgttaacgagtacgttggggagctgatcgacgaggaggagtgcatggcgagaatcaagcacgcacacgagaacgacatcacccacttctacatgctcactatagacaaggaccgtataatagacgctggccccaaaggaaactactctcgatttatgaatcacagctgccagcccaactgtgagaccctcaagtggacagtgaatggggacactcgtgtgggcctgtttgccgtctgtgacattcctgcagggacggagctgacttttaactacaacctcgattgtctgggcaatgaaaaaacggtctgccggtgtggagcctccaattgcagtggattcctcggggatagaccaaagacctcgacgaccctttcatcagaggaaaagggcaaaaagaccaagaagaaaacgaggcggcgcagagcaaaaggggaagggaagaggcagtcagaggacgagtgcttccgctgcggtgatggcgggcagctggtgctgtgtgaccgcaagttctgcaccaaggcctaccacctgtcctgcctgggccttggcaagcggcccttcgggaagtgggaatgtccttggcatcattgtgacgtgtgtggcaaaccttcgacttcattttgccacctctgccccaattcgttctgtaaggagcaccaggacgggacagccttcagctgcaccccggacgggcggtcctactgctgtgagcatgacttaggggcggcatcggtcagaagcaccaagactgagaagccccccccagagccagggaagccgaaggggaagaggcggcggcggaggggctggcggagagtcacagagggcaaatagcgccaggcggccgcttggccggatccaggggcggtgcagggcggccggccctgcctgcgggagagggcgagcatgaactggcccggaggacccagctcgagccgccaggacacagacgtacaggcctcctcgggagggagcgcctccccaccactgagccatcctcagcagcgtccgctgcgtctgcactgatgaccgtctgagcccagctcagcgttcctggacaaacagcctcactcctcagcgttaccgccacacttgaatttctccgaatgtcaaggttccctcccactctatttttttaggttaaagttaattggcatatggaatgttttaatctcctctgaaatgtgtagcgtaggcttttcccaagggtcgctagaaactcgtcttcgcgttgccccctttctggctctcagcgccgtcgccactcgggagaggctgggtgaggcccgtgtgaggactgaccctggattcctcgaaactgccattgtgatcattactctgctctttggaaatggctgtatcatttttttgtactaatgtgaattgttcctcagaaacgcttcttttccatcctagtgagaagctggccctgcaggtggtggcagcaatggtgttgtaagatttcctcccgtagttttttctcctcatggatttgaatgaaatgccaataacacgtccactttcaacgtgtagtttacgcggagcactttcgaggcctggccgggttgggcctacttctcacctgggcctatcttctgaactcgctaggttcttatcaacatttgggggataactttgtatatttttttcatttggcttttctttaccagtttctgatttttattctcaatatatttttgctaaacctatttcacaaatcaccaccgactgaagtgtgtgtttactgatgcggccctgagctccatggcgaaaggagtgactttgcagggcgtgagaccgcagtctgcttagagcacaggaagtgacaacttagggagccccgtagggcgctgcaggccccggggaccccagcacgtgggtctaaagagagacggagtctagctctcctgccacccagagtggcttccatctcagcactctgtgggtctggtgatggaagatgcagtctctgctgatcacatgtgccctctgccagggcacctactgagaggtgcggtcctgggggtggaggcctgcctggcaggtgtgcgtgcctcgtacgtgtgttatgggcactggtctaggccaggtatgacacccactctcctgtgagatttcactttagtttttaaaaggtccagttctacagagtgagacctatctatctgagtactacatatgttttaagacttggttctttttttgagggatccttgaccctgggaagtctggagcaccctgagaagggggcaccatgtgtgcctttgcccacgtgtcctgaggggctgcttgtctgggagggagggagagaacattcagcagcaggtgcttttttatggccttttcttaaaataacctaagggggacacatccatcttgcagagaagtttacagaactccccttgaaaactgctgctgaggctcctgttaaattttctgtggcatcttttatgccttggtaaaaactgcagtgtctttggacctgagagtggctactccgtggttttgtgacctgtaagcgtggggttcaggggtgtgtggccctgcagggtcccacgcctccctgagcactgactggaagtttcactggctggtggctgtcccttctcccatcagggtccccagcaaagttaactacacagaggacccaggggaaacgagctgtgtagccactgacttgctcgcgcggccgtggcctctgaggggcactcgccggttaagacagggtgggagtagtgctttccagttcagactctaacttctcccaaagtgtcctaagaaaatactggatcggctcatagatttatgctccttatgatgccctaacttggaaggttgttctagggacaggccgggcagtgtccccacacacaccttagagtcgaaggccccagggccccgctgtcacttgcccaaaagatcccttccggcaggtaagggactaccaatgcttacgtcaaaacagcagaatcggctttgcagtgcactttggggagcagatattaacttatttttgtgttggacagtagtgaaatcttgtgatttttaatcgctttgataatacttccaaattttatgatttttctgaaggaaataatgcaaacattttaaatatgtttctccccctttccaaaaactgttaaactaatgagcaagtaacactaactttgaatgtctctacaatacccgttgataactcagtggagccaggctttggggtagcggccctgagcttgcagggtttctcgccactggggctgaccacgcccccagctgtgaccgtgggtgtggctggctctcggccctgcccagctttgttctgaggacgtggtgacttcctgaacatcagcttcaatcctccatcattaatgtgaagcaaaacacaaaaaccgccccaatccctcaggattccttggcatccgaaaccagcatctgcacctaaacccatacccacccgtgtgcgcccacagggggatgtgtccgaatgggcagcttaaaatgtggtcacctgtgggggaaactcttcaggcacctgaagtgagaacccagctgtccgtcctcaggccggcctttcttccggcgacacccgtccatggctggctgggtccccttcgcagtgtttgtctgtcttgacatctaaaccccggcgtgtgcagtgcccatcttccaggactaccttattttccagaattaaacctgttttataattcaagttaatgcaaatgactgtcagttgccaaatatcttgatcctatgagtgtagttgatgactgtttgttagtcagtagagtaaaatgctgtgtccacggggtgtcacagcctcaccataccctgttgaggtgtgaaatgccccgtcagaaattaaatacaaacttaaatgtgcctattggtgtctaaacttcatacaatgtaaggtcagattccttttaggaatactgggtgctgtcaccaggtttgatagttagacttaaaaacttgaaattcactttttggggggagggatatactgaaatagagagttgagacttgccagttgggggaaaatagcatttaaaatggaaagctgtgtttggaaaattgtgtatgagtatttttgtattaaaaacattttaaaggcttttttcttaactt

SEQ ID NO: 34492 - DNA, 7706 bp, Homo sapiens
  source 1..7706: mol_type = unassigned DNA
tggtcttgaactcctgaccttgtgatccgctcgcctcagcctcccaaagtgctgggattacaggcatgagccaccgtgcctgtcctagaaccactggtaactcttaactgctgtctgcttttctgtggagactgcgggttgcagacaccagcagccccctattgctgcacgtcaggtgtcctccacctcagtactgtggacatctcgggccgcatagccctgttgcgcgggcatcctgtgcgttgcaggagatgcagcagcatccatgaccgcaacccatcagagtgttctaagaacggaagcatctgggctggatggaatttagcatcaagcagagtcccctttctgttcagagtgttgtaaagtgcataaagatgaagcaggcaccagaaatcctcggcagtgccaacgggaagactccgagctgcgaggtgaaccgcgagtgttctgtgttcctcagcaaagcccagctctccagtagcctgcaggagggggtcatgcagaagtttaacggccacgacgccctgccctttattccagccgacaagctgaaagatcttacttcccgggtgtttaatggagaacccggcgcacacgatgccaaactgcgttttgagtcccaggaaatgaaagggattgggacaccccctaacactacccctatcaaaaatggctctccagaaattaagctgaaaatcaccaaaacatacatgaatgggaagcctctctttgaatcttccatttgtggtgacagtgctgctgatgtgtctcagtcagaagaaaatggacaaaaaccagaaaacaaggcgagaaggaacaggaagaggagcataaaatatgactccttgctggagcagggccttgtcgaagcagctcttgtgtctaagatctcaagtccttcagataaaaagattccagctaagaaagagtcttgtccaaacactggaagagacaaagaccacctgttgaaatacaacgttggtgatttggtgtggtccaaagtgtcgggttacccttggtggccttgcatggtttctgcagatccactccttcacagctataccaaacttaaaggtcagaaaaagagtgcacgccagtatcacgtacagttctttggtgacgccccagaaagagcttggatatttgagaagagcctcgtagcttttgaaggagaaggacagtttgaaaaattatgccaggaaagtgccaagcaggcacccacgaaagctgagaaaattaagctattgaaaccaatttcagggaaattgagggcccagtgggaaatgggcattgttcaagcagaagaagctgcaagcatgtcagtggaggagcggaaagccaagttcacctttctctatgtgggggaccagcttcatctcaaccctcaagtagccaaggaggctggcattgctgcagagtctttgggagaaatggcagaatcctcaggagtcagtgaagaagctgctgaaaaccccaagtctgtgagagaagagtgcattcccatgaagagaaggcggagggccaaactgtgtagctctgcagagaccctggagagtcaccccgacatagggaagagtactcctcaaaagacggcagaggctgaccccagaagaggagtagggtctcctcctgggaggaagaagaccacagtctccatgccacgaagcaggaagggagatgcagcatcccagtttttggtcttctgtcaaaaacacagggatgaggtggtagctgagcacccagatgcttcaggtgaggagattgaagagctgctcaggtcacagtggagtctgctgagtgagaagcagagagcacgctacaacaccaagtttgccctggtggcccctgtccaggctgaagaagactctggtaatgtaaatgggaaaaaaagaaaccacacaaagaggatacaggaccctacagaagatgctgaagctgaggacacacccaggaaaagactcaggacggacaagcacagtcttcggaagagagacacaatcactgacaaaacggccagaacaagctcttacaaggccatggaggcagcctcctcgctcaagagccaggcagcaacgaaaaatctgtctgatgcatgtaaaccactgaagaagcgaaatcgggcttccacggcagcatcttcagctcttgggtttagcaaaagttcatctccttctgcatccttaactgagaatgaggtctcggacagcccgggagacgagccctcggagtccccatacgaaagtgcagacgaaacacaaactgaagtatctgtctcatccaaaaagtctgagcgaggagtgactgccaaaaaggagtatgtgtgccagctgtgtgagaagccgggcagcctcctgctctgtgaaggaccctgctgcggagctttccacctcgcctgccttgggctttcccggaggccagaagggaggttcacctgcagcgagtgtgcctcagggattcactcatgtttcgtgtgtaaagagagcaagacagatgttaagcgctgtgtggtaactcagtgtggaaaattttaccatgaggcttgtgtgaaaaaataccctctgactgtatttgagagccgaggtttccgctgccccctccacagctgtgtgagctgccatgcttccaacccttcaaacccaaggccgtcaaaaggtaaaatgatgcggtgtgtccgctgccccgttgcctatcacagcggggatgcttgtctggcagcaggatgctcagtgatcgcctccaacagcatcatctgcactgcccacttcactgctcggaaggggaagcgacaccacgcccacgtcaacgtgagctggtgcttcgtgtgctccaaaggggggagccttctgtgctgtgagtcctgcccagcggccttccaccctgactgcctgaacatcgagatgcctgacggcagctggttctgcaatgactgcagggctgggaagaagctgcacttccaggatatcatttgggtgaaacttgggaactacagatggtggccggcagaagtttgccatcccaaaaatgttcccccaaatattcagaaaatgaagcacgagattggagaattccctgtgtttttctttgggtctaaagattattactggacgcatcaggcgcgagtgttcccgtacatggagggggaccggggcagccgctaccagggggtcagagggatcggaagagtcttcaaaaacgcactgcaagaagctgaagctcgttttcgtgaaattaagcttcagagggaagcccgagaaacacaggagagcgagcgcaagcccccaccatacaagcacatcaaggtgaataagccttacgggaaagtccagatctacacagcggatatttcagaaatccctaagtgcaactgcaagcccacagatgagaatccttgtggctttgattcggagtgtctgaacaggatgctgatgtttgagtgccacccgcaggtgtgtcccgcgggcgagttctgccagaaccagtgcttcaccaagcgccagtacccagagaccaagatcatcaagacagatggcaaagggtggggcctggtcgccaagagggacatcagaaagggagaatttgttaacgagtacgttggggagctgatcgacgaggaggagtgcatggcgagaatcaagcacgcacacgagaacgacatcacccacttctacatgctcactatagacaaggaccgtataatagacgctggccccaaaggaaactactctcgatttatgaatcacagctgccagcccaactgtgagaccctcaagtggacagtgaatggggacactcgtgtgggcctgtttgccgtctgtgacattcctgcagggacggagctgacttttaactacaacctcgattgtctgggcaatgaaaaaacggtctgccggtgtggagcctccaattgcagtggattcctcggggatagaccaaagacctcgacgaccctttcatcagaggaaaagggcaaaaagaccaagaagaaaacgaggcggcgcagagcaaaaggggaagggaagaggcagtcagaggacgagtgcttccgctgcggtgatggcgggcagctggtgctgtgtgaccgcaagttctgcaccaaggcctaccacctgtcctgcctgggccttggcaagcggcccttcgggaagtgggaatgtccttggcatcattgtgacgtgtgtggcaaaccttcgacttcattttgccacctctgccccaattcgttctgtaaggagcaccaggacgggacagccttcagctgcaccccggacgggcggtcctactgctgtgagcatgacttaggggcggcatcggtcagaagcaccaagactgagaagccccccccagagccagggaagccgaaggggaagaggcggcggcggaggggctggcggagagtcacagagggcaaatagcgccaggcggccgcttggccggatccaggggcggtgcagggcggccggccctgcctgcgggagagggcgagcatgaactggcccggaggacccagctcgagccgccaggacacagacgtacaggcctcctcgggagggagcgcctccccaccactgagccatcctcagcagcgtccgctgcgtctgcactgatgaccgtctgagcccagctcagcgttcctggacaaacagcctcactcctcagcgttaccgccacacttgaatttctccgaatgtcaaggttccctcccactctatttttttaggttaaagttaattggcatatggaatgttttaatctcctctgaaatgtgtagcgtaggcttttcccaagggtcgctagaaactcgtcttcgcgttgccccctttctggctctcagcgccgtcgccactcgggagaggctgggtgaggcccgtgtgaggactgaccctggattcctcgaaactgccattgtgatcattactctgctctttggaaatggctgtatcatttttttgtactaatgtgaattgttcctcagaaacgcttcttttccatcctagtgagaagctggccctgcaggtggtggcagcaatggtgttgtaagatttcctcccgtagttttttctcctcatggatttgaatgaaatgccaataacacgtccactttcaacgtgtagtttacgcggagcactttcgaggcctggccgggttgggcctacttctcacctgggcctatcttctgaactcgctaggttcttatcaacatttgggggataactttgtatatttttttcatttggcttttctttaccagtttctgatttttattctcaatatatttttgctaaacctatttcacaaatcaccaccgactgaagtgtgtgtttactgatgcggccctgagctccatggcgaaaggagtgactttgcagggcgtgagaccgcagtctgcttagagcacaggaagtgacaacttagggagccccgtagggcgctgcaggccccggggaccccagcacgtgggtctaaagagagacggagtctagctctcctgccacccagagtggcttccatctcagcactctgtgggtctggtgatggaagatgcagtctctgctgatcacatgtgccctctgccagggcacctactgagaggtgcggtcctgggggtggaggcctgcctggcaggtgtgcgtgcctcgtacgtgtgttatgggcactggtctaggccaggtatgacacccactctcctgtgagatttcactttagtttttaaaaggtccagttctacagagtgagacctatctatctgagtactacatatgttttaagacttggttctttttttgagggatccttgaccctgggaagtctggagcaccctgagaagggggcaccatgtgtgcctttgcccacgtgtcctgaggggctgcttgtctgggagggagggagagaacattcagcagcaggtgcttttttatggccttttcttaaaataacctaagggggacacatccatcttgcagagaagtttacagaactccccttgaaaactgctgctgaggctcctgttaaattttctgtggcatcttttatgccttggtaaaaactgcagtgtctttggacctgagagtggctactccgtggttttgtgacctgtaagcgtggggttcaggggtgtgtggccctgcagggtcccacgcctccctgagcactgactggaagtttcactggctggtggctgtcccttctcccatcagggtccccagcaaagttaactacacagaggacccaggggaaacgagctgtgtagccactgacttgctcgcgcggccgtggcctctgaggggcactcgccggttaagacagggtgggagtagtgctttccagttcagactctaacttctcccaaagtgtcctaagaaaatactggatcggctcatagatttatgctccttatgatgccctaacttggaaggttgttctagggacaggccgggcagtgtccccacacacaccttagagtcgaaggccccagggccccgctgtcacttgcccaaaagatcccttccggcaggtaagggactaccaatgcttacgtcaaaacagcagaatcggctttgcagtgcactttggggagcagatattaacttatttttgtgttggacagtagtgaaatcttgtgatttttaatcgctttgataatacttccaaattttatgatttttctgaaggaaataatgcaaacattttaaatatgtttctccccctttccaaaaactgttaaactaatgagcaagtaacactaactttgaatgtctctacaatacccgttgataactcagtggagccaggctttggggtagcggccctgagcttgcagggtttctcgccactggggctgaccacgcccccagctgtgaccgtgggtgtggctggctctcggccctgcccagctttgttctgaggacgtggtgacttcctgaacatcagcttcaatcctccatcattaatgtgaagcaaaacacaaaaaccgccccaatccctcaggattccttggcatccgaaaccagcatctgcacctaaacccatacccacccgtgtgcgcccacagggggatgtgtccgaatgggcagcttaaaatgtggtcacctgtgggggaaactcttcaggcacctgaagtgagaacccagctgtccgtcctcaggccggcctttcttccggcgacacccgtccatggctggctgggtccccttcgcagtgtttgtctgtcttgacatctaaaccccggcgtgtgcagtgcccatcttccaggactaccttattttccagaattaaacctgttttataattcaagttaatgcaaatgactgtcagttgccaaatatcttgatcctatgagtgtagttgatgactgtttgttagtcagtagagtaaaatgctgtgtccacggggtgtcacagcctcaccataccctgttgaggtgtgaaatgccccgtcagaaattaaatacaaacttaaatgtgcctattggtgtctaaacttcatacaatgtaaggtcagattccttttaggaatactgggtgctgtcaccaggtttgatagttagacttaaaaacttgaaattcactttttggggggagggatatactgaaatagagagttgagacttgccagttgggggaaaatagcatttaaaatggaaagctgtgtttggaaaattgtgtatgagtatttttgtattaaaaacattttaaaggcttttttcttaa

SEQ ID NO: 34493 - DNA, 7827 bp, Homo sapiens
  source 1..7827: mol_type = unassigned DNA
gcatgagccaccgtgcctgtcctagaaccactggtaactcttaactgagacaagatttcgccatgttgcccaggctggtctcgaacttctgagctcaagcgatctacctgcctcgtcctcccaaagtgttggaattgcaggtgtgagccactgcacccggcccttgcctcatgtttgaatgataatttacctgggcataaaattctggacacttgtggtggcacgagctgtctgcttttctgtggagactgcgggttgcagacaccagcagccccctattgctgcacgtcaggtgtcctccacctcagtactgtggacatctcgggccgcatagccctgttgcgcgggcatcctgtgcgttgcaggagatgcagcagcatccatgaccgcaacccatcagagtgttctaagaacggaagcatctgggctggatggaatttagcatcaagcagagtcccctttctgttcagagtgttgtaaagtgcataaagatgaagcaggcaccagaaatcctcggcagtgccaacgggaagactccgagctgcgaggtgaaccgcgagtgttctgtgttcctcagcaaagcccagctctccagtagcctgcaggagggggtcatgcagaagtttaacggccacgacgccctgccctttattccagccgacaagctgaaagatcttacttcccgggtgtttaatggagaacccggcgcacacgatgccaaactgcgttttgagtcccaggaaatgaaagggattgggacaccccctaacactacccctatcaaaaatggctctccagaaattaagctgaaaatcaccaaaacatacatgaatgggaagcctctctttgaatcttccatttgtggtgacagtgctgctgatgtgtctcagtcagaagaaaatggacaaaaaccagaaaacaaggcgagaaggaacaggaagaggagcataaaatatgactccttgctggagcagggccttgtcgaagcagctcttgtgtctaagatctcaagtccttcagataaaaagattccagctaagaaagagtcttgtccaaacactggaagagacaaagaccacctgttgaaatacaacgttggtgatttggtgtggtccaaagtgtcgggttacccttggtggccttgcatggtttctgcagatccactccttcacagctataccaaacttaaaggtcagaaaaagagtgcacgccagtatcacgtacagttctttggtgacgccccagaaagagcttggatatttgagaagagcctcgtagcttttgaaggagaaggacagtttgaaaaattatgccaggaaagtgccaagcaggcacccacgaaagctgagaaaattaagctattgaaaccaatttcagggaaattgagggcccagtgggaaatgggcattgttcaagcagaagaagctgcaagcatgtcagtggaggagcggaaagccaagttcacctttctctatgtgggggaccagcttcatctcaaccctcaagtagccaaggaggctggcattgctgcagagtctttgggagaaatggcagaatcctcaggagtcagtgaagaagctgctgaaaaccccaagtctgtgagagaagagtgcattcccatgaagagaaggcggagggccaaactgtgtagctctgcagagaccctggagagtcaccccgacatagggaagagtactcctcaaaagacggcagaggctgaccccagaagaggagtagggtctcctcctgggaggaagaagaccacagtctccatgccacgaagcaggaagggagatgcagcatcccagtttttggtcttctgtcaaaaacacagggatgaggtggtagctgagcacccagatgcttcaggtgaggagattgaagagctgctcaggtcacagtggagtctgctgagtgagaagcagagagcacgctacaacaccaagtttgccctggtggcccctgtccaggctgaagaagactctggtaatgtaaatgggaaaaaaagaaaccacacaaagaggatacaggaccctacagaagatgctgaagctgaggacacacccaggaaaagactcaggacggacaagcacagtcttcggaagagagacacaatcactgacaaaacggccagaacaagctcttacaaggccatggaggcagcctcctcgctcaagagccaggcagcaacgaaaaatctgtctgatgcatgtaaaccactgaagaagcgaaatcgggcttccacggcagcatcttcagctcttgggtttagcaaaagttcatctccttctgcatccttaactgagaatgaggtctcggacagcccgggagacgagccctcggagtccccatacgaaagtgcagacgaaacacaaactgaagtatctgtctcatccaaaaagtctgagcgaggagtgactgccaaaaaggagtatgtgtgccagctgtgtgagaagccgggcagcctcctgctctgtgaaggaccctgctgcggagctttccacctcgcctgccttgggctttcccggaggccagaagggaggttcacctgcagcgagtgtgcctcagggattcactcatgtttcgtgtgtaaagagagcaagacagatgttaagcgctgtgtggtaactcagtgtggaaaattttaccatgaggcttgtgtgaaaaaataccctctgactgtatttgagagccgaggtttccgctgccccctccacagctgtgtgagctgccatgcttccaacccttcaaacccaaggccgtcaaaaggtaaaatgatgcggtgtgtccgctgccccgttgcctatcacagcggggatgcttgtctggcagcaggatgctcagtgatcgcctccaacagcatcatctgcactgcccacttcactgctcggaaggggaagcgacaccacgcccacgtcaacgtgagctggtgcttcgtgtgctccaaaggggggagccttctgtgctgtgagtcctgcccagcggccttccaccctgactgcctgaacatcgagatgcctgacggcagctggttctgcaatgactgcagggctgggaagaagctgcacttccaggatatcatttgggtgaaacttgggaactacagatggtggccggcagaagtttgccatcccaaaaatgttcccccaaatattcagaaaatgaagcacgagattggagaattccctgtgtttttctttgggtctaaagattattactggacgcatcaggcgcgagtgttcccgtacatggagggggaccggggcagccgctaccagggggtcagagggatcggaagagtcttcaaaaacgcactgcaagaagctgaagctcgttttcgtgaaattaagcttcagagggaagcccgagaaacacaggagagcgagcgcaagcccccaccatacaagcacatcaaggtgaataagccttacgggaaagtccagatctacacagcggatatttcagaaatccctaagtgcaactgcaagcccacagatgagaatccttgtggctttgattcggagtgtctgaacaggatgctgatgtttgagtgccacccgcaggtgtgtcccgcgggcgagttctgccagaaccagtgcttcaccaagcgccagtacccagagaccaagatcatcaagacagatggcaaagggtggggcctggtcgccaagagggacatcagaaagggagaatttgttaacgagtacgttggggagctgatcgacgaggaggagtgcatggcgagaatcaagcacgcacacgagaacgacatcacccacttctacatgctcactatagacaaggaccgtataatagacgctggccccaaaggaaactactctcgatttatgaatcacagctgccagcccaactgtgagaccctcaagtggacagtgaatggggacactcgtgtgggcctgtttgccgtctgtgacattcctgcagggacggagctgacttttaactacaacctcgattgtctgggcaatgaaaaaacggtctgccggtgtggagcctccaattgcagtggattcctcggggatagaccaaagacctcgacgaccctttcatcagaggaaaagggcaaaaagaccaagaagaaaacgaggcggcgcagagcaaaaggggaagggaagaggcagtcagaggacgagtgcttccgctgcggtgatggcgggcagctggtgctgtgtgaccgcaagttctgcaccaaggcctaccacctgtcctgcctgggccttggcaagcggcccttcgggaagtgggaatgtccttggcatcattgtgacgtgtgtggcaaaccttcgacttcattttgccacctctgccccaattcgttctgtaaggagcaccaggacgggacagccttcagctgcaccccggacgggcggtcctactgctgtgagcatgacttaggggcggcatcggtcagaagcaccaagactgagaagccccccccagagccagggaagccgaaggggaagaggcggcggcggaggggctggcggagagtcacagagggcaaatagcgccaggcggccgcttggccggatccaggggcggtgcagggcggccggccctgcctgcgggagagggcgagcatgaactggcccggaggacccagctcgagccgccaggacacagacgtacaggcctcctcgggagggagcgcctccccaccactgagccatcctcagcagcgtccgctgcgtctgcactgatgaccgtctgagcccagctcagcgttcctggacaaacagcctcactcctcagcgttaccgccacacttgaatttctccgaatgtcaaggttccctcccactctatttttttaggttaaagttaattggcatatggaatgttttaatctcctctgaaatgtgtagcgtaggcttttcccaagggtcgctagaaactcgtcttcgcgttgccccctttctggctctcagcgccgtcgccactcgggagaggctgggtgaggcccgtgtgaggactgaccctggattcctcgaaactgccattgtgatcattactctgctctttggaaatggctgtatcatttttttgtactaatgtgaattgttcctcagaaacgcttcttttccatcctagtgagaagctggccctgcaggtggtggcagcaatggtgttgtaagatttcctcccgtagttttttctcctcatggatttgaatgaaatgccaataacacgtccactttcaacgtgtagtttacgcggagcactttcgaggcctggccgggttgggcctacttctcacctgggcctatcttctgaactcgctaggttcttatcaacatttgggggataactttgtatatttttttcatttggcttttctttaccagtttctgatttttattctcaatatatttttgctaaacctatttcacaaatcaccaccgactgaagtgtgtgtttactgatgcggccctgagctccatggcgaaaggagtgactttgcagggcgtgagaccgcagtctgcttagagcacaggaagtgacaacttagggagccccgtagggcgctgcaggccccggggaccccagcacgtgggtctaaagagagacggagtctagctctcctgccacccagagtggcttccatctcagcactctgtgggtctggtgatggaagatgcagtctctgctgatcacatgtgccctctgccagggcacctactgagaggtgcggtcctgggggtggaggcctgcctggcaggtgtgcgtgcctcgtacgtgtgttatgggcactggtctaggccaggtatgacacccactctcctgtgagatttcactttagtttttaaaaggtccagttctacagagtgagacctatctatctgagtactacatatgttttaagacttggttctttttttgagggatccttgaccctgggaagtctggagcaccctgagaagggggcaccatgtgtgcctttgcccacgtgtcctgaggggctgcttgtctgggagggagggagagaacattcagcagcaggtgcttttttatggccttttcttaaaataacctaagggggacacatccatcttgcagagaagtttacagaactccccttgaaaactgctgctgaggctcctgttaaattttctgtggcatcttttatgccttggtaaaaactgcagtgtctttggacctgagagtggctactccgtggttttgtgacctgtaagcgtggggttcaggggtgtgtggccctgcagggtcccacgcctccctgagcactgactggaagtttcactggctggtggctgtcccttctcccatcagggtccccagcaaagttaactacacagaggacccaggggaaacgagctgtgtagccactgacttgctcgcgcggccgtggcctctgaggggcactcgccggttaagacagggtgggagtagtgctttccagttcagactctaacttctcccaaagtgtcctaagaaaatactggatcggctcatagatttatgctccttatgatgccctaacttggaaggttgttctagggacaggccgggcagtgtccccacacacaccttagagtcgaaggccccagggccccgctgtcacttgcccaaaagatcccttccggcaggtaagggactaccaatgcttacgtcaaaacagcagaatcggctttgcagtgcactttggggagcagatattaacttatttttgtgttggacagtagtgaaatcttgtgatttttaatcgctttgataatacttccaaattttatgatttttctgaaggaaataatgcaaacattttaaatatgtttctccccctttccaaaaactgttaaactaatgagcaagtaacactaactttgaatgtctctacaatacccgttgataactcagtggagccaggctttggggtagcggccctgagcttgcagggtttctcgccactggggctgaccacgcccccagctgtgaccgtgggtgtggctggctctcggccctgcccagctttgttctgaggacgtggtgacttcctgaacatcagcttcaatcctccatcattaatgtgaagcaaaacacaaaaaccgccccaatccctcaggattccttggcatccgaaaccagcatctgcacctaaacccatacccacccgtgtgcgcccacagggggatgtgtccgaatgggcagcttaaaatgtggtcacctgtgggggaaactcttcaggcacctgaagtgagaacccagctgtccgtcctcaggccggcctttcttccggcgacacccgtccatggctggctgggtccccttcgcagtgtttgtctgtcttgacatctaaaccccggcgtgtgcagtgcccatcttccaggactaccttattttccagaattaaacctgttttataattcaagttaatgcaaatgactgtcagttgccaaatatcttgatcctatgagtgtagttgatgactgtttgttagtcagtagagtaaaatgctgtgtccacggggtgtcacagcctcaccataccctgttgaggtgtgaaatgccccgtcagaaattaaatacaaacttaaatgtgcctattggtgtctaaacttcatacaatgtaaggtcagattccttttaggaatactgggtgctgtcaccaggtttgatagttagacttaaaaacttgaaattcactttttggggggagggatatactgaaatagagagttgagacttgccagttgggggaaaatagcatttaaaatggaaagctgtgtttggaaaattgtgtatgagtatttttgtattaaaaacattttaaaggcttttttcttaactta

SEQ ID NO: 34494 - DNA, 8390 bp, Homo sapiens
  source 1..8390: mol_type = unassigned DNA
tgttctaagaacggaagcatctgggctggatggaatttagcatcaagcagagtcccctttctgttcagagtgttgtaaagtgcataaagatgaagcaggcaccagaaatcctcggcagtgccaacgggaagactccgagctgcgaggtgaaccgcgagtgttctgtgttcctcagcaaagcccagctctccagtagcctgcaggagggggtcatgcagaagtttaacggccacgacgccctgccctttattccagccgacaagctgaaagatcttacttcccgggtgtttaatggagaacccggcgcacacgatgccaaactgcgttttgagtcccaggaaatgaaagggattgggacaccccctaacactacccctatcaaaaatggctctccagaaattaagctgaaaatcaccaaaacatacatgaatgggaagcctctctttgaatcttccatttgtggtgacagtgctgctgatgtgtctcagtcagaagaaaatggacaaaaaccagaaaacaaggcgagaaggaacaggaagaggagcataaaatatgactccttgctggagcagggccttgtcgaagcagctcttgtgtctaagatctcaagtccttcagataaaaagattccagctaagaaagagtcttgtccaaacactggaagagacaaagaccacctgttgaaatacaacgttggtgatttggtgtggtccaaagtgtcgggttacccttggtggccttgcatggtttctgcagatccactccttcacagctataccaaacttaaaggtcagaaaaagagtgcacgccagtatcacgtacagttctttggtgacgccccagaaagagcttggatatttgagaagagcctcgtagcttttgaaggagaaggacagtttgaaaaattatgccaggaaagtgccaagcaggcacccacgaaagctgagaaaattaagctattgaaaccaatttcagggaaattgagggcccagtgggaaatgggcattgttcaagcagaagaagctgcaagcatgtcagtggaggagcggaaagccaagttcacctttctctatgtgggggaccagcttcatctcaaccctcaagtagccaaggaggctggcattgctgcagagtctttgggagaaatggcagaatcctcaggagtcagtgaagaagctgctgaaaaccccaagtctgtgagagaagagtgcattcccatgaagagaaggcggagggccaaactgtgtagctctgcagagaccctggagagtcaccccgacatagggaagagtactcctcaaaagacggcagaggctgaccccagaagaggagtagggtctcctcctgggaggaagaagaccacagtctccatgccacgaagcaggaagggagatgcagcatcccagtttttggtcttctgtcaaaaacacagggatgaggtggtagctgagcacccagatgcttcaggtgaggagattgaagagctgctcaggtcacagtggagtctgctgagtgagaagcagagagcacgctacaacaccaagtttgccctggtggcccctgtccaggctgaagaagactctggtaatgtaaatgggaaaaaaagaaaccacacaaagaggatacaggaccctacagaagatgctgaagctgaggacacacccaggaaaagactcaggacggacaagcacagtcttcggaagagagacacaatcactgacaaaacggccagaacaagctcttacaaggccatggaggcagcctcctcgctcaagagccaggcagcaacgaaaaatctgtctgatgcatgtaaaccactgaagaagcgaaatcgggcttccacggcagcatcttcagctcttgggtttagcaaaagttcatctccttctgcatccttaactgagaatgagcttttgtgggagcccacaccagtcaagttggatttgaacccagctgctctgtactgcacttagaatgatgtaatattccaggatgctgctgcaggtggcgtatcatcgtacacactcagtgacatttctatcacaatcattttatggaagatgtgtgataatctgtttttactggtattaataaacacatacaatgaagaaaacagataacaaattttaagaccaaggtaagataactaatcaaggccatttaatccgtcacattcatctcataatagaaacacgttcatattccagtggtcaatgtagatttcaagttgaaaggcagtccctttagttgggggctgtccagagctgcagcagggctttgcacggaaggggtggccctgttagagttgcttctcctctagtttgtaacttactggacttttgtggaaaatatcagcgtcgctaccctcagaaacaaactaacagcacacgttaggaggagtcctcatcagctgttctcattgccagtgagatatattcagtattgtagatactacactaatttccaacataagaggcaggaagagttttgattctatccttttttactaaacagttttattatgacactagatacagtaaatttttagaaaaaaataccatttacagtattattgtgaaccatttaacccttttgatccaaggccccggaccaaggggatactgtaatcaggttatgtacaccaacctctgcatcagttgcttctatagagcatcagccctcatgtttcattgtcttaatgtcggggagcagcctggtgtcctgccccaggtgtccgcatttttgcatggtaaggaaaaggcttacttgcccttcagctcataaaagcagaaggtgtgctattcacagtaccatgcgagtagcccacagttaattcccggcagattctttggctgtgttttatctttaatgaacgtttctgactaatattttgttgtaaaccattaagtaatgtaacgcatgtaagatgcttagggtgcctggccaggactccgtggtttcctgttgtgacagtaataatggttataataataaaaatgataaaattgccatcattctatttttatccaaaagtataaattttgctttggcatgaaaagtggtcctcttgactgcattatgcatgcgaggatgaaataaacctagaagtggcagaacactggatttgtgtgtgtggcgctttagggtgctggactgtatggctgagggctggttgggttcctctattggctctgctcaaatgttgcaggatacatagccccaaagatggtctaggagcaatctaagctgtgttactccaaaggacatgaaaaagctcaagagtaaaattaaaattctcaaaaaaaaaccccacgaaatttaaagatggggaaaaaaagatggtataaaaatggctctggttcaataagcagtcacccaaagtaaagactctatcttgaaaggcttttggtgaaaatgaagggatttcatttgaaattacagcatgatgaattttgcatgggtggccagccagctagcccataactgatagatgcattagaagtcagccagcgcataggtgctccctctatattatggagaaagcaaaaccctgcaaatgaccaaatggtgtccaaagagcagcatgacattggcatcagctgaataaccaggggcacatgggggaacgtggatgggaatgatagtgtatctcagcggggggtggggtgacatcgttccctggggacattgggaaggtgggcaggggcaagtgaactcagcactctgcagtgagagggacagtcccatgtgtggcagcattgtcccacttcagatgccaggagtgggctcatcctagaggagcggagttttccgagaggaccatctcctggtttcctgaaggaggtgggtggaaacggctcttgtttgaaagaacttagggaggaccattggcttgccaagagtacagaaattcattatgctgctaatttaacgtggaattccttcatttcataagaacctcaaaataatggtgatacattctagccttaagacatttgaattgccggttgttgaggtgaattttgtttgtcatacatggaaccattttagtcccatttgactcacttcagaccatcttccacacactatgtctgtgcttggagaggggaggtggctctccagtgtaaaacttgaggcattcactagaggtgaaaacttgtcagaatatataaaagcttagattgtagctgttctaaaaacgtaagtactccattgtaatagggtggcatcttcaggtagtgcacatattggcaatagaggtcctgaattgtttttctaagactgatctgagagccattgggccatcaagcctttatatatctgcttctaaaattgccccacctgctctagatggatctttgggcctttcctcagtgttcatgcaaaaattaaatgtcttttttcagcatactgactccaggtgtagttacatctcagtgctgtcttgagtatatattttatctcttatacctgtatctcccaactagaaacagctccagtgtttttaagagaatgtttcttaaaaccaataggaaacttaagcgaggtttcatgacacaacctttcatgtcgtgaaaggcagagggtgactgtgtgtgatgtgcagagtccttggacaggagtcgggggctcctctgtcccactgctgcttcttgagtgggtggagtggtgcttagaggatctccgagaggtccccgcagctctagggagatctgattttgtgttttttgtttaagtacttcacacagaagcctaggtagatttaaaatggggtgctcagggactggggaacaagacggggtggggtggggagatgggcatttggagagtctcatgtagctggagacgttaagagctgagcacaccacaggaaaggagggaggatgctgtgtgagagccatgctgtcaggagcaagcttgctgctcctgtgctgccctggccctggccttgcttgcccatggtgtgtgtgtccagaggtgtgtgtgaggctgccagaacaagtgctgggtctgtcacagagaagtttaaaaaagaaaactaagattataaattagcatctagttccaaaaccaaaaaaagtgcctgtggatgtatataaaattaagatgataagaaagtgctcctgagaaggctcttgccagaagcctgatgtgagtgtgtggcacctgtgatggcagggctgtgagctgggcttctgtcctcctctgtgtcccggcatggaagccagtataagcatttccaaatgagggaaaagtccttggctcgtttgatccagttgagttgaaagggttgccttggcagcagaggctcctctgatggctgacatcagtcactgcgtctgggcctgagacgtgcatggagggctgtaaagccacggattcccctcgctggagaggctcctgtctgatagcggtagatgaaaaataaggtcgttatgactttggcaacttgcttcatttctttttcatttgacttacaacacacttctctaacatctagcccttttaaatttttaattaatttcaaagcttcctctggccaggtagacttttgtatacagaccaggtgagagcccttttgccttagtgtgaaaatgtaacattttatgcttttaaaatcaatagattcatcaccttagttttttaaaaaaaatctataaatagggtaattgctgaggtgtgcggtttatctttgagatgataaagctaaattatagtcttttgccagagaaactgaggtaactgtcattagaaaaggtttcttaaaatactcacaaagctgttattggcttcttaacttctaaaatttggggggtcttgcatttatttattatttatttatttatttatttagagacagagtctcaccctgttggccaggctggagtgcagtaagtggcacaatctcggctcactgcaacctccgcctccttggttccagcaattcttctgcctcagcctcccgagtagctgggactacaagcggctgccaccacacctggctatttttttttgtatttttagtagagacagggtttcgccatattggccaggctggtcttgaactcctgacctcgtgatccacccgcctcaccctcccaaaatgctgggattacaggcgtaagccactgcacctggcggggtcttgcttattttaaaagaaatattctgattcatattttaggactttttgtcaacgaaattggttttgatccctttgggtaccatttttattgttttatgtagaatgttagaaattaccactaatttacctggcagtgatgtcaaattgactgtaattagcaggtagaaaattatttgtattatattcatctgattcctatactggatgagcaaggagcatgcttcctttgggacattcttacagcagggtgtctctccaacagcccgacaggcctcatctttttggttggatacctttgaactccatggttacgtgttaggtccacatttgtgtttttttctagcctacctatagttgttggcctttttgcatataactctcgggtaatattttgaagcatgctgaccatccaggcatatagtattttcaagaaatgactgaggtaggggtgggggtcctggtccggctgatgggggtttgctcagcactgtgccagtggaagcaggtgtattgtgggcagttttgtcattgtcctcaagtccttcgcagacagtgcacagcctgctgtctgcagtcggccagaccaggctcctccccagcacactccctgtgggatggccgctgctcaggacacagtgggacaaagttgggttgataggatattttagattcattttacctttgacaagggcaggccttgaattgggagcagcagccacctggcctcactctggccacaggtgacacttggtccttgctgccacctgcttggggctatgtggctacggctacacaaaagcctgtgcaggttagaagacgactgtggtgtgcagtggtgctctgggagtggagacttcctctgttctcagagactcacccccagccctgaccctagaatttagggatagccaggaagtttctagtttgtgtaacctagaagggtcactttaataaaaattgttatgaactatagtattttagatgatgagtgacttattttaattccactttaacattttactgtgctgttaacttggaagacctgtttgaaattagtcttgatttcacactcatttaatctgctgagcacagggctgttgtcatttgtaaacgcaaacactgtggaggtacttctcgccatcagcttccttctttacaaaaccatcatttcaacatgaaaattatgtcagtttatagaaatatttattgttcaaggtctgtaattgtatttcaaaaacgatgtcgtattcaagttgtgaagggatttgttttgtcaaaaaattaaaaactcaatgtgtatgacgccactctgaagagtaggtgagcgctttgcagtcacagaaggtggcatctgactgcggctcatacaggtcaccctgaagggccacgtgcttttagcagttggctggaatgtgttcactaggttccgttatgtttggtaatatcatcttgaaaagtccctgtaatagatcaaggagactgcattccctgccctgaaggaatgtatttctaaggcaaataggcaacttggtactatcttattctgagtagagagtggagaaagtattttcagactgaagaaaactttgaaaagtcaggagctaagctgctcggagctcagtgccgcagcatggctgtggtggacgcgggaaacaacgggaaagttcttgacagagtctgtgtccgctcagtccctgcacttttcctttccaaatgcatctcgttggatatggaatagatcgtagatgttgtagactgagatttgggactatgttgggaccgtacaggtgaatgtgccacctccacaaatggcttctccgagtgagtcacgtcacctggtgcgtggaggtggagcctgcggctggagtaaggcttgctgtgggacgccctcgtactttgctctccttgcgggtggttgccgagccgagagcattggatcctccccgactgtggctagttgtctgtccggtggctgggagggggtgtggtgggaaaaagtcggaatctctgcaatctgtgtcatggactgtactattgtaaggtctatattctgtatgtgggtcccagaccctgatcaggaaatgagcctcatgtgtgtcgttaacatttatatatttccattcaaaatatgtattcagtgtttatttcctcaaaacagactttgttaatgtaggaaatctctccaagtggaaacgtgctaactttttctgtaaatctgaaataaaaggtgctgttccttcctctg

SEQ ID NO: 34495 - DNA, 5109 bp, Homo sapiens
  source 1..5109: mol_type = unassigned DNA
gcatgagccaccgtgcctgtcctagaaccactggtaactcttaactgagacaagatttcgccatgttgcccaggctggtctcgaacttctgagctcaagcgatctacctgcctcgtcctcccaaagtgttggaattgcaggtgtgagccactgcacccggcccttgcctcatgtttgaatgataatttacctgggcataaaattctggacacttgtggtggcacgagctgtctgcttttctgtggagactgcgggttgcagacaccagcagccccctattgctgcacgtcaggtgtcctccacctcagtactgtggacatctcgggccgcatagccctgttgcgcgggcatcctgtgcgttgcaggagatgcagcagcatccatgaccgcaacccatcagagtgttctaagaacggaagcatctgggctggatggaatttagcatcaagcagagtcccctttctgttcagagtgttgtaaagtgcataaagatgaagcaggcaccagaaatcctcggcagtgccaacgggaagactccgagctgcgaggtgaaccgcgagtgttctgtgttcctcagcaaagcccagctctccagtagcctgcaggagggggtcatgcagaagtttaacggccacgacgccctgccctttattccagccgacaagctgaaagatcttacttcccgggtgtttaatggagaacccggcgcacacgatgccaaactgcgttttgagtcccaggaaatgaaagggattgggacaccccctaacactacccctatcaaaaatggctctccagaaattaagctgaaaatcaccaaaacatacatgaatgggaagcctctctttgaatcttccatttgtggtgacagtgctgctgatgtgtctcagtcagaagaaaatggacaaaaaccagaaaacaaggcgagaaggaacaggaagaggagcataaaatatgactccttgctggagcagggccttgtcgaagcagctcttgtgtctaagatctcaagtccttcagataaaaagattccagctaagaaagagtcttgtccaaacactggaagagacaaagaccacctgttgaaatacaacgttggtgatttggtgtggtccaaagtgtcgggttacccttggtggccttgcatggtttctgcagatccactccttcacagctataccaaacttaaaggtcagaaaaagagtgcacgccagtatcacgtacagttctttggtgacgccccagaaagagcttggatatttgagaagagcctcgtagcttttgaaggagaaggacagtttgaaaaattatgccaggaaagtgccaagcaggcacccacgaaagctgagaaaattaagctattgaaaccaatttcagggaaattgagggcccagtgggaaatgggcattgttcaagcagaagaagctgcaagcatgtcagtggaggagcggaaagccaagttcacctttctctatgtgggggaccagcttcatctcaaccctcaagtagccaaggaggctggcattgctgcagagtctttgggagaaatggcagaatcctcaggagtcagtgaagaagctgctgaaaaccccaagtctgtgagagaagagtgcattcccatgaagagaaggcggagggccaaactgtgtagctctgcagagaccctggagagtcaccccgacatagggaagagtactcctcaaaagacggcagaggctgaccccagaagaggagtagggtctcctcctgggaggaagaagaccacagtctccatgccacgaagcaggaagggagatgcagcatcccagtttttggtcttctgtcaaaaacacagggatgaggtggtagctgagcacccagatgcttcaggtgaggagattgaagagctgctcaggtcacagtggagtctgctgagtgagaagcagagagcacgctacaacaccaagtttgccctggtggcccctgtccaggctgaagaagactctggtaatgtaaatgggaaaaaaagaaaccacacaaagaggatacaggaccctacagaagatgctgaagctgaggacacacccaggaaaagactcaggacggacaagcacagtcttcggaagagagacacaatcactgacaaaacggccagaacaagctcttacaaggccatggaggcagcctcctcgctcaagagccaggcagcaacgaaaaatctgtctgatgcatgtaaaccactgaagaagcgaaatcgggcttccacggcagcatcttcagctcttgggtttagcaaaagttcatctccttctgcatccttaactgagaatgaggtaaaataataataataacgataaccatggcattggtatgaaggccatttagctgcccacgctgcagtgtgagtaatgctcagacttcataagcgcagcattggtgctcactgccagtgcagatgttttagggcctcttggctaactcagattcatgaaatggacaaacagtgcactatgttagtttatttgagcactttttatacacacgcacacagtgtctgtgtacatgtacagatatacttcagtcttgatgcagtttcatagttcttaaaatctgtctgaagaatgttgtgttctgtgtagccctcacactgtaagagttcacatggaagtaagtctgcgttggttctgaaagggcacagtgtcagttgagctgacatatactgggtggggtggaaggcgactcacacaccacacctgattcctgttgcttccagacctaggctcatggaggaagccaaagatttctttgttctcatgcatttcatggctttggtcctttaaattctggcacatttttagttacttgagtgttgaggtgagtcagaactaccattgtaatatgactcctgtgttctggacttgcagagtacatgatagcaaaataaagccatttggggctgctgcctgccatcattgtaacatgacacttagactttattatcaaacctaaattttttgccgttgccaaaaacaacaaatagccacagaacgtaggtgtgacacttttttgttcggaggtagttttggtttcctgatttttagggattaccttcatagagctttggagttttaatttcttgttatttggttctccgtgatgctgtttttctcattgtagacatgggtcctgtttttgtcatgtttatgaggagatgataactgggggcccttttggaacagggtagtgaggcaagggttggacaggccccttactcttgctgagtcagaaggcggcacttctggccaggtctctgccatggtccccaggaaggatggggtgtgcctcagttgtttccactcattagaggagtgtaggccttccagtgcaggaaggtcagggacctaggcaacctgggcggggctcatagagctctgcggcttgccactctgaatcctcagcgaccactcctccgagtgggattttctgcagggactcaaaccaactcagtggtggtcgagacctgttcacggatggtgggactggggctgctttacagtttgatacgtgtagataattaagcattttgtgatgtttggacacactggagaaaaggcagtaagaattatttactgaaacatctaggagcttactgaaatatgaaaaggcaaattttatacaaattatttttcctttttcctttctttcttgtccaagttcaggttaaaatcttagaaaattaaatgaaaggtcatttacagttccaaagaagaatattaaacatttttcacttaagttgagatttttgctttaaagagcttttaatgagtttttctgttatcataattttggtccggttattcacttgagttgttgcttatactgttgtcaggtacagtagagagaacatggagcctgctgagatcttctctgttattcctgatcctaagtcatgtatatcgaaggctttgatttagagtaatgcatgaggccagtgtagcggggtcgaggcctgcccatgagtcaggggagctcagtctccctggcctaggcagttgtcctgaccttgagaagacatagatgaagcattttatcatcattagacttaaattttaattcttcagaatgtcagaagttgataggttgttaaatacatttatataatacattaaatatgtgaaattaatacaccttcctacattttgaaggtgatgcatagatcccatagtgtgcatcatgttccttatatgaaaacgtttaaattactgggtcttttccattaaactacttttgtatggcttagataaatcttccattagtgttcatttttatagaattatgctgttaaaactactttaggtgaacaaataaacttgtctattatatattaacgcgactgaactacagtaaatgtttgtgatgtttccaatgctgaatgcctgttagcatatgaggcaaagtgtagtgttataaaaaacagcctgttgactgctgggcccgattctgatatgagttaggtgaccatgagaattgctgtttgaggtccacactgacacacacccattgggtcacaccccctttgcatgtttgtatttcctccctttcatcacatttgtttgaaataaggtacttttatagggttggtatttcagaacactttaggtcatgttgtagtttaaattcttcttgaaaaaggtatatgtgataaataaaaatttttattggaataattattacatggtactacatcaccctgaggaagagaataaattaaaattacacacttgcatgacaaaggcctgtgaaggaattaatgtgatttaagtgttttgtaacttcattttttattcctttagtagagcaaattcttatttttttcgccttcactggtaacagcttttgtgggagcccacaccagtcaagttggatttgaacccagctgctctgtactgcacttagaatgatgtaatattccaggatgctgctgcaggtggcgtatcatcgtacacactcagtgacatttctatcacaatcattttatggaagatgtgtgataatctgtttttactggtattaataaacacatacaatgaagaaaacagataacaaattttaagaccaaggtaagataac

SEQ ID NO: 34496 - DNA, 1316 bp, Homo sapiens
  source 1..1316: mol_type = unassigned DNA
tggtcttgaactcctgaccttgtgatccgctcgcctcagcctcccaaagtgctgggattacaggcatgagccaccgtgcctgtcctagaaccactggtaactcttaactgagacaagatttcgccatgttgcccaggctggtctcgaacttctgagctcaagcgatctacctgcctcgtcctcccaaagtgttggaattgcaggtgtgagccactgcacccggcccttgcctcatgtttgaatgataatttacctgggcataaaattctggacacttgtggtggcacgagctgtctgcttttctgtggagactgcgggttgcagacaccagcagccccctattgctgcacgtcaggtgtcctccacctcagtactgtggacatctcgggccgcatagccctgttgcgcgggcatcctgtgcgttgcaggagatgcagcagcatccatgaccgcaacccatcagagtgttctaagaacggaagcatctgggctggatggaatttagcatcaagcagagtcccctttctgttcagagtgttgtaaagtgcataaagatgaagcaggcaccagaaatcctcggcagtgccaacgggaagactccgagctgcgaggtgaaccgcgagtgttctgtgttcctcagcaaagcccagctctccagtagcctgcaggagggggtcatgcagaagtttaacggccacgacgccctgccctttattccagccgacaagctgaaagatcttacttcccgggtgtttaatggagaacccggcgcacacgatgccaaactgcgttttgagtcccaggaaatgaaagggattgggacaccccctaacactacccctatcaaaaatggctctccagaaattaagctgaaaatcaccaaaacatacatgaatgggaagcctctctttgaatcttccatttgtggtgacagtgctgctgatgtgtctcagtcagaagaaaatggacaaaaaccagaaaacaaggcgagaaggaacaggaagaggagcataaaatatgactccttgctggagcagggccttgtcgaagcagctcttgtgtctaagatctcaagtccttcagataaaaagattccagctaagaaagagtcttgtccaaacactggaagagacaaagaccacctgttgaaatacaacgttggtgatttggtgtggtccaaagtgtcgggttacccttggtggccttgcatggtttctgcagatccactccttcacagctataccaaacttaaaggtattttcaaatcaaagaagtttgaacacttaaaaacaagtcaaattgtactgaaagattaa

SEQ ID NO: 34497 - DNA, 8568 bp, Homo sapiens
  source 1..8568: mol_type = unassigned DNA
cagctgtctgcttttctgtggagactgcgggttgcagacaccagcagccccctattgctgcacgtcaggtgtcctccacctcagtactgtggacatctcgggccgcatagccctgttgcgcgggcatcctgtgcgttgcaggagatgcagcagcatccatgaccgcaacccatcagagtgttctaagaacggaagcatctgggctggatggaatttagcatcaagcagagtcccctttctgttcagagtgttgtaaagtgcataaagatgaagcaggcaccagaaatcctcggcagtgccaacgggaagactccgagctgcgaggtgaaccgcgagtgttctgtgttcctcagcaaagcccagctctccagtagcctgcaggagggggtcatgcagaagtttaacggccacgacgccctgccctttattccagccgacaagctgaaagatcttacttcccgggtgtttaatggagaacccggcgcacacgatgccaaactgcgttttgagtcccaggaaatgaaagggattgggacaccccctaacactacccctatcaaaaatggctctccagaaattaagctgaaaatcaccaaaacatacatgaatgggaagcctctctttgaatcttccatttgtggtgacagtgctgctgatgtgtctcagtcagaagaaaatggacaaaaaccagaaaacaaggcgagaaggaacaggaagaggagcataaaatatgactccttgctggagcagggccttgtcgaagcagctcttgtgtctaagatctcaagtccttcagataaaaagattccagctaagaaagagtcttgtccaaacactggaagagacaaagaccacctgttgaaatacaacgttggtgatttggtgtggtccaaagtgtcgggttacccttggtggccttgcatggtttctgcagatccactccttcacagctataccaaacttaaaggtcagaaaaagagtgcacgccagtatcacgtacagttctttggtgacgccccagaaagagcttggatatttgagaagagcctcgtagcttttgaaggagaaggacagtttgaaaaattatgccaggaaagtgccaagcaggcacccacgaaagctgagaaaattaagctattgaaaccaatttcagggaaattgagggcccagtgggaaatgggcattgttcaagcagaagaagctgcaagcatgtcagtggaggagcggaaagccaagttcacctttctctatgtgggggaccagcttcatctcaaccctcaagtagccaaggaggctggcattgctgcagagtctttgggagaaatggcagaatcctcaggagtcagtgaagaagctgctgaaaaccccaagtctgtgagagaagagtgcattcccatgaagagaaggcggagggccaaactgtgtagctctgcagagaccctggagagtcaccccgacatagggaagagtactcctcaaaagacggcagaggctgaccccagaagaggagtagggtctcctcctgggaggaagaagaccacagtctccatgccacgaagcaggaagggagatgcagcatcccagtttttggtcttctgtcaaaaacacagggatgaggtggtagctgagcacccagatgcttcaggtgaggagattgaagagctgctcaggtcacagtggagtctgctgagtgagaagcagagagcacgctacaacaccaagtttgccctggtggcccctgtccaggctgaagaagactctggtaatgtaaatgggaaaaaaagaaaccacacaaagaggatacaggaccctacagaagatgctgaagctgaggacacacccaggaaaagactcaggacggacaagcacagtcttcggaagagagacacaatcactgacaaaacggccagaacaagctcttacaaggccatggaggcagcctcctcgctcaagagccaggcagcaacgaaaaatctgtctgatgcatgtaaaccactgaagaagcgaaatcgggcttccacggcagcatcttcagctcttgggtttagcaaaagttcatctccttctgcatccttaactgagaatgagcttttgtgggagcccacaccagtcaagttggatttgaacccagctgctctgtactgcacttagaatgatgtaatattccaggatgctgctgcaggtggcgtatcatcgtacacactcagtgacatttctatcacaatcattttatggaagatgtgtgataatctgtttttactggtattaataaacacatacaatgaagaaaacagataacaaattttaagaccaaggtaagataactaatcaaggccatttaatccgtcacattcatctcataatagaaacacgttcatattccagtggtcaatgtagatttcaagttgaaaggcagtccctttagttgggggctgtccagagctgcagcagggctttgcacggaaggggtggccctgttagagttgcttctcctctagtttgtaacttactggacttttgtggaaaatatcagcgtcgctaccctcagaaacaaactaacagcacacgttaggaggagtcctcatcagctgttctcattgccagtgagatatattcagtattgtagatactacactaatttccaacataagaggcaggaagagttttgattctatccttttttactaaacagttttattatgacactagatacagtaaatttttagaaaaaaataccatttacagtattattgtgaaccatttaacccttttgatccaaggccccggaccaaggggatactgtaatcaggttatgtacaccaacctctgcatcagttgcttctatagagcatcagccctcatgtttcattgtcttaatgtcggggagcagcctggtgtcctgccccaggtgtccgcatttttgcatggtaaggaaaaggcttacttgcccttcagctcataaaagcagaaggtgtgctattcacagtaccatgcgagtagcccacagttaattcccggcagattctttggctgtgttttatctttaatgaacgtttctgactaatattttgttgtaaaccattaagtaatgtaacgcatgtaagatgcttagggtgcctggccaggactccgtggtttcctgttgtgacagtaataatggttataataataaaaatgataaaattgccatcattctatttttatccaaaagtataaattttgctttggcatgaaaagtggtcctcttgactgcattatgcatgcgaggatgaaataaacctagaagtggcagaacactggatttgtgtgtgtggcgctttagggtgctggactgtatggctgagggctggttgggttcctctattggctctgctcaaatgttgcaggatacatagccccaaagatggtctaggagcaatctaagctgtgttactccaaaggacatgaaaaagctcaagagtaaaattaaaattctcaaaaaaaaaccccacgaaatttaaagatggggaaaaaaagatggtataaaaatggctctggttcaataagcagtcacccaaagtaaagactctatcttgaaaggcttttggtgaaaatgaagggatttcatttgaaattacagcatgatgaattttgcatgggtggccagccagctagcccataactgatagatgcattagaagtcagccagcgcataggtgctccctctatattatggagaaagcaaaaccctgcaaatgaccaaatggtgtccaaagagcagcatgacattggcatcagctgaataaccaggggcacatgggggaacgtggatgggaatgatagtgtatctcagcggggggtggggtgacatcgttccctggggacattgggaaggtgggcaggggcaagtgaactcagcactctgcagtgagagggacagtcccatgtgtggcagcattgtcccacttcagatgccaggagtgggctcatcctagaggagcggagttttccgagaggaccatctcctggtttcctgaaggaggtgggtggaaacggctcttgtttgaaagaacttagggaggaccattggcttgccaagagtacagaaattcattatgctgctaatttaacgtggaattccttcatttcataagaacctcaaaataatggtgatacattctagccttaagacatttgaattgccggttgttgaggtgaattttgtttgtcatacatggaaccattttagtcccatttgactcacttcagaccatcttccacacactatgtctgtgcttggagaggggaggtggctctccagtgtaaaacttgaggcattcactagaggtgaaaacttgtcagaatatataaaagcttagattgtagctgttctaaaaacgtaagtactccattgtaatagggtggcatcttcaggtagtgcacatattggcaatagaggtcctgaattgtttttctaagactgatctgagagccattgggccatcaagcctttatatatctgcttctaaaattgccccacctgctctagatggatctttgggcctttcctcagtgttcatgcaaaaattaaatgtcttttttcagcatactgactccaggtgtagttacatctcagtgctgtcttgagtatatattttatctcttatacctgtatctcccaactagaaacagctccagtgtttttaagagaatgtttcttaaaaccaataggaaacttaagcgaggtttcatgacacaacctttcatgtcgtgaaaggcagagggtgactgtgtgtgatgtgcagagtccttggacaggagtcgggggctcctctgtcccactgctgcttcttgagtgggtggagtggtgcttagaggatctccgagaggtccccgcagctctagggagatctgattttgtgttttttgtttaagtacttcacacagaagcctaggtagatttaaaatggggtgctcagggactggggaacaagacggggtggggtggggagatgggcatttggagagtctcatgtagctggagacgttaagagctgagcacaccacaggaaaggagggaggatgctgtgtgagagccatgctgtcaggagcaagcttgctgctcctgtgctgccctggccctggccttgcttgcccatggtgtgtgtgtccagaggtgtgtgtgaggctgccagaacaagtgctgggtctgtcacagagaagtttaaaaaagaaaactaagattataaattagcatctagttccaaaaccaaaaaaagtgcctgtggatgtatataaaattaagatgataagaaagtgctcctgagaaggctcttgccagaagcctgatgtgagtgtgtggcacctgtgatggcagggctgtgagctgggcttctgtcctcctctgtgtcccggcatggaagccagtataagcatttccaaatgagggaaaagtccttggctcgtttgatccagttgagttgaaagggttgccttggcagcagaggctcctctgatggctgacatcagtcactgcgtctgggcctgagacgtgcatggagggctgtaaagccacggattcccctcgctggagaggctcctgtctgatagcggtagatgaaaaataaggtcgttatgactttggcaacttgcttcatttctttttcatttgacttacaacacacttctctaacatctagcccttttaaatttttaattaatttcaaagcttcctctggccaggtagacttttgtatacagaccaggtgagagcccttttgccttagtgtgaaaatgtaacattttatgcttttaaaatcaatagattcatcaccttagttttttaaaaaaaatctataaatagggtaattgctgaggtgtgcggtttatctttgagatgataaagctaaattatagtcttttgccagagaaactgaggtaactgtcattagaaaaggtttcttaaaatactcacaaagctgttattggcttcttaacttctaaaatttggggggtcttgcatttatttattatttatttatttatttatttagagacagagtctcaccctgttggccaggctggagtgcagtaagtggcacaatctcggctcactgcaacctccgcctccttggttccagcaattcttctgcctcagcctcccgagtagctgggactacaagcggctgccaccacacctggctatttttttttgtatttttagtagagacagggtttcgccatattggccaggctggtcttgaactcctgacctcgtgatccacccgcctcaccctcccaaaatgctgggattacaggcgtaagccactgcacctggcggggtcttgcttattttaaaagaaatattctgattcatattttaggactttttgtcaacgaaattggttttgatccctttgggtaccatttttattgttttatgtagaatgttagaaattaccactaatttacctggcagtgatgtcaaattgactgtaattagcaggtagaaaattatttgtattatattcatctgattcctatactggatgagcaaggagcatgcttcctttgggacattcttacagcagggtgtctctccaacagcccgacaggcctcatctttttggttggatacctttgaactccatggttacgtgttaggtccacatttgtgtttttttctagcctacctatagttgttggcctttttgcatataactctcgggtaatattttgaagcatgctgaccatccaggcatatagtattttcaagaaatgactgaggtaggggtgggggtcctggtccggctgatgggggtttgctcagcactgtgccagtggaagcaggtgtattgtgggcagttttgtcattgtcctcaagtccttcgcagacagtgcacagcctgctgtctgcagtcggccagaccaggctcctccccagcacactccctgtgggatggccgctgctcaggacacagtgggacaaagttgggttgataggatattttagattcattttacctttgacaagggcaggccttgaattgggagcagcagccacctggcctcactctggccacaggtgacacttggtccttgctgccacctgcttggggctatgtggctacggctacacaaaagcctgtgcaggttagaagacgactgtggtgtgcagtggtgctctgggagtggagacttcctctgttctcagagactcacccccagccctgaccctagaatttagggatagccaggaagtttctagtttgtgtaacctagaagggtcactttaataaaaattgttatgaactatagtattttagatgatgagtgacttattttaattccactttaacattttactgtgctgttaacttggaagacctgtttgaaattagtcttgatttcacactcatttaatctgctgagcacagggctgttgtcatttgtaaacgcaaacactgtggaggtacttctcgccatcagcttccttctttacaaaaccatcatttcaacatgaaaattatgtcagtttatagaaatatttattgttcaaggtctgtaattgtatttcaaaaacgatgtcgtattcaagttgtgaagggatttgttttgtcaaaaaattaaaaactcaatgtgtatgacgccactctgaagagtaggtgagcgctttgcagtcacagaaggtggcatctgactgcggctcatacaggtcaccctgaagggccacgtgcttttagcagttggctggaatgtgttcactaggttccgttatgtttggtaatatcatcttgaaaagtccctgtaatagatcaaggagactgcattccctgccctgaaggaatgtatttctaaggcaaataggcaacttggtactatcttattctgagtagagagtggagaaagtattttcagactgaagaaaactttgaaaagtcaggagctaagctgctcggagctcagtgccgcagcatggctgtggtggacgcgggaaacaacgggaaagttcttgacagagtctgtgtccgctcagtccctgcacttttcctttccaaatgcatctcgttggatatggaatagatcgtagatgttgtagactgagatttgggactatgttgggaccgtacaggtgaatgtgccacctccacaaatggcttctccgagtgagtcacgtcacctggtgcgtggaggtggagcctgcggctggagtaaggcttgctgtgggacgccctcgtactttgctctccttgcgggtggttgccgagccgagagcattggatcctccccgactgtggctagttgtctgtccggtggctgggagggggtgtggtgggaaaaagtcggaatctctgcaatctgtgtcatggactgtactattgtaaggtctatattctgtatgtgggtcccagaccctgatcaggaaatgagcctcatgtgtgtcgttaacatttatatatttccattcaaaatatgtattcagtgtttatttcctcaaaacagactttgttaatgtaggaaatctctccaagtggaaacgtgctaactttttctgtaaatctgaaataaaaggtgctgttccttcctctg

SEQ ID NO: 34498 - DNA, 528 bp, Homo sapiens
  source 1..528: mol_type = unassigned DNA
gccgccgccgccgccccctccccgcctgggccctaccgccgcacggccccggccccctcccagcctgccgctccggagagccgcccgccgaggatgcgacgcaccgcagagatgggtctcgccatcaccatgttgcccagtctggtctccaactcctgggctcaagcgatcctcctgccttggtctcccaaagtgctgggattacagagacaagatttcgccatgttgcccaggctggtctcgaacttctgagctcaagcgatctacctgcctcgtcctcccaaagtgttggaattgcaggtgtgagccactgcacccggcccttgcctcatgtttgaatgataatttacctgggcataaaattctggacacttgtggtggcacgagtgttctaagaacggaagcatctgggctggatggaatttagcatcaagcagagtcccctttctgttcagagtgttgtaaagtgcataaagatgaagcaggcaccagaaatcctcggcagtgccaacgggaagactccgagct

SEQ ID NO: 34499 - DNA, 4251 bp, Homo sapiens
  source 1..4251: mol_type = unassigned DNA
cgctgcgcccgccgccgccgccgccccctccccgcctgggccctaccgccgcacggccccggccccctcccagcctgccgctccggagagccgcccgccgaggatgcgacgcaccgcagtgttctaagaacggaagcatctgggctggatggaatttagcatcaagcagagtcccctttctgttcagagtgttgtaaagtgcataaagatgaagcaggcaccagaaatcctcggcagtgccaacgggaagactccgagctgcgaggtgaaccgcgagtgttctgtgttcctcagcaaagcccagctctccagtagcctgcaggagggggtcatgcagaagtttaacggccacgacgccctgccctttattccagccgacaagctgaaagatcttacttcccgggtgtttaatggagaacccggcgcacacgatgccaaactgcgttttgagtcccaggaaatgaaagggattgggacaccccctaacactacccctatcaaaaatggctctccagaaattaagctgaaaatcaccaaaacatacatgaatgggaagcctctctttgaatcttccatttgtggtgacagtgctgctgatgtgtctcagtcagaagaaaatggacaaaaaccagaaaacaaggcgagaaggaacaggaagaggagcataaaatatgactccttgctggagcagggccttgtcgaagcagctcttgtgtctaagatctcaagtccttcagataaaaagattccagctaagaaagagtcttgtccaaacactggaagagacaaagaccacctgttgaaatacaacgttggtgatttggtgtggtccaaagtgtcgggttacccttggtggccttgcatggtttctgcagatccactccttcacagctataccaaacttaaaggtcagaaaaagagtgcacgccagtatcacgtacagttctttggtgacgccccagaaagagcttggatatttgagaagagcctcgtagcttttgaaggagaaggacagtttgaaaaattatgccaggaaagtgccaagcaggcacccacgaaagctgagaaaattaagctattgaaaccaatttcagggaaattgagggcccagtgggaaatgggcattgttcaagcagaagaagctgcaagcatgtcagtggaggagcggaaagccaagttcacctttctctatgtgggggaccagcttcatctcaaccctcaagtagccaaggaggctggcattgctgcagagtctttgggagaaatggcagaatcctcaggagtcagtgaagaagctgctgaaaaccccaagtctgtgagagaagagtgcattcccatgaagagaaggcggagggccaaactgtgtagctctgcagagaccctggagagtcaccccgacatagggaagagtactcctcaaaagacggcagaggctgaccccagaagaggagtagggtctcctcctgggaggaagaagaccacagtctccatgccacgaagcaggaagggagatgcagcatcccagtttttggtcttctgtcaaaaacacagggatgaggtggtagctgagcacccagatgcttcaggtgaggagattgaagagctgctcaggtcacagtggagtctgctgagtgagaagcagagagcacgctacaacaccaagtttgccctggtggcccctgtccaggctgaagaagactctggtaatgtaaatgggaaaaaaagaaaccacacaaagaggatacaggaccctacagaagatgctgaagctgaggacacacccaggaaaagactcaggacggacaagcacagtcttcggaagagagacacaatcactgacaaaacggccagaacaagctcttacaaggccatggaggcagcctcctcgctcaagagccaggcagcaacgaaaaatctgtctgatgcatgtaaaccactgaagaagcgaaatcgggcttccacggcagcatcttcagctcttgggtttagcaaaagttcatctccttctgcatccttaactgagaatgaggtctcggacagcccgggagacgagccctcggagtccccatacgaaagtgcagacgaaacacaaactgaagtatctgtctcatccaaaaagtctgagcgaggagtgactgccaaaaaggagtatgtgtgccagctgtgtgagaagccgggcagcctcctgctctgtgaaggaccctgctgcggagctttccacctcgcctgccttgggctttcccggaggccagaagggaggttcacctgcagcgagtgtgcctcagggattcactcatgtttcgtgtgtaaagagagcaagacagatgttaagcgctgtgtggtaactcagtgtggaaaattttaccatgaggcttgtgtgaaaaaataccctctgactgtatttgagagccgaggtttccgctgccccctccacagctgtgtgagctgccatgcttccaacccttcaaacccaaggccgtcaaaaggtaaaatgatgcggtgtgtccgctgccccgttgcctatcacagcggggatgcttgtctggcagcaggatgctcagtgatcgcctccaacagcatcatctgcactgcccacttcactgctcggaaggggaagcgacaccacgcccacgtcaacgtgagctggtgcttcgtgtgctccaaaggggggagccttctgtgctgtgagtcctgcccagcggccttccaccctgactgcctgaacatcgagatgcctgacggcagctggttctgcaatgactgcagggctgggaagaagctgcacttccaggatatcatttgggtgaaacttgggaactacagatggtggccggcagaagtttgccatcccaaaaatgttcccccaaatattcagaaaatgaagcacgagattggagaattccctgtgtttttctttgggtctaaagattattactggacgcatcaggcgcgagtgttcccgtacatggagggggaccggggcagccgctaccagggggtcagagggatcggaagagtcttcaaaaacgcactgcaagaagctgaagctcgttttcgtgaaattaagcttcagagggaagcccgagaaacacaggagagcgagcgcaagcccccaccatacaagcacatcaaggtgaataagccttacgggaaagtccagatctacacagcggatatttcagaaatccctaagtgcaactgcaagcccacagatgagaatccttgtggctttgattcggagtgtctgaacaggatgctgatgtttgagtgccacccgcaggtgtgtcccgcgggcgagttctgccagaaccagtgcttcaccaagcgccagtacccagagaccaagatcatcaagacagatggcaaagggtggggcctggtcgccaagagggacatcagaaagggagaatttgttaacgagtacgttggggagctgatcgacgaggaggagtgcatggcgagaatcaagcacgcacacgagaacgacatcacccacttctacatgctcactatagacaaggaccgtataatagacgctggccccaaaggaaactactctcgatttatgaatcacagctgccagcccaactgtgagaccctcaagtggacagtgaatggggacactcgtgtgggcctgtttgccgtctgtgacattcctgcagggacggagctgacttttaactacaacctcgattgtctgggcaatgaaaaaacggtctgccggtgtggagcctccaattgcagtggattcctcggggatagaccaaagacctcgacgaccctttcatcagaggaaaagggcaaaaagaccaagaagaaaacgaggcggcgcagagcaaaaggggaagggaagaggcagtcagaggacgagtgcttccgctgcggtgatggcgggcagctggtgctgtgtgaccgcaagttctgcaccaaggcctaccacctgtcctgcctgggccttggcaagcggcccttcgggaagtgggaatgtccttggcatcattgtgacgtgtgtggcaaaccttcgacttcattttgccacctctgccccaattcgttctgtaaggagcaccaggacgggacagccttcagctgcaccccggacgggcggtcctactgctgtgagcatgacttaggggcggcatcggtcagaagcaccaagactgagaagccccccccagagccagggaagccgaaggggaagaggcggcggcggaggggctggcggagagtcacagagggcaaatagcgcca

SEQ ID NO: 34500 - DNA, 1212 bp, Homo sapiens
  source 1..1212: mol_type = unassigned DNA
accatagtgttctaagaacggaagcatctgggctggatggaatttagcatcaagcagagtcccctttctgttcagagtgttgtaaagtgcataaagatgaagcaggcaccagaaatcctcggcagtgccaacgggaagactccgagctgcgaggtgaaccgcgagtgttctgtgttcctcagcaaagcccagctctccagtagcctgcaggagggggtcatgcagaagtttaacggccacgacgccctgccctttattccagccgacaagctgaaagatcttacttcccgggtgtttaatggagaacccggcgcacacgatgccaaactgcgttttgagtcccaggaaatgaaagggattgggacaccccctaacactacccctatcaaaaatggctctccagaaattaagctgaaaatcaccaaaacatacatgaatgggaagcctctctttgaatcttccatttgtggtgacagtgctgctgatgtgtctcagtcagaagaaaatggacaaaaaccagaaaacaaggcgagaaggaacaggaagaggagcataaaatatgactccttgctggagcagggccttgtcgaagcagctcttgtgtctaagatctcaagtccttcagataaaaagattccagctaagaaagagtcttgtccaaacactggaagagacaaagaccacctgttgaaatacaacgttggtgatttggtgtggtccaaagtgtcgggttacccttggtggccttgcatggtttctgcagatccactccttcacagctataccaaacttaaaggtcagaaaaagagtgcacgccagtatcacgtacagttctttggtgacgccccagaaagagcttggatatttgagaagagcctcgtagcttttgaaggagaaggacagtttgaaaaattatgccaggaaagtgccaagcaggcacccacgaaagctgagaaaattaagctattgaaaccaatttcagggaaattgagggcccagtgggaaatgggcattgttcaagcagaagaagctgcaagcatgtcagtggaggagcggaaagccaagttcacctttctctatgtgggggaccagcttcatctcaaccctcaagtagccaaggaggctggcattgctgcagagtctttgggagaaatggcagaatcctcaggagtcagtgaagaagctgctgaaaaccccaagtctgtgagagaa

SEQ ID NO: 34501 - DNA, 3964 bp, Homo sapiens
  source 1..3964: mol_type = unassigned DNA
gggccctaccgccgcacggccccggccccctcccagcctgccgctccggagagccgcccgccgaggatgcgacgcaccgcagtgttctaagaacggaagcatctgggctggatggaatttagcatcaagcagagtcccctttctgttcagagtgttgtaaagtgcataaagatgaagcaggcaccagaaatcctcggcagtgccaacgggaagactccgagctgcgaggtgaaccgcgagtgttctgtgttcctcagcaaagcccagctctccagtagcctgcaggagggggtcatgcagaagtttaacggccacgacgccctgccctttattccagccgacaagctgaaagatcttacttcccgggtgtttaatggagaacccggcgcacacgatgccaaactgcgttttgagtcccaggaaatgaaagggattgggacaccccctaacactacccctatcaaaaatggctctccagaaattaagctgaaaatcaccaaaacatacatgaatgggaagcctctctttgaatcttccatttgtggtgacagtgctgctgatgtgtctcagtcagaagaaaatggacaaaaaccagaaaacaaggcgagaaggaacaggaagaggagcataaaatatgactccttgctggagcagggccttgtcgaagcagctcttgtgtctaagatctcaagtccttcagataaaaagattccagctaagaaagagtcttgtccaaacactggaagagacaaagaccacctgttgaaatacaacgttggtgatttggtgtggtccaaagtgtcgggttacccttggtggccttgcatggtttctgcagatccactccttcacagctataccaaacttaaaggtcagaaaaagagtgcacgccagtatcacgtacagttctttggtgacgccccagaaagagcttggatatttgagaagagcctcgtagcttttgaaggagaaggacagtttgaaaaattatgccaggaaagtgccaagcaggcacccacgaaagctgagaaaattaagctattgaaaccaatttcagggaaattgagggcccagtgggaaatgggcattgttcaagcagaagaagctgcaagcatgtcagtggaggagcggaaagccaagttcacctttctctatgtgggggaccagcttcatctcaaccctcaagtagccaaggaggctggcattgctgcagagtctttgggagaaatggcagaatcctcaggagtcagtgaagaagctgctgaaaaccccaagtctgtgagagaagagtgcattcccatgaagagaaggcggagggccaaactgtgtagctctgcagagaccctggagagtcaccccgacatagggaagagtactcctcaaaagacggcagaggctgaccccagaagaggagtagggtctcctcctgggaggaagaagaccacagtctccatgccacgaagcaggaagggagatgcagcatcccagtttttggtcttctgtcaaaaacacagggatgaggtggtagctgagcacccagatgcttcaggtgaggagattgaagagctgctcaggtcacagtggagtctgctgagtgagaagcagagagcacgctacaacaccaagtttgccctggtggcccctgtccaggctgaagaagactctggtaatgtaaatgggaaaaaaagaaaccacacaaagaggatacaggaccctacagaagatgctgaagctgaggacacacccaggaaaagactcaggacggacaagcacagtcttcggaagagagacacaatcactgacaaaacggccagaacaagctcttacaaggccatggaggcagcctcctcgctcaagagccaggcagcaacgaaaaatctgtctgatgcatgtaaaccactgaagaagcgaaatcgggcttccacggcagcatcttcagctcttgggtttagcaaaagttcatctccttctgcatccttaactgagaatgaggtaaaataataataataacgataaccatggcattggtatgaaggccatttagctgcccacgctgcagtgtgagtaatgctcagacttcataagcgcagcattggtgctcactgccagtgcagatgttttagggcctcttggctaactcagattcatgaaatggacaaacagtgcactatgttagtttatttgagcactttttatacacacgcacacagtgtctgtgtacatgtacagatatacttcagtcttgatgcagtttcatagttcttaaaatctgtctgaagaatgttgtgttctgtgtagccctcacactgtaagagttcacatggaagtaagtctgcgttggttctgaaagggcacagtgtcagttgagctgacatatactgggtggggtggaaggcgactcacacaccacacctgattcctgttgcttccagacctaggctcatggaggaagccaaagatttctttgttctcatgcatttcatggctttggtcctttaaattctggcacatttttagttacttgagtgttgaggtgagtcagaactaccattgtaatatgactcctgtgttctggacttgcagagtacatgatagcaaaataaagccatttggggctgctgcctgccatcattgtaacatgacacttagactttattatcaaacctaaattttttgccgttgccaaaaacaacaaatagccacagaacgtaggtgtgacacttttttgttcggaggtagttttggtttcctgatttttagggattaccttcatagagctttggagttttaatttcttgttatttggttctccgtgatgctgtttttctcattgtagacatgggtcctgtttttgtcatgtttatgaggagatgataactgggggcccttttggaacagggtagtgaggcaagggttggacaggccccttactcttgctgagtcagaaggcggcacttctggccaggtctctgccatggtccccaggaaggatggggtgtgcctcagttgtttccactcattagaggagtgtaggccttccagtgcaggaaggtcagggacctaggcaacctgggcggggctcatagagctctgcggcttgccactctgaatcctcagcgaccactcctccgagtgggattttctgcagggactcaaaccaactcagtggtggtcgagacctgttcacggatggtgggactggggctgctttacagtttgatacgtgtagataattaagcattttgtgatgtttggacacactggagaaaaggcagtaagaattatttactgaaacatctaggagcttactgaaatatgaaaaggcaaattttatacaaattatttttcctttttcctttctttcttgtccaagttcaggttaaaatcttagaaaattaaatgaaaggtcatttacagttccaaagaagaatattaaacatttttcacttaagttgagatttttgctttaaagagcttttaatgagtttttctgttatcataattttggtccggttattcacttgagttgttgcttatactgttgtcaggtacagtagagagaacatggagcctgctgagatcttctctgttattcctgatcctaagtcatgtatatcgaaggctttgatttagagtaatgcatgaggccagtgtagcggggtcgaggcctgcccatgagtcaggggagctcagtctccctggcctaggcagttgtcctgaccttgagaagacatagatgaagcattttatcatcattagacttaaattttaattcttcagaatgtcagaagttgataggttgttaaatacatttatataatacattaaatatgtgaaattaatacaccttcctacattttgaaggtgatgcatagatcccatagtgtgcatcatgttccttatatgaaaacgtttaaattactgggtcttttccattaaactacttttgtatggcttagataaa

SEQ ID NO: 34502 - DNA, 816 bp, Homo sapiens
  source 1..816: mol_type = unassigned DNA
ggtcttgctcccttgcgcaggcgagagtacagtggcacgatcatagctcactgtagcctccaactcctgggctcaagcagtcctcctacttcaggctaccaaagtgctgggattacaggtgtgagcgtgagccactacacctggctaatttttgttggctgtttttaatctaccacacttttatagcaagtgttctaagaacggaagcatctgggctggatggaatttagcatcaagcagagtcccctttctgttcagagtgttgtaaagtgcataaagatgaagcaggcaccagaaatcctcggcagtgccaacgggaagactccgagctgcgaggtgaaccgcgagtgttctgtgttcctcagcaaagcccagctctccagtagcctgcaggagggggtcatgcagaagtttaacggccacgacgccctgccctttattccagccgacaagctgaaagatcttacttcccgggtgtttaatggagaacccggcgcacacgatgccaaactgcgttttgagtcccaggaaatgaaagggattgggacaccccctaacactacccctatcaaaaatggctctccagaaattaagctgaaaatcaccaaaacatacatgaatgggaagcctctctttgaatcttccatttgtggtgacagtgctgctgatgtgtctcagtcagaagaaaatggacaaaaaccagaaaacaaggcgagaaggaacaggaagaggagcataaaatatgactccttgctggagcagggccttgtcgaagcagctcttgtgtctaagatctcaagtccttcagataaaaag

SEQ ID NO: 34503 - DNA, 3995 bp, Homo sapiens
  source 1..3995: mol_type = unassigned DNA
gggggctttgtgcgcggcggcggcgggagaggcggcggcggcggccagcacggaggcggaggccgagggggctgtgcacaggtcgccgcggagaggcgtgcgaattccgagccgagcgccgaggaccgtgctacccaggccgggctgccagccgcaggctcctctctggcagcagcggcggcgcggcgacccccgtccctcggcctccccttcccatcccacctcccgagccttcctcttcccgcagcacgcccggcccggcccggccgtggccctcctcagtgccggccgccatggcagaggcgtccggcgcggggaaaatctagcccggggatttcatgcggcctagctcggttccgcctcctcctcgcgcggccccagcggctgcccgcaccccagccccactccgggcctccgtgtctctcctgtgatcgcactgacacggccggggggttagaatggaacaaactgaaggcccgatgagagaaagggaaagttaaggatgctggagcagaacaatggatttctctttctctttcatgcaagggatcatgggaaacacaattcagcaaccacctcaactcattgactccgccaacatccgtcaggaggatgcctttgataacaacagtgacattgctgaagatggtggccagacaccatatgaagctactttgcagcaaggctttcagtacccagctacaacagaagatcttcctccactcacaaatgggtatccatcatcaatcagtgtgtatgaaactcaaaccaaataccagtcatataatcagtatcctaatgggtcagccaatggctttggtgcagttagaaactttagccccactgactattatcattcagaaattccaaacacaagaccacatgaaattctggaaaaaccttcccctccacagccaccacctcctccttcggtaccacaaactgtgattccaaagaagactggctcacctgaaattaaactaaaaataaccaaaactatccagaatggcagggaattgtttgagtcttccctttgtggagaccttttaaatgaagtacaggcaagtgagcacacgaaatcaaagcatgaaagcagaaaagaaaagaggaaaaaaagcaacaagcatgactcatcaagatctgaagagcgcaagtcacacaaaatccccaaattagaaccagaggaacaaaatagaccaaatgagagggttgacactgtatcagaaaaaccaagggaagaaccagtactaaaagaggaagccccagttcagccaatactatcttctgttccaacaacggaagtgtccactggtgttaagtttcaggttggcgatcttgtgtggtccaaggtgggaacctatccttggtggccttgtatggtttcaagtgatccccagcttgaggttcatactaaaattaacacaagaggtgcccgagaatatcatgtccagttttttagcaaccagccagagagggcgtgggttcatgaaaaacgggtacgagagtataaaggtcataaacagtatgaagaattactggctgaggcaaccaaacaagccagcaatcactctgagaaacaaaagattcggaaaccccgacctcagagagaacgtgctcagtgggatattggcattgcccatgcagagaaagcattgaaaatgactcgagaagaaagaatagaacagtatacttttatttacattgataaacagcctgaagaggctttatcccaagcaaaaaagagtgttgcctccaaaaccgaagttaaaaaaacccgacgaccaagatctgtgctgaatactcagccagaacagaccaatgcaggggaggtggcctcctcactctcaagtactgaaattcggagacatagccagaggcggcacacaagtgcggaagaggaagagccaccgcctgttaaaatagcctggaaaactgcggcagcaaggaaatccttaccagcttccattacgatgcacaaagggagcctggatttgcagaagtgtaacatgtctccagttgtgaaaattgaacaagtgtttgctcttcagaatgctacaggggatgggaaatttatcgatcaatttgtttattcaacaaagggaattggtaacaaaacagaaataagtgtcagggggcaagacaggcttataatttctacaccaaaccagagaaatgaaaagccaacgcagagtgtatcatctcctgaagcaacatctggttctacaggctcagtagaaaagaagcaacagagaagatcaattagaactcgttctgaatcagagaaatccactgaggttgtgccaaagaagaagatcaaaaaggagcaggttgaaacagttcctcaggctacagtgaagactggattacagaaagggtcggcggaccggggagtgcagggctctgtcagattcagtgacagctccgtctccgcagcgattgaggaaactgtggactgagattcctgtacaatttcatcccagaaactccagacttgtagtctccatgcaagatttctttgtcggcggcttgataaacagtttctttgttttcgattttgatttcgccaatcatcattattggcattttcctgcctggtttcttcttcaagactctgaacaattgctttaacagtcaaatgatttttttttttcggtttgagctggatgggtacagcttaaatcatgggtccagcctaaaaaccaccatttaacttacactgatcaatttcaacatggactgtttttggttttttgtttttaaataaagcatcattaatgcacatctgcaggggtttgccaaacagcccaaactgtatacattacaatcattaaaagttcttattttttttaatattagtgccgttatcatggagaacagcatgacagctgtctttggcagtctgtcatttttctagcattttcagaaactcatcggaaatggcggtacctgtgtttcccttcgaaagcctctcagtacagcactcctgttcctctgttaaaactccttgttaatccagtgatcttttaggccaaggaaatattttgtgatggtgttctgggtccatacaccagcaatgaaggagatagatttgtgtacttgtgttttttaatcagcattaacatgggcaggcaccctcatttatagatgtcaggaaacattcagtgaaaaacttgtagaatgggatgtgataacgaggttccagtaatctgagcagtctaacgaggcccacctcctccaccacagaacgtggctatgttccaagtgctactctcactcagcctgttgcggatcttcatggcctcaggagacttgtttctccatgggctcttctggactgcacacttccaccatagcttgctgggttgatctagatgtctgtttgttgtatggaaattttgggggaaaaaatccaaaacacaaactgtgggttgaaatattaaccgtctccttggttccttggtattcaccgtgcctgatctgcacatttcatcgtggctgtttctgtatagcctatactgcattagcccaagagattgttgctttgtaactttttgcactattgttttggctggatttgtattacacacagttttaaaaaaaacaattccacactattctctgccttttttttcctatttatttcttcccgcacaaattccacatagaggccttcccatccagctctacgtgatttggctgcacttgaacactgattgtccatttacagccctcagcaatgtgccttctaaatggcatgacatatgtagatgtgctgcagcgcttgttaatggtcacaataaatgccacttcaccaaggaagtctcagatgaacaattatgaacatccaaattttattggggggcaataatcaactgaattgcaaaatttgggggaaaatggcactatccgtgtacgaatcgaatacaaatcaaagatttgtcacatccctaataaaaacaagatggagatgtctctgcaaccatatttgtaagcta

SEQ ID NO: 34504 - DNA, 5431 bp, Homo sapiens
  source 1..5431: mol_type = unassigned DNA
gggggctttgtgcgcggcggcggcgggagaggcggcggcggcggccagcacggaggcggaggccgagggggctgtgcacaggtcgccgcggagaggcgtgcgaattccgagccgagcgccgaggaccgtgctacccaggccgggctgccagccgcaggctcctctctggcagcagcggcggcgcggcgacccccgtccctcggcctccccttcccatcccacctcccgagccttcctcttcccgcagcacgcccggcccggcccggccgtggccctcctcagtgccggccgccatggcagaggcgtccggcgcggggaaaatctagcccggggatttcatgcggcctagctcggttccgcctcctcctcgcgcggccccagcggctgcccgcaccccagccccactccgggcctccgtgtctctcctgtgatcgcactgacacggccggggggttagaatggaacaaactgaaggcccgatgagagaaagggaaagttaaggatgctggagcagaacaatggatttctctttctctttcatgcaagggatcatgggaaacacaattcagcaaccacctcaactcattgactccgccaacatccgtcaggaggatgcctttgataacaacagtgacattgctgaagatggtggccagacaccatatgaagctactttgcagcaaggctttcagtacccagctacaacagaagatcttcctccactcacaaatgggtatccatcatcaatcagtgtgtatgaaactcaaaccaaataccagtcatataatcagtatcctaatgggtcagccaatggctttggtgcagttagaaactttagccccactgactattatcattcagaaattccaaacacaagaccacatgaaattctggaaaaaccttcccctccacagccaccacctcctccttcggtaccacaaactgtgattccaaagaagactggctcacctgaaattaaactaaaaataaccaaaactatccagaatggcagggaattgtttgagtcttccctttgtggagaccttttaaatgaagtacaggcaagtgagcacacgaaatcaaagcatgaaagcagaaaagaaaagaggaaaaaaagcaacaagcatgactcatcaagatctgaagagcgcaagtcacacaaaatccccaaattagaaccagaggaacaaaatagaccaaatgagagggttgacactgtatcagaaaaaccaagggaagaaccagtactaaaagaggaagccccagttcagccaatactatcttctgttccaacaacggaagtgtccactggtgttaagtttcaggttggcgatcttgtgtggtccaaggtgggaacctatccttggtggccttgtatggtttcaagtgatccccagcttgaggttcatactaaaattaacacaagaggtgcccgagaatatcatgtccagttttttagcaaccagccagagagggcgtgggttcatgaaaaacgggtacgagagtataaaggtcataaacagtatgaagaattactggctgaggcaaccaaacaagccagcaatcactctgagaaacaaaagattcggaaaccccgacctcagagagaacgtgctcagtgggatattggcattgcccatgcagagaaagcattgaaaatgactcgagaagaaagaatagaacagtatacttttatttacattgataaacagcctgaagaggctttatcccaagcaaaaaagagtgttgcctccaaaaccgaagttaaaaaaacccgacgaccaagatctgtgctgaatactcagccagaacagaccaatgcaggggaggtggcctcctcactctcaagtactgaaattcggagacatagccagaggcggcacacaagtgcggaagaggaagagccaccgcctgttaaaatagcctggaaaactgcggcagcaaggaaatccttaccagcttccattacgatgcacaaagggagcctggatttgcagaagtgtaacatgtctccagttgtgaaaattgaacaagtgtttgctcttcagaatgctacaggggatgggaaatttatcgatcaatttgtttattcaacaaagggaattggtaacaaaacagaaataagtgtcagggggcaagacaggcttataatttctacaccaaaccagagaaatgaaaagccaacgcagagtgtatcatctcctgaagcaacatctggttctacaggctcagtagaaaagaagcaacagagaagatcaattagaactcgttctgaatcagagaaatccactgaggttgtgccaaagaagaagatcaaaaaggagcaggttgaaacagttcctcaggctacagtgaagactggattacagaaaggtgccagcgagatttcagattcctgtaaacctctaaagaaaaggagtcgcgcctcaactgatgtagaaatgactagttcagcatacagagacacatctgactccgattctagaggactgagtgacctgcaggtaggctttggaaagcaagtagatagcccttcagctactgcagatgcagacgtttctgatgtgcagtccatggattcaagtttgtcgagaagaggcactggaatgagtaagaaggacactgtatgtcagatttgtgaaagctctggtgactctctgattccttgtgagggagagtgctgcaaacactttcacctggagtgcctgggattggcatcacttcctgatagcaagttcatctgcatggaatgtaaaactgggcagcacccatgtttttcgtgtaaagtgtctggtaaagatgtgaagcgttgttctgttggtgcttgtgggaaattttatcatgaagcctgtgtccgcaaattccccactgccatctttgaatcaaaaggattccgctgtcctcagcactgctgctctgcctgctctatggagaaagatatccacaaagcaagtaaaggccgcatgatgagatgtttaagatgtccagttgcctatcactctggagatgcttgcattgcggccggaagcatgttagtatcctcctacattctcatctgtagtaatcattccaaacggagcagtaattcttctgctgtaaatgtaggcttttgtttcgtttgtgccagagggctgatagttcaggaccattcagaccccatgttcagttcatatgcctataagtcccactacctactgaatgaatcaaatcgtgctgagttgatgaaattacctatgattccttcttcgtcagcttccaaaaagaaatgtgagaaaggtggaagattgctctgctgtgaatcgtgcccagcttccttccacccggaatgcctaagcatagaaatgccagaaggctgctggaattgtaatgactgtaaagctggcaagaaactacattacaagcagattgtttgggtcaaattgggaaattacagatggtggccagcagagatctgcaaccccaggtctgtgccactgaacatccagggccttaaacatgacttgggggacttccctgtattcttctttggttctcatgactactactgggtacaccagggcagagtgttcccttatgttgaaggagacaaaagctttgctgaagggcagactagtattaacaagaccttcaaaaaggcactggaagaagctgcaaaacgtttccaggaattgaaagcacaaagagaaagtaaagaagccctagagattgaaaaaaactcaagaaaaccccctccctacaaacacatcaaagctaacaaagtaataggaaaggtgcagatccaggttgctgacctgtcagagattccccgctgtaactgcaagccagctgatgaaaacccttgtggcttggaatcggagtgcctgaacagaatgttgcagtatgaatgccacccgcaggtgtgcccagctggagatcgttgtcagaaccagtgctttacaaagagactataccctgatgcagagatcatcaaaacggagcggagaggctggggcctcaggaccaaaaggagcattaagaagggtgaatttgtaaatgaatacgtcggtgaattaattgatgaagaagaatgcagattgcgaatcaagcgagcccacgagaacagtgtaactaatttttatatgttaactgttaccaaggaccgtataattgatgccggcccaaaaggaaattattctcgcttcatgaaccacagttgtaatcccaactgtgaaacacaaaagtggacagtgaatggagatgttcgagtgggactatttgctctctgtgatattcctgcagggatggagttaacatttaattataacctagattgtctgggcaacggcagaacggagtgccactgtggagcagataactgcagtggttttctaggagtgcggccaaagtcggcatgtgcgtcaacaaatgaagagaaggcaaaaaatgctaagttaaaacagaagagacgaaagatcaaaacagaaccaaagcagatgcatgaagattactgttttcaatgtggagatggtggagagctggtcatgtgtgacaaaaaagactgtcccaaagcataccacctcctatgccttaacctgactcagccaccatatggaaagtgggagtgtccgtggcatcagtgcgatgagtgcagcagtgcagctgtttccttctgtgaattctgtccacattcattttgtaaagatcatgaaaagggggccctggttccctctgcactggaaggccgcctctgctgctcggaacatgaccccatggctcctgtgtcaccagaatactggagcaagataaaatgtaaatgggaatcacaagatcatggagaagaagtaaaagaataaatgtgtggtgtcccctcctttctatttaagtgaaaaaagcaaatagatcatgcatttaaaaagaagagactgctacagtgcatacagcctttgccatcggaactgccttattaaagcaaaaatgggaaaccagttcatgcaggcagaagcagttggtggtgtctggtttttgtttgatttggttggtttgggattcttttgtggagggttaaattcccttggtcttttcttgccttttattgtgcttcagtgccattgcagcttgaaaaagaaatgtttttgctgttaaaataagaacaaagagaaaagtaagttttgttaatgagataaatttaaagtctaagatgtgttccttggttgtataaagcaaaagtagccatcattcctttatttattttcatttttaggaatttcaagaagtgtagttcaatagtctaatcaagtgtgtgtgtgttttaagtaggaatctgagaaagccctctaggaaagggtatgataagctttatatacctctttactgagcagtaggtaggctcacttctctttcccttcaaaatgcttttcataggcttagagaagggctctatggaagtattaaa

SEQ ID NO: 34505 - DNA, 5273 bp, Homo sapiens
  source 1..5273: mol_type = unassigned DNA
agaggcggcggcggcggccagcacggaggcggaggccgagggggctgtgcacaggtcgccgcggagaggcgtgcgaattccgagccgagcgccgaggaccgtgctacccaggccgggctgccagccgcaggctcctctctggcagcagcggcggcgcggcgacccccgtccctcggcctccccttcccatcccacctcccgagccttcctcttcccgcagcacgcccggcccggcccggccgtggccctcctcagtgccggccgccatggcagaggcgtccggcgcggggaaaatctagcccggggatttcatgcggcctagctcggttccgcctcctcctcgcgcggccccagcggctgcccgcaccccagccccactccgggcctccgtgtctctcctgtgatcgcactgacacggccggggggttagaatggaacaaactgaaggcccgatgagagaaagggaaagttaaggatgctggagcagaacaatggatttctctttctctttcatgcaagggatcatgggaaacacaattcagcaaccacctcaactcattgactccgccaacatccgtcaggaggatgcctttgataacaacagtgacattgctgaagatggtggccagacaccatatgaagctactttgcagcaaggctttcagtacccagctacaacagaagatcttcctccactcacaaatgggtatccatcatcaatcagtgtgtatgaaactcaaaccaaataccagtcatataatcagtatcctaatgggtcagccaatggctttggtgcagttagaaactttagccccactgactattatcattcagaaattccaaacacaagaccacatgaaattctggaaaaaccttcccctccacagccaccacctcctccttcggtaccacaaactgtgattccaaagaagactggctcacctgaaattaaactaaaaataaccaaaactatccagaatggcagggaattgtttgagtcttccctttgtggagaccttttaaatgaagtacaggcaagtgagcacacgaaatcaaagcatgaaagcagaaaagaaaagaggaaaaaaagcaacaagcatgactcatcaagatctgaagagcgcaagtcacacaaaatccccaaattagaaccagaggaacaaaatagaccaaatgagagggttgacactgtatcagaaaaaccaagggaagaaccagtactaaaagaggaagccccagttcagccaatactatcttctgttccaacaacggaagtgtccactggtgttaagtttcaggttggcgatcttgtgtggtccaaggtgggaacctatccttggtggccttgtatggtttcaagtgatccccagcttgaggttcatactaaaattaacacaagaggtgcccgagaatatcatgtccagttttttagcaaccagccagagagggcgtgggttcatgaaaaacgggtacgagagtataaaggtcataaacagtatgaagaattactggctgaggcaaccaaacaagccagcaatcactctgagaaacaaaagattcggaaaccccgacctcagagagaacgtgctcagtgggatattggcattgcccatgcagagaaagcattgaaaatgactcgagaagaaagaatagaacagtatacttttatttacattgataaacagcctgaagaggctttatcccaagcaaaaaagagtgttgcctccaaaaccgaagttaaaaaaacccgacgaccaagatctgtgctgaatactcagccagaacagaccaatgcaggggaggtggcctcctcactctcaagtactgaaattcggagacatagccagaggcggcacacaagtgcggaagaggaagagccaccgcctgttaaaatagcctggaaaactgcggcagcaaggaaatccttaccagcttccattacgatgcacaaagggagcctggatttgcagaagtgtaacatgtctccagttgtgaaaattgaacaagtgtttgctcttcagaatgctacaggggatgggaaatttatcgatcaatttgtttattcaacaaagggaattggtaacaaaacagaaataagtgtcagggggcaagacaggcttataatttctacaccaaaccagagaaatgaaaagccaacgcagagtgtatcatctcctgaagcaacatctggttctacaggctcagtagaaaagaagcaacagagaagatcaattagaactcgttctgaatcagagaaatccactgaggttgtgccaaagaagaagatcaaaaaggagcaggttgaaacagttcctcaggctacagtgaagactggattacagaaaggtgccagcgagatttcagattcctgtaaacctctaaagaaaaggagtcgcgcctcaactgatgtagaaatgactagttcagcatacagagacacatctgactccgattctagaggactgagtgacctgcaggtaggctttggaaagcaagtagatagcccttcagctactgcagatgcagacgtttctgatgtgcagtccatggattcaagtttgtcgagaagaggcactggaatgagtaagaaggacactgtatgtcagatttgtgaaagctctggtgactctctgattccttgtgagggagagtgctgcaaacactttcacctggagtgcctgggattggcatcacttcctgatagcaagttcatctgcatggaatgtaaaactgggcagcacccatgtttttcgtgtaaagtgtctggtaaagatgtgaagcgttgttctgttggtgcttgtgggaaattttatcatgaagcctgtgtccgcaaattccccactgccatctttgaatcaaaaggattccgctgtcctcagcactgctgctctgcctgctctatggagaaagatatccacaaagcaagtaaaggccgcatgatgagatgtttaagatgtccagttgcctatcactctggagatgcttgcattgcggccggaagcatgttagtatcctcctacattctcatctgtagtaatcattccaaacggagcagtaattcttctgctgtaaatgtaggcttttgtttcgtttgtgccagaggtggaagattgctctgctgtgaatcgtgcccagcttccttccacccggaatgcctaagcatagaaatgccagaaggctgctggaattgtaatgactgtaaagctggcaagaaactacattacaagcagattgtttgggtcaaattgggaaattacagatggtggccagcagagatctgcaaccccaggtctgtgccactgaacatccagggccttaaacatgacttgggggacttccctgtattcttctttggttctcatgactactactgggtacaccagggcagagtgttcccttatgttgaaggagacaaaagctttgctgaagggcagactagtattaacaagaccttcaaaaaggcactggaagaagctgcaaaacgtttccaggaattgaaagcacaaagagaaagtaaagaagccctagagattgaaaaaaactcaagaaaaccccctccctacaaacacatcaaagctaacaaagtaataggaaaggtgcagatccaggttgctgacctgtcagagattccccgctgtaactgcaagccagctgatgaaaacccttgtggcttggaatcggagtgcctgaacagaatgttgcagtatgaatgccacccgcaggtgtgcccagctggagatcgttgtcagaaccagtgctttacaaagagactataccctgatgcagagatcatcaaaacggagcggagaggctggggcctcaggaccaaaaggagcattaagaagggtgaatttgtaaatgaatacgtcggtgaattaattgatgaagaagaatgcagattgcgaatcaagcgagcccacgagaacagtgtaactaatttttatatgttaactgttaccaaggaccgtataattgatgccggcccaaaaggaaattattctcgcttcatgaaccacagttgtaatcccaactgtgaaacacaaaagtggacagtgaatggagatgttcgagtgggactatttgctctctgtgatattcctgcagggatggagttaacatttaattataacctagattgtctgggcaacggcagaacggagtgccactgtggagcagataactgcagtggttttctaggagtgcggccaaagtcggcatgtgcgtcaacaaatgaagagaaggcaaaaaatgctaagttaaaacagaagagacgaaagatcaaaacagaaccaaagcagatgcatgaagattactgttttcaatgtggagatggtggagagctggtcatgtgtgacaaaaaagactgtcccaaagcataccacctcctatgccttaacctgactcagccaccatatggaaagtgggagtgtccgtggcatcagtgcgatgagtgcagcagtgcagctgtttccttctgtgaattctgtccacattcattttgtaaagatcatgaaaagggggccctggttccctctgcactggaaggccgcctctgctgctcggaacatgaccccatggctcctgtgtcaccagaatactggagcaagataaaatgtaaatgggaatcacaagatcatggagaagaagtaaaagaataaatgtgtggtgtcccctcctttctatttaagtgaaaaaagcaaatagatcatgcatttaaaaagaagagactgctacagtgcatacagcctttgccatcggaactgccttattaaagcaaaaatgggaaaccagttcatgcaggcagaagcagttggtggtgtctggtttttgtttgatttggttggtttgggattcttttgtggagggttaaattcccttggtcttttcttgccttttattgtgcttcagtgccattgcagcttgaaaaagaaatgtttttgctgttaaaataagaacaaagagaaaagtaagttttgttaatgagataaatttaaagtctaagatgtgttccttggttgtataaagcaaaagtagccatcattcctttatttattttcatttttaggaatttcaagaagtgtagttcaatagtctaatcaagtgtgtgtgtgttttaagtaggaatctgagaaagccctctaggaaagggtatgataagctttatatacctctttactgagcagtaggtaggctcacttctctttcccttcaaaatgcttttcataggcttagagaagggctctatggaagtattaaatctggcctcttgaaaa

SEQ ID NO: 34506 - DNA, 4724 bp, Homo sapiens
  source 1..4724: mol_type = unassigned DNA
atggatttctctttctctttcatgcaagggatcatgggaaacacaattcagcaaccacctcaactcattgactccgccaacatccgtcaggaggatgcctttgataacaacagtgacattgctgaagatggtggccagacaccatatgaagctactttgcagcaaggctttcagtacccagctacaacagaagatcttcctccactcccaccacctcctccttcggtaccacaaactgtgattccaaagaagactggctcacctgaaattaaactaaaaataaccaaaactatccagaatggcagggaattgtttgagtcttccctttgtggagaccttttaaatgaagtacaggcaagtgagcacacgaaatcaaagcatgaaagcagaaaagaaaagaggaaaaaaagcaacaagcatgactcatcaagatctgaagagcgcaagtcacacaaaatccccaaattagaaccagaggaacaaaatagaccaaatgagagggttgacactgtatcagaaaaaccaagggaagaaccagtactaaaagaggaagccccagttcagccaatactatcttctgttccaacaacggaagtgtccactggtgttaagtttcaggttggcgatcttgtgtggtccaaggtgggaacctatccttggtggccttgtatggtttcaagtgatccccagcttgaggttcatactaaaattaacacaagaggtgcccgagaatatcatgtccagttttttagcaaccagccagagagggcgtgggttcatgaaaaacgggtacgagagtataaaggtcataaacagtatgaagaattactggctgaggcaaccaaacaagccagcaatcactctgagaaacaaaagattcggaaaccccgacctcagagagaacgtgctcagtgggatattggcattgcccatgcagagaaagcattgaaaatgactcgagaagaaagaatagaacagtatacttttatttacattgataaacagcctgaagaggctttatcccaagcaaaaaagagtgttgcctccaaaaccgaagttaaaaaaacccgacgaccaagatctgtgctgaatactcagccagaacagaccaatgcaggggaggtggcctcctcactctcaagtactgaaattcggagacatagccagaggcggcacacaagtgcggaagaggaagagccaccgcctgttaaaatagcctggaaaactgcggcagcaaggaaatccttaccagcttccattacgatgcacaaagggagcctggatttgcagaagtgtaacatgtctccagttgtgaaaattgaacaagtgtttgctcttcagaatgctacaggggatgggaaatttatcgatcaatttgtttattcaacaaagggaattggtaacaaaacagaaataagtgtcagggggcaagacaggcttataatttctacaccaaaccagagaaatgaaaagccaacgcagagtgtatcatctcctgaagcaacatctggttctacaggctcagtagaaaagaagcaacagagaagatcaattagaactcgttctgaatcagagaaatccactgaggttgtgccaaagaagaagatcaaaaaggagcaggttgaaacagttcctcaggctacagtgaagactggattacagaaaggtgccagcgagatttcagattcctgtaaacctctaaagaaaaggagtcgcgcctcaactgatgtagaaatgactagttcagcatacagagacacatctgactccgattctagaggactgagtgacctgcaggtaggctttggaaagcaagtagatagcccttcagctactgcagatgcagacgtttctgatgtgcagtccatggattcaagtttgtcgagaagaggcactggaatgagtaagaaggacactgtatgtcagatttgtgaaagctctggtgactctctgattccttgtgagggagagtgctgcaaacactttcacctggagtgcctgggattggcatcacttcctgatagcaagttcatctgcatggaatgtaaaactgggcagcacccatgtttttcgtgtaaagtgtctggtaaagatgtgaagcgttgttctgttggtgcttgtgggaaattttatcatgaagcctgtgtccgcaaattccccactgccatctttgaatcaaaaggattccgctgtcctcagcactgctgctctgcctgctctatggagaaagatatccacaaagcaagtaaaggccgcatgatgagatgtttaagatgtccagttgcctatcactctggagatgcttgcattgcggccggaagcatgttagtatcctcctacattctcatctgtagtaatcattccaaacggagcagtaattcttctgctgtaaatgtaggcttttgtttcgtttgtgccagagggctgatagttcaggaccattcagaccccatgttcagttcatatgcctataagtcccactacctactgaatgaatcaaatcgtgctgagttgatgaaattacctatgattccttcttcgtcagcttccaaaaagaaatgtgagaaaggtggaagattgctctgctgtgaatcgtgcccagcttccttccacccggaatgcctaagcatagaaatgccagaaggctgctggaattgtaatgactgtaaagctggcaagaaactacattacaagcagattgtttgggtcaaattgggaaattacagatggtggccagcagagatctgcaaccccaggtctgtgccactgaacatccagggccttaaacatgacttgggggacttccctgtattcttctttggttctcatgactactactgggtacaccagggcagagtgttcccttatgttgaaggagacaaaagctttgctgaagggcagactagtattaacaagaccttcaaaaaggcactggaagaagctgcaaaacgtttccaggaattgaaagcacaaagagaaagtaaagaagccctagagattgaaaaaaactcaagaaaaccccctccctacaaacacatcaaagctaacaaagtaataggaaaggtgcagatccaggttgctgacctgtcagagattccccgctgtaactgcaagccagctgatgaaaacccttgtggcttggaatcggagtgcctgaacagaatgttgcagtatgaatgccacccgcaggtgtgcccagctggagatcgttgtcagaaccagtgctttacaaagagactataccctgatgcagagatcatcaaaacggagcggagaggctggggcctcaggaccaaaaggagcattaagaagggtgaatttgtaaatgaatacgtcggtgaattaattgatgaagaagaatgcagattgcgaatcaagcgagcccacgagaacagtgtaactaatttttatatgttaactgttaccaaggaccgtataattgatgccggcccaaaaggaaattattctcgcttcatgaaccacagttgtaatcccaactgtgaaacacaaaagtggacagtgaatggagatgttcgagtgggactatttgctctctgtgatattcctgcagggatggagttaacatttaattataacctagattgtctgggcaacggcagaacggagtgccactgtggagcagataactgcagtggttttctaggagtgcggccaaagtcggcatgtgcgtcaacaaatgaagagaaggcaaaaaatgctaagttaaaacagaagagacgaaagatcaaaacagaaccaaagcagatgcatgaagattactgttttcaatgtggagatggtggagagctggtcatgtgtgacaaaaaagactgtcccaaagcataccacctcctatgccttaacctgactcagccaccatatggaaagtgggagtgtccgtggcatcagtgcgatgagtgcagcagtgcagctgtttccttctgtgaattctgtccacattcattttgtaaagatcatgaaaagggggccctggttccctctgcactggaaggccgcctctgctgctcggaacatgaccccatggctcctgtgtcaccagaatactggagcaagataaaatgtaaatgggaatcacaagatcatggagaagaagtaaaagaataaatgtgtggtgtcccctcctttctatttaagtgaaaaaagcaaatagatcatgcatttaaaaagaagagactgctacagtgcatacagcctttgccatcggaactgccttattaaagcaaaaatgggaaaccagttcatgcaggcagaagcagttggtggtgtctggtttttgtttgatttggttggtttgggattcttttgtggagggttaaattcccttggtcttttcttgccttttattgtgcttcagtgccattgcagcttgaaaaagaaatgtttttgctgttaaaataagaacaaagagaaaagtaagttttgttaatgagataaatttaaagtctaagatgtgttccttggttgtataaagcaaaagtagccatcattcctttatttattttcatttttaggaatttcaagaagtgtagttcaatagtctaatcaagtgtgtgtgtgttttaagtaggaatctgagaaagccctctaggaaagggtatgataagctttatatacctctttactgagcagtaggtaggctcacttctctttcccttcaaaatgcttttcataggcttagagaagggctctatggaagtattaaa

SEQ ID NO: 34507 - DNA, 4471 bp, Homo sapiens
  source 1..4471: mol_type = unassigned DNA
tgtgatcgcactgacacggccggggggttagaatggaacaaactgaaggcccgatgagagaaagggaaagttaaggatgctggagcagaacaatggatttctctttctctttcatgcaagggatcatgggaaacacaattcagcaaccacctcaactcattgactccgccaacatccgtcaggaggatgcctttgataacaacagtgacattgctgaagatggtggccagacaccatatgaagctactttgcagcaaggctttcagtacccagctacaacagaagatcttcctccactcacaaatgggtatccatcatcaatcagtgtgtatgaaactcaaaccaaataccagtcatataatcagtatcctaatgggtcagccaatggctttggtgcagttagaaactttagccccactgactattatcattcagaaattccaaacacaagaccacatgaaattctggaaaaaccttcccctccacagccaccacctcctccttcggtaccacaaactgtgattccaaagaagactggctcacctgaaattaaactaaaaataaccaaaactatccagaatggcagggaattgtttgagtcttccctttgtggagaccttttaaatgaagtacaggcaagtgagcacacgaaatcaaagcatgaaagcagaaaagaaaagaggaaaaaaagcaacaagcatgactcatcaagatctgaagagcgcaagtcacacaaaatccccaaattagaaccagaggaacaaaatagaccaaatgagagggttgacactgtatcagaaaaaccaagggaagaaccagtactaaaagaggaagccccagttcagccaatactatcttctgttccaacaacggaagtgtccactggtgttaagtttcaggttggcgatcttgtgtggtccaaggtgggaacctatccttggtggccttgtatggtttcaagtgatccccagcttgaggttcatactaaaattaacacaagaggtgcccgagaatatcatgtccagttttttagcaaccagccagagagggcgtgggttcatgaaaaacgggtacgagagtataaaggtcataaacagtatgaagaattactggctgaggcaaccaaacaagccagcaatcactctgagaaacaaaagattcggaaaccccgacctcagagagaacgtgctcagtgggatattggcattgcccatgcagagaaagcattgaaaatgactcgagaagaaagaatagaacagtatacttttatttacattgataaacagcctgaagaggctttatcccaagcaaaaaagagtgttgcctccaaaaccgaagttaaaaaaacccgacgaccaagatctgtgctgaatactcagccagaacagaccaatgcaggggaggtggcctcctcactctcaagtactgaaattcggagacatagccagaggcggcacacaagtgcggaagaggaagagccaccgcctgttaaaatagcctggaaaactgcggcagcaaggaaatccttaccagcttccattacgatgcacaaagggagcctggatttgcagaagtgtaacatgtctccagttgtgaaaattgaacaagtgtttgctcttcagaatgctacaggggatgggaaatttatcgatcaatttgtttattcaacaaagggaattggtaacaaaacagaaataagtgtcagggggcaagacaggcttataatttctacaccaaaccagagaaatgaaaagccaacgcagagtgtatcatctcctgaagcaacatctggttctacaggctcagtagaaaagaagcaacagagaagatcaattagaactcgttctgaatcagagaaatccactgaggttgtgccaaagaagaagatcaaaaaggagcaggttgaaacagttcctcaggctacagtgaagactggattacagaaaggtgccagcgagatttcagattcctgtaaacctctaaagaaaaggagtcgcgcctcaactgatgtagaaatgactagttcagcatacagagacacatctgactccgattctagaggactgagtgacctgcaggtaggctttggaaagcaagtagatagcccttcagctactgcagatgcagacgtttctgatgtgcagtccatggattcaagtttgtcgagaagaggcactggaatgagtaagaaggacactgtatgtcagatttgtgaaagctctggtgactctctgattccttgtgagggagagtgctgcaaacactttcacctggagtgcctgggattggcatcacttcctgatagcaagttcatctgcatggaatgtaaaactgggcagcacccatgtttttcgtgtaaagtgtctggtaaagatgtgaagcgttgttctgttggtgcttgtgggaaattttatcatgaagcctgtgtccgcaaattccccactgccatctttgaatcaaaaggattccgctgtcctcagcactgctgctctgcctgctctatggagaaagatatccacaaagcaagtaaaggccgcatgatgagatgtttaagatgtccagttgcctatcactctggagatgcttgcattgcggccggaagcatgttagtatcctcctacattctcatctgtagtaatcattccaaacggagcagtaattcttctgctgtaaatgtaggcttttgtttcgtttgtgccagagggctgatagttcaggaccattcagaccccatgttcagttcatatgcctataagtcccactacctactgaatgaatcaaatcgtgctgagttgatgaaattacctatgattccttcttcgtcagcttccaaaaagaaatgtgagaaaggtggaagattgctctgctgtgaatcgtgcccagcttccttccacccggaatgcctaagcatagaaatgccagaaggctgctggaattgtaatgactgtaaagctggcaagaaactacattacaagcagattgtttgggtcaaattgggaaattacagatggtggccagcagagatctgcaaccccaggtctgtgccactgaacatccagggccttaaacatgacttgggggacttccctgtattcttctttggttctcatgactactactgggtacaccagggcagagtgttcccttatgttgaaggagacaaaagctttgctgaagggcagactagtattaacaagaccttcaaaaaggcactggaagaagctgcaaaacgtttccaggaattgaaagcacaaagagaaagtaaagaagccctagagattgaaaaaaactcaagaaaaccccctccctacaaacacatcaaagctaacaaagtaataggaaaggtgcagatccaggttgctgacctgtcagagattccccgctgtaactgcaagccagctgatgaaaacccttgtggcttggaatcggagtgcctgaacagaatgttgcagtatgaatgccacccgcaggtgtgcccagctggagatcgttgtcagaaccagtgctttacaaagagactataccctgatgcagagatcatcaaaacggagcggagaggctggggcctcaggaccaaaaggagcattaagaagggtgaatttgtaaatgaatacgtcggtgaattaattgatgaagaagaatgcagattgcgaatcaagcgagcccacgagaacagtgaccgtataattgatgccggcccaaaaggaaattattctcgcttcatgaaccacagttgtaatcccaactgtgaaacacaaaagtggacagtgaatggagatgttcgagtgggactatttgctctctgtgatattcctgcagggatggagttaacatttaattataacctagattgtctgggcaacggcagaacggagtgccactgtggagcagataactgcagtggttttctaggagtgcggccaaagtcggcatgtgcgtcaacaaatgaagagaaggcaaaaaatgctaagttaaaacagaagagacgaaagatcaaaacagaaccaaagcagatgcatgaagattactgttttcaatgtggagatggtggagagctggtcatgtgtgacaaaaaagactgtcccaaagcataccacctcctatgccttaacctgactcagccaccatatggaaagtgggagtgtccgtggcatcagtgcgatgagtgcagcagtgcagctgtttccttctgtgaattctgtccacattcattttgtaaagatcatgaaaagggggccctggttccctctgcactggaaggccgcctctgctgctcggaacatgaccccatggctcctgtgtcaccagaatactggagcaagataaaatgtaaatgggaatcacaagatcatggagaagaagtaaaagaataaatgtgtggtgtcccctcctttctatttaagtgaaaaaagcaaatagatcatgcatttaaaaagaagagactgctacagtgcatacagcctttgccatc

SEQ ID NO: 34508 - DNA, 1032 bp, Homo sapiens
  source 1..1032: mol_type = unassigned DNA
gtagtgctaggaagggctgaggagggaacgacggggagggggcgacctagggatggagcgccagaccccaggaggaatggaaggggaagcgggtggcctgaaagggctcgaggggagtcctgacggaggagcagatggcaaggcccgatgagagaaagggaaagttaaggatgctggagcagaacaatggatttctctttctctttcatgcaagggatcatgggaaacacaattcagcaaccacctcaactcattgactccgccaacatccgtcaggaggatgcctttgataacaacagtgacattgctgaagatggtggccagacaccatatgaagctactttgcagcaaggctttcagtacccagctacaacagaagatcttcctccactcacaaatgggtatccatcatcaatcagtgtgtatgaaactcaaaccaaataccagtcatataatcagtatcctaatgggtcagccaatggctttggtgcagttagaaactttagccccactgactattatcattcagaaattccaaacacaagaccacatgaaattctggaaaaaccttcccctccacagccaccacctcctccttcggtaccacaaactgtgattccaaagaagactggctcacctgaaattaaactaaaaataaccaaaactatccagaatggcagggaattgtttgagtcttccctttgtggagaccttttaaatgaagtacaggcaagtgagcacacgaaatcaaagcatgaaagcagaaaagaaaagaggaaaaaaagcaacaagcatgactcatcaagatctgaagagcgcaagtcacacaaaatccccaaattagaaccagaggaacaaaatagaccaaatgagagggttgacactgtatcagaaaaaccaagggaagaaccagtactaaaagaggaagccccagttcagccaatactatcttctgttccaacaacggaagtgtccactggtgttaagtttcaggttggcgatcttgtgtggtccaaggtgggaacctatcct

SEQ ID NO: 34509 - DNA, 577 bp, Homo sapiens
  source 1..577: mol_type = unassigned DNA
cagcacggaggcggaggccgagggggctgtgcacaggtcgccgcggagaggcgtgcgaattccgagccgagcgccgaggaccgtgctacccaggccgggctgccagccgcaggctcctctctggcagcagcggcggcgcggcgacccccgtccctcggcctccccttcccatcccacctcccgagccttcctcttcccgcagcacgcccggcccggcccggccgtggccctcctcagtgccggccgccatggcagaggcgtccggcgcggggaaaatctagcccggggatttcatgcggcctagctcggttccgcctcctcctcgcgcggccccagcggctgcccgcaccccagccccactccgggcctccgtgtctctcctgtgatcgcactgacacggccggggggttagaatggaacaaactgaagggatgctcctgaaactgaagacaaccaagcccgatgagagaaagggaaagttaaggatgctggagcagaacaatggatttctctttctctttcatgcaagggatcatgggaaacacaattcagcaaccacctcaactcattgactccg

SEQ ID NO: 34510 - DNA, 301 bp, Homo sapiens
  source 1..301: mol_type = unassigned DNA
ttccttttcctctccgacatcagtatgaatctggaaggggccaattcagactgttagccccctttctttctattcatgaactcttttccccttacgtcttgggtcattttaaattattcataaccgccaaaggaggtagtgatgttttccatcactacctttttgatgcttttctccctctctttaccctcttccttctggttgcaaacaaggcccgatgagagaaagggaaagttaaggatgctggagcagaacaatggatttctctttctctttcatgcaagggatcatgggaaacaca

SEQ ID NO: 34511 - DNA, 3343 bp, Homo sapiens
  source 1..3343: mol_type = unassigned DNA
gtgacttccgcaggactgccaagttcaagccgccagggccagggcactgctagcagctgggctgagccctgttctcccggcgttcccaccgcccagtggcaatagctgtgaacggcggcaggagcatggcagtggaacaataaggaaaagatcttttaaaaaaaagatataatacagaagccaagcaaggcggccccgacctgtaaccccagcactctgggaggcagaggcgggcgggcggatcgcttgagcccaggagtttgagaccagcctggccaacataggaaggcctcgtcaaaaagacaaaagggtaaaacgaatttaataaaatgaagtttaacttttactcatgtttgtatctaatgacaagcttttaaaactgaaaagttcactactggctcctgcctggcggctccagcccgactgggggccggggcctccctgcactgtggggtcacgagtgcccctggacagctcccgagcgccctccgacccgcatgctcagcgcagccccgtcggcggcgcgccacgggcagagcgggctcagcgggggacggaagctcagcgctgcgaccgggatcccgcaggctcgctccgcagggccgcggctcctctccgtgcaggtgctgggcccgcgggggcggggcgtccacacggtccgcgccgagacccaagcggggaaaaagcgaagagcggacagcggggcaggtgccacagggagcctccgccccaccgcgcgagcagcaagtctgcggcgcttgacacctgcactgcgaatgccaggccgcagcccgggctcccaagacgcgaatacgcgcgcctgctcgtgacgtcattttttgcggtcttcccgagagccagcagagggcgccgccatgatgttttacggaagccgatagtccttgctcagcggcaccccgtccttccggctctcggctttgccacaaagcttcccgaagacgcggccgctacccggagacgcggtcgccacccagaagcgctctcccgggaagccccgctcgtgggaccgcgccacctgcgccgcctctgcggcccgcagcccgacgggcgccgccatgttggggtcctagcgagggacgcgtaggtgtcttcataagatgccggggcagcggcgcgcgctttcccccaagatggcgtccatgcgggagagcgacacgggcctgtggctgcacaacaagctgggggccacggacgagctgtgggcgccgcccagcatcgcgtccctgctcacggccgcggtcatcgacaacatccgtctctgcttccatggcctctcgtcggcagtgaagctcaagttgctactcgggacgctgcacctcccgcgccgcacggtggacgagatgaagggcgccctaatggagatcatccagctcgccagcctcgactcggacccctgggtgctcatggtcgccgacatcttgaagtcctttccggacacaggctcgcttaacctggagctggaggagcagaatcccaacgttcaggatattttgggagaacttagagaaaaggtgggtgagtgtgaagcgtctgccatgctgccactggagtgccagtacttgaacaaaaacgccctgacgaccctcgcgggacccctcactcccccggtgaagcattttcagttaaagcggaaacccaagagcgccacgctgcgggcggagctgctgcagaagtccacggagaccgcccagcagttgaagcggagcgccggggtgcccttccacgccaagggccgggggctgctgcggaagatggacaccaccaccccactcaaaggcatcccgaagcaggcgcccttcagaagccccacggcgcccagcgtcttcagccccacagggaaccggacccccatcccgccttccaggacgctgctgcggaaggaacgaggtgtgaagctgctggacatctctgagctggatatggttggcgctggccgagaggcgaagcggagaaggaagactctcgatgcggaggtggtggagaagccggccaaggaggaaacggtggtggagaacgccaccccggactacgcagccggcctggtgtccacgcagaaacttgggtccctgaacaatgagcctgcgctgccctccacgagctaccttccctccacgcccagcgtggttcccgcctcctcctacatccccagctccgagacgcccccagccccatcttcccgggaagccagccgcccaccagaggagcccagcgccccgagccccacgttgccagcgcagttcaagcagcgggcgcccatgtacaacagcggcctgagccctgccacacccacgcctgcggcgcccacctcgcctctgacacccaccacacctccggctgtcgcccctaccactcagacacccccggttgccatggtggccccgcagacccaggcccctgctcagcagcagcctaagaagaacctgtccctcacgagagagcagatgttcgctgcccaggagatgttcaagacggccaacaaagtcacgcggcccgagaaggccctcatcctgggcttcatggccggctcccgagagaacccgtgccaggagcagggggacgtgatccagatcaagctgagcgagcacacggaggacctgcccaaggcggacggccagggtagcacaaccatgctggtggacacagtgtttgagatgaactatgccacgggccagtggacgcgcttcaagaagtacaagcccatgaccaatgtgtcctagaaccacctgcctcacagctggccgtcacttgtgggggtccacgggacgatggctttgccagcttaaagtaaccggatggcggacacctggcccccgaggtcccccggccgccgccctgctgctgacccagcctgttttaagttctggatgcatttctctggggtatttggggcttatttttaaaattttaatatgggttcttttttgtgtgatttaagacactttttggactcaacgttacatttttgaatgtagtaagtaaattaaccaaaaaagttacaacttcctaattttagtgacagctctgcctgttagactcttactttttaaaatcttttctattttccctcgctggggcagtgccctcctacccccagggttgaggggaccaaggtggcacggtggtactgggggtgcggcagggacacccgaccacaccagagcgtgggagacggtgggccttgtcccctgcctgtgcctgcctgggagttttgtattcatcttttgtatagttgtggacatttaagacagtctttgggtacctattttcattgtaaaactatctgaaccattaaagtcgagcttttctaaagaaagccaccata

SEQ ID NO: 34512 - DNA, 3038 bp, Homo sapiens
  source 1..3038: mol_type = unassigned DNA
gtgacttccgcaggactgccaagttcaagccgccagggccagggcactgctagcagctgggctgagccctgttctcccggcgttcccaccgcccagtggcaatagctgtgaacggcggcaggagcatggcagtggaacaataaggaaaagatcttttaaaaaaaagatataatacagaagccaagcaaggcggccccgacctgtaaccccagcactctgggaggcagaggcgggcgggcggatcgcttgagcccaggagtttgagaccagcctggccaacataggaaggcctcgtcaaaaagacaaaagggtaaaacgaatttaataaaatgaagtttaacttttactcatgtttgtatctaatgacaagcttttaaaactgaaaagttcactactggctcctgcctggcggctccagcccgactgggggccggggcctccctgcactgtggggtcacgagtgcccctggacagctcccgagcgccctccgacccgcatgctcagcgcagccccgtcggcggcgcgccacgggcagagcgggctcagcgggggacggaagctcagcgctgcgaccgggatcccgcaggctcgctccgcagggccgcggctcctctccgtgcaggtgctgggcccgcgggggcggggcgtccacacggtccgcgccgagacccaagcggggaaaaagcgaagagcggacagcggggcaggtgccacagggagcctccgccccaccgcgcgagcagcaagtctgcggcgcttgacacctgcactgcgaatgccaggccgcagcccgggctcccaagacgcgaatacgcgcgcctgctcgtgacgtcattttttgcggtcttcccgagagccagcagagggcgccgccatgatgttttacggaagccgatagtccttgctcagcggcaccccgtccttccggctctcggctttgccacaaagcttcccgaagacgcggccgctacccggagacgcggtcgccacccagaagcgctctcccgggaagccccgctcgtgggaccgcgccacctgcgccgcctctgcggcccgcagcccgacgggcgccgccatgttggggtcctagcgagggacgcgtaggtgtcttcataagatgccggggcagcggcgcgcgctttcccccaagatggcgtccatgcgggagagcgacacgggcctgtggctgcacaacaagctgggggccacggacgagctgtgggcgccgcccagcatcgcgtccctgctcacggccgcggtcatcgacaacatccgtctctgcttccatggcctctcgtcggcagtgaagctcaagttgctactcgggacgctgcacctcccgcgccgcacggtggacgagatgaagggcgccctaatggagatcatccagctcgccagcctcgactcggacccctgggtgctcatggtcgccgacatcttgaagtcctttccggacacaggctcgcttaacctggagctggaggagcagaatcccaacgttcaggatattttgggagaacttagagaaaaggtgggtgagtgtgaagcgtctgccatgctgccactggagtgccagtacttgaacaaaaacgccctgacgaccctcgcgggacccctcactcccccggtgaagcattttcagttaaagcggaaacccaagagcgccacgctgcgggcggagctgctgcagaagtccacggagaccgcccagcagttgaagcggagcgccggggtgcccttccacgccaagggccgggggctgctgcggaagatggacaccaccaccccactcaaaggcatcccgaagcaggcgcccttcagaagccccacggcgcccagcgtcttcagccccacagggaaccggacccccatcccgccttccaggacgctgctgcggaaggaacgaggtgtgaagctgctggacatctctgagctggatatggttggcgctggccgagaggcgaagcggagaaggaagactctcgatgcggaggtggtggagaagccggccaaggaggaaacggtggtggagaacgccaccccggactacgcagccggcctggtgtccacgcagaaacttgggtccctgaacaatgagcctgcgctgccctccacgagctaccttccctccacgcccagcgtggttcccgcctcctcctacatccccagctccgagacgcccccagccccatcttcccgggaagccagccgcccaccagaggagcccagcgccccgagccccacgttgccagcgcagttcaagcagcgggcgcccatgtacaacagcggcctgagccctgccacacccacgcctgcggcgcccacctcgcctctgacacccaccacacctccggctgtcgcccctaccactcagacacccccggttgccatggtggccccgcagacccaggcccctgctcagcagcagcctaagaagaacctgtccctcacgagagagcagatgttcgctgcccaggagatgttcaagacggccaacaaagtcacgcggcccgagaaggccctcatcctgggcttcatggccggctcccgagagaacccgtgccaggagcagggggacgtgatccagatcaagctgagcgagcacacggaggacctgcccaaggcggacggccagggtagcacaaccatgctggtggacacagtgtttgagatgaactatgccacgggccagtggacgcgcttcaagaagtacaagcccatgaccaatgtgtcctagaaccacctgcctcacagctggccgtcacttgtgggggtccacgggacgatggctttgccagcttaaagtaaccggatggcggacacctggcccccgaggtcccccggccgccgccctgctgctgacccagcctgttttaagttctggatgcatttctctggggtatttggggcttatttttaaaattttaatatgggttcttttttgtgtgatttaagacactttttggactcaacgttacatttttgaatgtagtaagtaaattaaccaaaaaagttacaacttcctaattttagtgac

SEQ ID NO: 34513 - DNA, 2012 bp, Homo sapiens
  source 1..2012: mol_type = unassigned DNA
cccccaagatggcgtccatgcgggagagcgacacgggcctgtggctgcacaacaagctgggggccacggacgagctgtgggcgccgcccagcatcgcgtccctgctcacggccgcggtcatcgacaacatccgtctctgcttccatggcctctcgtcggcagtgaagctcaagttgctactcgggacgctgcacctcccgcgccgcacggtggacgagtgggtgagtgtgaagcgtctgccatgctgccactggagtgccagtacttgaacaaaaacgccctgacgaccctcgcgggacccctcactcccccggtgaagcattttcagttaaagcggaaacccaagagcgccacgctgcgggcggagctgctgcagaagtccacggagaccgcccagcagttgaagcggagcgccggggtgcccttccacgccaagggccgggggctgctgcggaagatggacaccaccaccccactcaaaggcatcccgaagcaggcgcccttcagaagccccacggcgcccagcgtcttcagccccacagggaaccggacccccatcccgccttccaggacgctgctgcggaaggaacgaggtgtgaagctgctggacatctctgagctggatatggttggcgctggccgagaggcgaagcggagaaggaagactctcgatgcggaggtggtggagaagccggccaaggaggaaacggtggtggagaacgccaccccggactacgcagccggcctggtgtccacgcagaaacttgggtccctgaacaatgagcctgcgctgccctccacgagctaccttccctccacgcccagcgtggttcccgcctcctcctacatccccagctccgagacgcccccagccccatcttcccgggaagccagccgcccaccagaggagcccagcgccccgagccccacgttgccagcgcagttcaagcagcgggcgcccatgtacaacagcggcctgagccctgccacacccacgcctgcggcgcccacctcgcctctgacacccaccacacctccggctgtcgcccctaccactcagacacccccggttgccatggtggccccgcagacccaggcccctgctcagcagcagcctaagaagaacctgtccctcacgagagagcagatgttcgctgcccaggagatgttcaagacggccaacaaagtcacgcggcccgagaaggccctcatcctgggcttcatggccggctcccgagagaacccgtgccaggagcagggggacgtgatccagatcaagctgagcgagcacacggaggacctgcccaaggcggacggccagggtagcacaaccatgctggtggacacagtgtttgagatgaactatgccacgggccagtggacgcgcttcaagaagtacaagcccatgaccaatgtgtcctagaaccacctgcctcacagctggccgtcacttgtgggggtccacgggacgatggctttgccagcttaaagtaaccggatggcggacacctggcccccgaggtcccccggccgccgccctgctgctgacccagcctgttttaagttctggatgcatttctctggggtatttggggcttatttttaaaattttaatatgggttcttttttgtgtgatttaagacactttttggactcaacgttacatttttgaatgtagtaagtaaattaaccaaaaaagttacaacttcctaattttagtgacagctctgcctgttagactcttactttttaaaatcttttctattttccctcgctggggcagtgccctcctacccccagggttgaggggaccaaggtggcacggtggtactgggggtgcggcagggacacccgaccacaccagagcgtgggagacggtgggccttgtcccctgcctgtgcctgcctgggagttttgtattcatcttttgtatagttgtggacatttaagacagtctttgggtacctattttcattgtaaaactatctgaaccattaaagtcgagcttttct

SEQ ID NO: 34514 - DNA, 3640 bp, Homo sapiens
  source 1..3640: mol_type = unassigned DNA
gtgcagaaggccgcgctagccggctcttcagcagcgagtgcagattgctcccccgcggccgcagatctcccgtttgcgccgcgttcagctgctcccgaacaacttttctgccggcccagaggccccagggcgtcgcagcgccgcgtgcggcccactcacgggccggcaggatggactccaacactgctccgctgggcccctcctgcccacagcccccgccagcaccgcagccccaggcgcgttcccgactcaatgccacagcctcgttggagcaggagaggagcgaaaggccccgagcacccggaccccaggctggccctggccctggtgttagagacgcagcggcccccgctgaaccccaggcccagcataccaggagccgggaaagagcagacggcaccgggcctacaaagggagacatggaaatcccctttgaagaagtcctggagagggccaaggccggggaccccaaggcacagactgaggtggggaagcactacctgcagttggccggcgacacggatgaagaactcaacagctgcaccgctgtggactggctggtcctcgccgcgaagcagggccgtcgcgaggctgtgaagctgcttcgccggtgcttggcggacagaagaggcatcacgtccgagaacgaacgggaggtgaggcagctctcctccgagaccgacctggagagggccgtgcgcaaggcagccctggtcatgtactggaagctcaaccccaagaagaagaagcaggtggccgtggcggagctgctggagaatgtcggccaggtcaacgagcacgatggaggggcgcagccaggccccgtgcccaagtccctgcagaagcagaggcgcatgctggagcgcctggtcagcagcgagtccaagaactacatcgcgctggatgactttgtggagatcactaagaagtacgccaagggcgtcatccccagcagcctgttcctgcaggacgacgaagatgatgacgagctggcggggaagagccctgaggacctgccactgcgtctgaaggtggtcaagtaccccctgcacgccatcatggagatcaaggagtacctgattgacatggcctccagggcaggcatgcactggctgtccaccatcatccccacgcaccacatcaacgcgctcatcttcttcttcatcgtcagcaacctcaccatcgacttcttcgccttcttcatcccgctggtcatcttctacctgtccttcatctccatggtgatctgcaccctcaaggtgttccaggacagcaaggcctgggagaacttccgcaccctcaccgacctgctgctgcgcttcgagcccaacctggatgtggagcaggccgaggtcaacttcggctggaaccacctggagccctatgcccatttcctgctctctgtcttcttcgtcatcttctccttccccatcgccagcaaggactgcatcccctgctcggagctggctgtcatcaccggcttctttaccgtgaccagctacctgagcctgagcacccatgcagagccctacacgcgcagggccctggccaccgaggtcaccgccggcctgctatcgctgctgccctccatgcccttgaattggccctacctgaaggtccttggccagaccttcatcaccgtgcctgtcggccacctggtcgtcctcaacgtcagcgtcccgtgcctgctctatgtctacctgctctatctcttcttccgcatggcacagctgaggaatttcaagggcacctactgctaccttgtgccctacctggtgtgcttcatgtggtgtgagctctccgtggtcatcctgctggagtccaccggcctggggctgctccgcgcctccatcggctacttcctcttcctctttgccctccccatcctggtggccggcctggccctggtgggcgtgctgcagttcgcccggtggttcacgtctctggagctcaccaagatcgcagtcaccgtggcggtctgtagtgtgcccctgctgttgcgctggtggaccaaggccagcttctctgtggtggggatggtgaagtccctgacgcggagctccatggtcaagctcatcctggtgtggctcacggccatcgtgctgttctgctggttctatgtgtaccgctcagagggcatgaaggtctacaactccacactgacctggcagcagtatggtgcgctgtgcgggccacgcgcctggaaggagaccaacatggcgcgcacccagatcctctgcagccacctggagggccacagggtcacgtggaccggccgcttcaagtacgtccgcgtgactgacatcgacaacagcgccgagtctgccatcaacatgctcccgttcttcatcggcgactggatgcgctgcctctacggcgaggcctaccctgcctgcagccctggcaacacctccacggccgaggaggagctctgtcgccttaagctgctggccaagcacccctgccacatcaagaagttcgaccgctacaagtttgagattaccgtgggcatgccattcagcagcggcgctgacggctcgcgcagccgcgaggaggacgacgtcaccaaggacatcgtgctgcgggccagcagcgagttcaagagcgtgctgctcagcctgcgccagggcagcctcatcgagttcagcaccatcctggagggccgcctgggcagcaagtggcctgtcttcgagctcaaggccatcagctgcctcaactgcatggcccagctctcacccaccaggcggcacgtgaagatcgagcacgactggcgcagcaccgtgcatggcgccgtgaagttcgccttcgacttctttttcttcccattcctgtcggcggcctgaggatggtccgccacgaggagcttccagtgcatgttgccatgaggcctttccccagtgtggccccagcccgacaggcatgcaccagtgccgcctgtgcccacgtgtgcagactgtggctgcagagaccttgcgaccatgtgtagattgcgtggaccccgacaaagggaaggctgctgtgtagctctgtccactctgaataccaagtgtgttgggaattgcatgccatctccaccctgagcctgacctttctgagtgacatgggtgtgccaggctagactaggaggttccggtgtctggaaaagcactttacagatgagattccctctcctcccccaccttcaagcaccctgttccctctttctttcttttgtgttggatttgtttaaaaaccaaataagcatctgtgtaacctccacagtagcatttcttatttgtttggtcactgctacaccttagcagctcttcccctttcctgggggatgtgcacggcagcttgagcctgtcacgtggtcaaggcccggccccatcagaggctgggggaggcggcacattggcagtgtgtcacactgagctgggcaccacaggctgcctcatgaccctcctgtccagcaggtagtgggtgaatgtgtgaaggtcttgcctgaatccatcaggacttgggaaacagagaaccctgtgggggcggctgtgggggaggtccctgccagtgtttagaagagcctgactgtgttcagtgccttggagcagaaagccagggtcctgagtggctgaaataaaagcctctggtggaacctgca

SEQ ID NO: 34515 - DNA, 3255 bp, Homo sapiens
  source 1..3255: mol_type = unassigned DNA
cgtgcagaaggccgcgctagccggctcttcagcagcgagtgcagattgctcccccgcggccgcagatctcccgtttgcgccgcgttcagctgctcccgaacaacttttctgccggcccagaggccccagggcgtcgcagcgccgcgtgcggcccactcacgggccggatggactccaacactgctccgctgggcccctcctgcccacagcccccgccagcaccgcagccccaggcgcgttcccgactcaatgccacagcctcgttggagcaggagaggagcgaaaggccccgagcacccggaccccaggctggccctggccctggtgttagagacgcagcggcccccgctgaaccccaggcccagcataccaggagccgggaaagagcagacggcaccgggcctacaaagggagacatggaaatcccctttgaagaagtcctggagagggccaaggccggggaccccaaggcacagactgaggtggggaagcactacctgcagttggccggcgacacggatgaagaactcaacagctgcaccgctgtggactggctggtcctcgccgcgaagcagggccgtcgcgaggctgtgaagctgcttcgccggtgcttggcggacagaagaggcatcacgtccgagaacgaacgggaggtgaggcagctctcctccgagaccgacctggagagggccgtgcgcaaggcagccctggtcatgtactggaagctcaaccccaagaagaagaagcaggtggccgtggcggagctgctggagaatgtcggccaggtcaacgagcacgatggaggggcgcagccaggccccgtgcccaagtccctgcagaagcagaggcgcatgctggagcgcctggtcagcagcgagtccaagaactacatcgcgctggatgactttgtggagatcactaagaagtacgccaagggcgtcatccccagcagcctgttcctgcaggacgacgaagatgatgacgagctggcggggaagagccctgaggacctgccactgcgtctgaaggtggtcaagtaccccctgcacgccatcatggagatcaaggagtacctgattgacatggcctccagggcaggcatgcactggctgtccaccatcatccccacgcaccacatcaacgcgctcatcttcttcttcatcgtcagcaacctcaccatcgacttcttcgccttcttcatcccgctggtcatcttctacctgtccttcatctccatggtgatctgcaccctcaaggtgttccaggacagcaaggcctgggagaacttccgcaccctcaccgacctgctgctgcgcttcgagcccaacctggatgtggagcaggccgaggtcaacttcggctggaaccacctggagccctatgcccatttcctgctctctgtcttcttcgtcatcttctccttccccatcgccagcaaggactgcatcccctgctcggagctggctgtcatcaccggcttctttaccgtgaccagctacctgagcctgagcacccatgcagagccctacacgcgcagggccctggccaccgaggtcaccgccggcctgctatcgctgctgccctccatgcccttgaattggccctacctgaaggtccttggccagaccttcatcaccgtgcctgtcggccacctggtcgtcctcaacgtcagcgtcccgtgcctgctctatgtctacctgctctatctcttcttccgcatggcacagctgaggaatttcaagggcacctactgctaccttgtgccctacctggtgtgcttcatgtggtgtgagctctccgtggtcatcctgctggagtccaccggcctggggctgctccgcgcctccatcggctacttcctcttcctctttgccctccccatcctggtggccggcctggccctggtgggcgtgctgcagttcgcccggtggttcacgtctctggagctcaccaagatcgcagtcaccgtggcggtctgtagtgtgcccctgctgttgcgctggtggaccaaggccagcttctctgtggtggggatggtgaagtccctgacgcggagctccatggtcaagctcatcctggtgtggctcacggccatcgtgctgttctgctggttctatgtgtaccgctcagagggcatgaaggtctacaactccacactgacctggcagcagtatggtgcgctgtgcgggccacgcgcctggaaggagaccaacatggcgcgcacccagatcctctgcagccacctggagggccacagggtcacgtggaccggccgcttcaagtacgtccgcgtgactgacatcgacaacagcgccgagtctgccatcaacatgctcccgttcttcatcggcgactggatgcgctgcctctacggcgaggcctaccctgcctgcagccctggcaacacctccacggccgaggaggagctctgtcgccttaagctgctggccaagcacccctgccacatcaagaagttcgaccgctacaagtttgagattaccgtgggcatgccattcagcagcggcgctgacggctcgcgcagccgcgaggaggacgacgtcaccaaggacatcgtgctgcgggccagcagcgagttcaagagcgtgctgctcagcctgcgccagggcagcctcatcgagttcagcaccatcctggagggccgcctgggcagcaagtggcctgtcttcgagctcaaggccatcagctgcctcaactgcatggcccagctctcacccaccaggcggcacgtgaagatcgagcacgactggcgcagcaccgtgcatggcgccgtgaagttcgccttcgacttctttttcttcccattcctgtcggcggcctgaggatggtccgccacgaggagcttccagtgcatgttgccatgaggcctttccccagtgtggccccagcccgacaggcatgcaccagtgccgcctgtgcccacgtgtgcagactgtggctgcagagaccttgcgaccatgtgtagattgcgtggaccccgacaaagggaaggctgctgtgtagctctgtccactctgaataccaagtgtgttgggaattgcatgccatctccaccctgagcctgacctttctgagtgacatgggtgtgccaggctagactaggaggttccggtgtctggaaaagcactttacagatgagattccctctcctcccccaccttcaagcaccctgttccctctttctttcttttgtgttggatttgtttaaaaaccaaataagcatctgtgtaacctcca

SEQ ID NO: 34516 - DNA, 1625 bp, Homo sapiens
  source 1..1625: mol_type = unassigned DNA
agattgctcccccgcggccgcagatctcccgtttgcgccgcgttcagctgctcccgaacaacttttctgccggcccagaggccccagggcgtcgcagcgccgcgtgcggcccactcacgggccggcaggatggactccaacactgctccgcgcctccatcggctacttcctcttcctctttgccctccccatcctggtggccggcctggccctggtgggcgtgctgcagttcgcccggtggttcacgtctctggagctcaccaagatcgcagtcaccgtggcggtctgtagtgtgcccctgctgttgcgctggtggaccaaggccagcttctctgtggtggggatggtgaagtccctgacgcggagctccatggtcaagctcatcctggtgtggctcacggccatcgtgctgttctgctggttctatgtgtaccgctcagagggcatgaaggtctacaactccacactgacctggcagcagtatggtgcgctgtgcgggccacgcgcctggaaggagaccaacatggcgcgcacccagatcctctgcagccacctggagggccacagggtcacgtggaccggccgcttcaagtacgtccgcgtgactgacatcgacaacagcgccgagtctgccatcaacatgctcccgttcttcatcggcgactggatgcgctgcctctacggcgaggcctaccctgcctgcagccctggcaacacctccacggccgaggaggagctctgtcgccttaagctgctggccaagcacccctgccacatcaagaagttcgaccgctacaagtttgagattaccgtgggcatgccattcagcagcggcgctgacggctcgcgcagccgcgaggaggacgacgtcaccaaggacatcgtgctgcgggccagcagcgagttcaagagcgtgctgctcagcctgcgccagggcagcctcatcgagttcagcaccatcctggagggccgcctgggcagcaagtggcctgtcttcgagctcaaggccatcagctgcctcaactgcatggcccagctctcacccaccaggcggcacgtgaagatcgagcacgactggcgcagcaccgtgcatggcgccgtgaagttcgccttcgacttctttttcttcccattcctgtcggcggcctgaggatggtccgccacgaggagcttccagtgcatgttgccatgaggcctttccccagtgtggccccagcccgacaggcatgcaccagtgccgcctgtgcccacgtgtgcagactgtggctgcagagaccttgcgaccatgtgtagattgcgtggaccccgacaaagggaaggctgctgtgtagctctgtccactctgaataccaagtgtgttgggaattgcatgccatctccaccctgagcctgacctttctgagtgacatgggtgtgccaggctagactaggaggttccggtgtctggaaaagcactttacagatgagattccctctcctcccccaccttcaagcaccctgttccctctttctttcttttgtgttggatttgtttaaaaaccaaataagcatctgtgtaacctccacagtagcatttcttatttgtttggtcactgctacaccttagcagctcttcccctttcctg

SEQ ID NO: 34517 - DNA, 7130 bp, Homo sapiens
  source 1..7130: mol_type = unassigned DNA
ggggcagcgcggttacctgcaccgcccgagccgcacctggcggaggcagaagtcacaaacccggcgagctcagagcggtggagcggagaggagggacggcacccggctgcagggaggagggaggcggcagcggcagcggcggcgtggagggcgcagcgcgccgcgcggcggaggagggcagacggcggcggcggcggcgctcggctcgctctgcccggccggctgggcgcgcacccgggctcgcaccgcgccgctgcggacgcacatggcagcgtgagaggccggcggcgggaggagcgggcggcgccgggtcggggctgcagggccgcatggacagcggcgccaccccggccggcccctactagggccccccatctgcgggcgccaccccccggatcatggtgcctcggcggccgcccgggctaagagcggccggctggagccgctgagcccccgctgcggccgggagctgcatgggggagcgccggcagcgcttgggaagatgccccggccggagctgcccctgccggagggctgggaggaggcgcgcgacttcgacggcaaggtctactacatagaccacacgaaccgcaccaccagctggatcgacccgcgggacaggtacaccaaaccgctcacctttgctgactgcattagtgatgagttgccgctaggatgggaagaggcatatgacccacaggttggagattacttcatagaccacaacaccaaaaccactcagattgaggatcctcgagtacaatggcggcgggagcaggaacatatgctgaaggattacctggtggtggcccaggaggctctgagtgcacaaaaggagatctaccaggtgaagcagcagcgcctggagcttgcacagcaggagtaccagcaactgcatgccgtctgggagcataagctgggctcccaggtcagcttggtctctggttcatcatccagctccaagtatgaccctgagatcctgaaagctgaaattgccactgcaaaatcccgggtcaacaagctgaagagagagatggttcacctccagcacgagctgcagttcaaagagcgtggctttcagaccctgaagaaaatcgataagaaaatgtctgatgctcagggcagctacaaactggatgaagctcaggctgtcttgagagaaacaaaagccatcaaaaaggctattacctgtggggaaaaggaaaagcaagatctcattaagagccttgccatgttgaaggacggcttccgcactgacagggggtctcactcagacctgtggtccagcagcagctctctggagagttcgagtttcccgctaccgaaacagtacctggatgtgagctcccagacagacatctcgggaagcttcggcatcaacagcaacaatcagttggcagagaaggtcagattgcgccttcgatatgaagaggctaagagaaggatcgccaacctgaagatccagctggccaagcttgacagtgaggcctggcctggggtgctggactcagagagggaccggctgatccttatcaacgagaaggaggagctgctgaaggagatgcgcttcatcagcccccgcaagtggacccagggggaggtggagcagctggagatggcccggaagcggctggaaaaggacctgcaggcagcccgggacacccagagcaaggcgctgacggagaggttaaagttaaacagtaagaggaaccagcttgtgagagaactggaggaagccacccggcaggtggcaactctgcactcccagctgaaaagtctctcaagcagcatgcagtccctgtcctcaggcagcagccccggatccctcacgtccagccggggctccctggttgcatccagcctggactcctccacttcagccagcttcactgacctctactatgacccctttgagcagctggactcagagctgcagagcaaggtggagttcctgctcctggagggggccaccggcttccggccctcaggctgcatcaccaccatccacgaggatgaggtggccaagacccagaaggcagagggaggtggccgcctgcaggctctgcgttccctgtctggcaccccaaagtccatgacctccctatccccacgttcctctctctcctccccctccccaccctgttcccctctcatggctgaccccctcctggctggtgatgccttcctcaactccttggagtttgaagacccggagctgagtgccactctttgtgaactgagccttggtaacagcgcccaggaaagataccggctggaggaaccaggaacggagggcaagcagctgggccaagctgtgaatacggcccaggggtgtggcctgaaagtggcctgtgtctcagccgccgtatcggacgagtcagtggctggagacagtggtgtgtacgaggcttccgtgcagagactgggtgcttcagaagctgctgcatttgacagtgacgaatcggaagcagtgggtgcgacccgaattcagattgccctgaagtatgatgagaagaataagcaatttgcaatattaatcatccagctgagtaacctttctgctctgttgcagcaacaagaccagaaagtgaatatccgcgtggctgtccttccttgctctgaaagcacaacctgcctgttccggacccggcctctggacgcctcagacactctagtgttcaatgaggtgttctgggtatccatgtcctatccagcccttcaccagaagaccttaagagtcgatgtctgtaccaccgacaggagccatctggaagagtgcctgggaggcgcccagatcagcctggcggaggtctgccggtctggggagaggtcgactcgctggtacaaccttctcagctacaaatacttgaagaaacagagcagggagctcaagccagtgggagtcatggcccctgcctcagggcctgccagcacggacgctgtgtctgctctgttggaacagacagcagtggagctggagaagaggcaggagggcaggagcagcacacagacactggaagacagctggaggtatgaggagaccagtgagaatgaggcagtagccgaggaagaggaggaggaggtggaggaggaggagggagaagaggatgttttcaccgagaaagcctcacctgatatggatgggtacccagcattaaaggtggacaaagagaccaacacggagaccccggccccatcccccacagtggtgcgacctaaggaccggagagtgggcaccccgtcccaggggccatttcttcgagggagcaccatcatccgctctaagaccttctccccaggaccccagagccagtacgtgtgccggctgaatcggagtgatagtgacagctccactctgtccaaaaagccaccttttgttcgaaactccctggagcgacgcagcgtccggatgaagcggccttcctcggtcaagtcgctgcgctccgagcgtctgatccgtacctcgctggacctggagttagacctgcaggcgacaagaacctggcacagccaattgacccaggagatctcggtgctgaaggagctcaaggagcagctggaacaagccaagagccacggggagaaggagctgccacagtggttgcgtgaggacgagcgtttccgcctgctgctgaggatgctggagaagcggcagatggaccgagcggagcacaagggtgagcttcagacagacaagatgatgagggcagctgccaaggatgtgcacaggctccgaggccagagctgtaaggaacccccagaagttcagtctttcagggagaagatggcatttttcacccggcctcggatgaatatcccagctctctctgcagatgacgtctaatcgccagaaaagtatttcctttgttccactgaccaggctgtgaacattgactgtggctaaagttatttatgtggtgttatatgaaggtactgagtcacaagtcctctagtgctcttgttggtttgaagatgaaccgactttttagtttgggtcctactgttgttattaaaaacagaacaaaaacaaaacacacacacacacaaaaacagaaacaaaaaaaaccagcattaaaataataagattgtatagtttgtatatttaggagtgtatttttgggaaagaaaatttaaatgaactaaagcagtattgagttgctgctcttcttaaaatcgtttagattttttttggtttgtacagctccaccttttagaggtcttactgcaataagaagtaatgcctgggggacggtaatcctaataggacgtcccgcacttgtcacagtacagctaatttttcctagttaacatattttgtacaatattaaaaaaatgcacagaaaccattgggggggattcagaggtgcatccacggatcttcttgagctgtgacgtgtttttatgtggctgcccaacgtggagcgggcagtgtgataggctgggtgggctaagcagcctagtctatgtgggtgacaggccacgctggtctcagatgcccagtgaagccactaacatgagtgaggggagggctgtggggaactccattcagttttatctccatcaataaagtggcctttcaaaaagaatcttcctcttgctctctttttctttcctacccctcacttcatctgtttccctgatttttgactctcccctttccagtcatttctttcccacccatccgcagtcctggaaacatttattttttcttttgcccactgttttcatttgctcattaaattaaaatgactgctcggctcattgggaatccacatccccaagttagactggggatatgctctctgtactgtctccttctatggaattccaccccacccagagagagatgacttcacagtttgttcatatgagcatcatcccatgtcgtccccaacccaggggctggtaggtgctacagcttgtgcttcatgctgctcctgtggcccctattcctacccagctcagagctttgcagggtctactgcagacaatcagaagtcagtttctaacaaatagcaacagccacaaatctcttcctccttcctctctgacattaccctgtgcaacttttctcaaagtctgttgcaccactcagcaaagcaagttgcaccagctatatcagaatcacctggggcagcctattaaaaatgcagactgttgagaccatcctggctaacacggtgaaaccctgtctctactaaaaatacaaaaaattagccggccgtggtggcgggcagctactcgggaggctgaggcaggagaatgacctgaacctgggaggcagagcttgcagtgagctgagattgtgccactgcactccagcctgggtgacagagcaagactccgtctcaaaaaaaaaaaaaaaagaaaaatgcagactggctggcgcggtggctcatgcttgtaatcccagcactttgggaggctgaggcgggcagatcaactgagatcgggggttcgagaccagcctgatcaacatggagaaacctggtctctactaaaaatacataattagctgggcgtagtggcgcatacctgtaatcccagctacttgggtggccaaggcttgaacccaggaggcggaggttgcggtgagccgagatggcgccattgactccagcctgggcaacaagagcgtaactccatctcaaaaaaataataataataaaaataaaatgcagactgtcaggtcctctctagacccactgaactatcccgcccaccctgggacggtccccagtgccagtgttttacccatgttccctctgtaagtcttatgcacaccgcaatttgagagccccactggtataaagtgagtgaaacccaggcagagacaggcaaaatggtgaggcccgcatcctattggtgagtcacacagggaacgctgaaattcatggccttctccaggctactgggaacccatgggcggtgatggagggagtggtgccaccttcacttgctgctgaggctcttccccctctccccagcatactccttacctggctgtctctcctcatgtataaggaacctatagtggtgtagaatctactcttcttccccctgtggcttccaggcccccctgtatagctgctatccagcccgatttctcaccactggcccagggcttcctcctgccccgtggcttcacgtctctgaacacatcaatctctgatgttctctctccttccattgaattccaccagacacattcagggtttacttcgtaatgtcttcatatgagtatcaatcaacaccttccccaactcaattgtactaggttgtagagcacaaggatggtctcgtgctgctctgtggcacctgtgcctacactcctctgagctttgaggaggctgctctctttgctgaccccatgatcttttctgcccttctgttaagggcattggccacagcaacggggcaaatgccccaagctggctgtaagtgacccatccctttggctcccatgattagaccaaggagaggcatggggtccagctgagccattcagaaccattccttagcattttccactcaaaggttagagatgagattttctcttcccaaggctacctctggccatggttccagcttcatgggggcaatgggattaggaaaatgaggtcaacctgcaaaggaaagcagatgcaagagatggagacagaatgggggtgtcctggggatcttggagcctgaattcattggcacaaaaggcagcagcatcctcactgtatctgcagtccatttggactcaataaaaactttgaaagtcacatgtgttatggaattccttctcagtgacacattcatctgtgctcagttgtcccagcaagggtcagcccctcatacccctgcagcatccgctgctatgaagcagagctgtaaacgccctccctgtgtataggaaaagctacatggagcaaatcctcctgcctgaagaagtgcatctcagcatcacttcagctgtcggggcatttgtggggagaaccagaccacctctgcggaaggcagcagaccctcttccagccatggatggagttgaattctctataaacggttcaccagcaaaccaccaatacattccattgtttgcctagagagaaatttaaaaataaataaatgttcacttataa

SEQ ID NO: 34518 - DNA, 3562 bp, Homo sapiens
  source 1..3562: mol_type = unassigned DNA
aagatgccccggccggagctgcccctgccggagggctgggaggaggcgcgcgacttcgacggcaaggtctactacatagaccacacgaaccgcaccaccagctggatcgacccgcgggacaggtacaccaaaccgctcacctttgctgactgcattagtgatgagttgccgctaggatgggaagaggcatatgacccacaggttggagattacttcatagaccacaacaccaaaaccactcagattgaggatcctcgagtacaatggcggcgggagcaggaacatatgctgaaggattacctggtggtggcccaggaggctctgagtgcacaaaaggagatctaccaggtgaagcagcagcgcctggagcttgcacagcaggagtaccagcaactgcatgccgtctgggagcataagctgggctcccaggtcagcttggtctctggttcatcatccagctccaagtatgaccctgagatcctgaaagctgaaattgccactgcaaaatcccgggtcaacaagctgaagagagagatggttcacctccagcacgagctgcagttcaaagagcgtggctttcagaccctgaagaaaatcgataagaaaatgtctgatgctcagggcagctacaaactggatgaagctcaggctgtcttgagagaaacaaaagccatcaaaaaggctattacctgtggggaaaaggaaaagcaagatctcattaagagccttgccatgttgaaggacggcttccgcactgacagggggtctcactcagacctgtggtccagcagcagctctctggagagttcgagtttcccgctaccgaaacagtacctggatgtgagctcccagacagacatctcgggaagcttcggcatcaacagcaacaatcagttggcagagaaggtcagattgcgccttcgatatgaagaggctaagagaaggatcgccaacctgaagatccagctggccaagcttgacagtgaggcctggcctggggtgctggactcagagagggaccggctgatccttatcaacgagaaggaggagctgctgaaggagatgcgcttcatcagcccccgcaagtggacccagggggaggtggagcagctggagatggcccggaagcggctggaaaaggacctgcaggcagcccgggacacccagagcaaggcgctgacggagaggttaaagttaaacagtaagaggaaccagcttgtgagagaactggaggaagccacccggcaggtggcaactctgcactcccagctgaaaagtctctcaagcagcatgcagtccctgtcctcaggcagcagccccggatccctcacgtccagccggggctccctggttgcatccagcctggactcctccacttcagccagcttcactgacctctactatgacccctttgagcagctggactcagagctgcagagcaaggtggagttcctgctcctggagggggccaccggcttccggccctcaggctgcatcaccaccatccacgaggatgaggtggccaagacccagaaggcagagggaggtggccgcctgcaggctctgcgttccctgtctggcaccccaaagtccatgacctccctatccccacgttcctctctctcctccccctccccaccctgttcccctctcatggctgaccccctcctggctggtgatgccttcctcaactccttggagtttgaagacccggagctgagtgccactctttgtgaactgagccttggtaacagcgcccaggaaagataccggctggaggaaccaggaacggagggcaagcagctgggccaagctgtgaatacggcccaggggtgtggcctgaaagtggcctgtgtctcagccgccgtatcggacgagtcagtggctggagacagtggtgtgtacgaggcttccgtgcagagactgggtgcttcagaagctgctgcatttgacagtgacgaatcggaagcagtgggtgcgacccgaattcagattgccctgaagtatgatgagaagaataagcaatttgcaatattaatcatccagctgagtaacctttctgctctgttgcagcaacaagaccagaaagtgaatatccgcgtggctgtccttccttgctctgaaagcacaacctgcctgttccggacccggcctctggacgcctcagacactctagtgttcaatgaggtgttctgggtatccatgtcctatccagcccttcaccagaagaccttaagagtcgatgtctgtaccaccgacaggagccatctggaagagtgcctgggaggcgcccagatcagcctggcggaggtctgccggtctggggagaggtcgactcgctggtacaaccttctcagctacaaatacttgaagaaacagagcagggagctcaagccagtgggagtcatggcccctgcctcagggcctgccagcacggacgctgtgtctgctctgttggaacagacagcagtggagctggagaagaggcaggagggcaggagcagcacacagacactggaagacagctggaggtatgaggagaccagtgagaatgaggcagtagccgaggaagaggaggaggaggtggaggaggaggagggagaagaggatgttttcaccgagaaagcctcacctgatatggatgggtacccagcattaaaggtggacaaagagaccaacacggagaccccggccccatcccccacagtggtgcgacctaaggaccggagagtgggcaccccgtcccaggggccatttcttcgagggagcaccatcatccgctctaagaccttctccccaggaccccagagccagtacgtgtgccggctgaatcggagtgatagtgacagctccactctgtccaaaaagccaccttttgttcgaaactccctggagcgacgcagcgtccggatgaagcggccgtccccacccccacagccttcctcggtcaagtcgctgcgctccgagcgtctgatccgtacctcgctggacctggagttagacctgcaggcgacaagaacctggcacagccaattgacccaggagatctcggtgctgaaggagctcaaggagcagctggaacaagccaagagccacggggagaaggagctgccacagtggttgcgtgaggacgagcgtttccgcctgctgctgaggatgctggagaagcggcagatggaccgagcggagcacaagggtgagcttcagacagacaagatgatgagggcagctgccaaggatgtgcacaggctccgaggccagagctgtaaggaacccccagaagttcagtctttcagggagaagatggcatttttcacccggcctcggatgaatatcccagctctctctgcagatgacgtctaatcgccagaaaagtatttcctttgttccactgaccaggctgtgaacattgactgtggctaaagttatttatgtggtgttatatgaaggtactgagtcacaagtcctctagtgctcttgttggtttgaagatgaaccgactttttagtttgggtcctactgttgttattaaaaacagaacaaaaacaaaacacacacacac

SEQ ID NO: 34519 - DNA, 1294 bp, Homo sapiens
  source 1..1294: mol_type = unassigned DNA
cggcggaggcgctgctgtggattggtcacagggagaaacctctgatctgttcctattggcccgtccgtcaagggacgatgatgattggtagggcagagcaatctgagtcctagttggtggagttctgcccggatggaagctccggccgcggagtgatggtggcctcagcgaagatgggccgggcagggaccatggcggtggcagcagaggtggcaggggcggggcggctggcggtagaggaggctgtggtcctcagggggctgtaggtggaggtatggctcgggccagcagcgggaacggcagcgaggaggcctggggggcacttcgggcgccgcaacagcagcttcgagagctgtgcccaggagtgaacaaccagccctacctctgtgagagtggtcactgctgcggggagactggctgctgcacctactactatgagctctggtggttctggctgctctggactgtcctcatcctctttagctgctgttgcgccttccgccaccgacgagctaaactcaggctgcaacaacagcagcggcagcgtgaaatcaacttgttggcctatcatggggcatgccatggggctggtcctttccctaccggttcactgcttgaccttcgcttcctcagcaccttcaagcccccagcctacgaggatgtggttcaccgcccaggcacaccaccccccccttatactgtggccccaggccgccccttgactgcttccagtgaacaaacctgctgttcctcctcatccagctgccctgcccactttgaaggaacaaatgtggaaggtgtttcctcccaccagagtgccccccctcatcaggagggtgagcccggggcaggggtgacccctgcctccacacccccctcctgccgctatcgccgtttaactggcgactccggtattgagctctgcccttgtcctgcctccggtgagggtgagccagtcaaggaggtgagggttagtgccaccctgccagatctggaggactactccccgtgtgcactacccccagagtctgtaccgcagatctttcccatggggctgtcttccagtgaaggggacatcccataagtagttttgagagggtggatgggttacttgcccaccagaaacagccctagtcccaactccttgcgttcctttggcccctccctgcctacctagaatctgcctgaaagggctggagaggggcagtattgggggactgtgctagctttacccccgcaggacatacacaggagcctttgatctcattaaagagatgtgaaccagctacttgtg

SEQ ID NO: 34520 - DNA, 1944 bp, Homo sapiens
  source 1..1944: mol_type = unassigned DNA
gggccagcctccgcactcgagctttgattggctgactctaataagaagacgccactaggggcggggcgaagaggggcgcaagctcattgcgttttgagtctcgggacccctgttggagagactatggcgctcaacaagaatcactcggagggcggcggagtgatcgtcaataacaccgagagcatcctaatgtcctatgatcacgtggaactcacattcaatgacatgaagaacgtgccagaagccttcaaagggaccaagaaaggcactgtctaccttaccccttaccgggtcatctttctgtccaagggcaaggatgccatgcagtccttcatgatgccattttatctcatgaaagactgtgagatcaagcagcccgtatttggtgcaaactacatcaagggaacagtgaaggcggaagcgggaggtggctgggaaggctctgcttcctacaagttgactttcacggcagggggcgccattgagttcggacagcggatgctccaggtggcatctcaagcctccagaggtgaagtccccagtggagcctatggctactcttacatgcccagcggggcctatgtctatcccccgccagtcgccaatggaatgtacccctgccctcctggctacccctatccaccgcccccacctgagttctatccaggaccccccatgatggacggggccatgggatacgtgcagcccccaccaccgccctaccctgggcccatggaacctccggtcagcggccccgatgtcccctccactcctgcagccgaagccaaggccgcagaagcagccgccagcgcctattacaacccaggcaatcctcacaacgtctacatgcccacgagccagccgccgccacctccctactacccaccggaagataagaagacccagtaggccctcctgcctccctgcctcccaccctcatctctctaccctacccctcccatcggggctgtgctggggcttggggaggggagggggcgccttgttctccctccaggtctgatcataaacaattaccaggaactagcattgtgggacattagggcccccggcctcgggagaggtgccgcccagcttcccatgccagcccggagcccacagtgctgcccagcgtacctccctcaccgtctggggctcttctgggagcacggagcatcccctgttcctgtttcactctcagcttctcccctcgaagggactctctggccacctcctccaccgcagtccagctccctcagtctggcacccactgctacactcagcctcatgagccacttcagaccagccaggtgtcttcccgggccctgccagaccctgctcacattccctctgctggtctgtgctggtctcagaaggccaccgcgcccgcattccactcagccagggtccagctgcagcccccgccacccttccttcccttccctgtcctgggtcatgttgttgccaccctgtgtgacttttgaagctgtaaaatgagcttccagggcttgggtggcgtcggggcagggccgccgaggctgggaggaagcccttctgccttttgctggtgtttctggaatttgctttccctcacctctcacttccttctagaaggagcttcctgactggaaccagagaatgcatgtctgtccacttggtggctgctgggtggggccgggaacaagggcccctgaccctgtgtgctggccgggacctgccaccagccccccagcctgcttcttccccttaagctttgtgcccctggatgcgctaacattcactcttgtttgtccctggactggccatgaagtgaggagatggttatttaaagagaattccctatttatttgacaaaaaatccagttaatatattaatgtgaaataaaccctgtttgcacctcgatttgtttgctgaaaatgtgaaatagtaaaaatgaaataactgga

SEQ ID NO: 34521 - DNA, 1374 bp, Homo sapiens
  source 1..1374: mol_type = unassigned DNA
gttggagagactatggcgctcaacaagaatcactcggagggcggcggagtgatcgtcaataacaccgagaggcttgaaaaacaaaccagcaaaaacagaacatctatcacaaggacttaaaagaaaatagaagagttggccgggcgcagtggctcacgcctgtaatccctgcactttgggaggccgaggcaggtggatcacgaagtcaggagatcgagaccatcctggctaacacgcatcctaatgtcctatgatcacgtggaactcacattcaatgacatgaagaacgtgccagaagccttcaaagggaccaagaaaggcactgtctaccttaccccttaccgggtcatctttctgtccaagggcaaggatgccatgcagtccttcatgatgccattttatctcatgaaagactgtgagatcaagcagcccgtatttggtgcaaactacatcaagggaacagtgaaggcggaagcgggaggtggctgggaaggctctgcttcctacaagttgactttcacggcagggggcgccattgagttcggacagcggatgctccaggtggcatctcaagcctccagaggtgaagtccccagtggagcctatggctactcttacatgcccagcggggcctatgtctatcccccgccagtcgccaatggaatgtacccctgccctcctggctacccctatccaccgcccccacctgagttctatccaggaccccccatgatggacggggccatgggatacgtgcagcccccaccaccgccctaccctgggcccatggaacctccggtcagcggccccgatgtcccctccactcctgcagccgaagccaaggccgcagaagcagccgccagcgcctattacaacccaggcaatcctcacaacgtctacatgcccacgagccagccgccgccacctccctactacccaccggaagataagaagacccagtaggccctcctgcctccctgcctcccaccctcatctctctaccctacccctcccatcggggctgtgctggggcttggggaggggagggggcgccttgttctccctccaggtctgatcataaacaattaccaggaactagcattgtgggacattagggcccccggcctcgggagaggtgccgcccagcttcccatgccagcccggagcccacagtgctgcccagcgtacctccctcaccgtctggggctcttctgggagcacggagcatcccctgttcctgtttcactctcagcttctcccctcgaagggactctctggccacctcctccaccgcagtccagctccctcagtctggcacccactgctacactcagcctcatgagccacttcagaccagccaggtgtcttcccggg

SEQ ID NO: 34522 - DNA, 987 bp, Homo sapiens
  source 1..987: mol_type = unassigned DNA
attgcgttttgagtctcgggacccctgttggagagactatggcgctcaacaagaatcactcggagggcggcggagtgatcgtcaataacaccgagagcatcctaatgtcctatgatcacgtggaactcacattcaatgacatgaagaacgtgccagaagccttcaaagggaccaagaaaggcactgtctaccttaccccttaccgggtcatctttctgtccaagggcaaggatgccatgcagtccttcatgatgccattttatctcatgaaagactgtgagatcaagcagcccgtatttggtgcaaactacatcaagggaacagtgaaggcggaagcgggagcctccagaggtgaagtccccagtggagcctatggctactcttacatgcccagcggggcctatgtctatcccccgccagtcgccaatggaatgtacccctgccctcctggctacccctatccaccgcccccacctgagttctatccaggaccccccatgatggacggggccatgggatacgtgcagcccccaccaccgccctaccctgggcccatggaacctccggtcagcggccccgatgtcccctccactcctgcaggtgagggcccttgggtgctggcagcccttcgggaccagccctctcctccccgatgtcgcacagagagcctcagaatggccagagactgctgagagccgcagatgatggatgacccctggactaccccaggggcccagcagggctgtggcctggtggagcggagctagattctggccccacccccatcccttagctatccatgtgccctgggcggggaaggtcaccctgtgtgcctctcgatcctctcatctacactcagctggtcggtcacagtggcacctggggcattggctcaaggattagatgaggtgagacatgcgatgggcctggaaaggaccgtgccagcgcgtggcatgtgctcaggaaacctcacctgctgctctcatt

SEQ ID NO: 34523 - DNA, 658 bp, Homo sapiens
  source 1..658: mol_type = unassigned DNA
gagtctcgggacccctgttggagagactatggcgctcaacaagaatcactcggagggcggcggagtgatcgtcaataacaccgagagcatcctaatgtcctatgatcacgtggaactcacattcaatgacatgaagaacgtgccagaagccttcaaagggaccaagaaaggcactgtctaccttaccccttaccgggtcatctttctgtccaagggcaaggatgccatgcagtccttcatgatgccattttatctcatgaaagactgtgagatcaagcagcccgtatttggtgcaaactacatcaagggaacagtgaaggcggaagcgggaggtggctgggaaggctctgcttcctacaagttgactttcacggccccgatgtcccctccactcctgcagccgaagccaaggccgcagaagcagccgccagcgcctattacaacccaggcaatagccagccgccgccacctccctactacccaccggaagatagaagacccagtaggccctcctgcctccctgcctcccaccctcatctctctaccctacccctcccatcggggctgtgctggggcttggggaggggagggggcgccttgttctccctccaggtctgatcataaacaattaccaggaactagcattgtgggacattag

SEQ ID NO: 34524 - DNA, 928 bp, Homo sapiens
  source 1..928: mol_type = unassigned DNA
attgcgttttgagtctcgggacccctgttggagagactatggcgctcaacaagaatcactcggagggcggcggagtgatcgtcaataacaccgagagcatcctaatgtcctatgatcacgtggaactcacattcaatgacatgaagaacgtgccagaagccttcaaagggaccaagaaaggcactgtctaccttaccccttaccgggtcatctttctgtccaagggcaaggatgccatgcagtccttcatgatgccattttatctcatgaaagactgtgagatcaagcagcccgtatttggtgcaaactacatcaagggaacagtgaaggcggaagcgggaggtggctgggaaggctctgcttcctacaagttgactttcacggcagggggcgccattgagttcggacagcggatgctccaggtggcatctcaagagttctatccaggaccccccatgatggacggggccatgggatacgtgcagcccccaccaccgccctaccctgggcccatggaacctccggtcagcggccccgatgtcccctccactcctgcagccgaagccaaggccgcagaagcagccgccagcgcctattacaacccaggcaatcctcacaacgtctacatgcccacgagccagccgccgccacctccctactacccaccggaagataagaagacccagtaggccctcctgcctccctgcctcccaccctcatctctctaccctacccctcccatcggggctgtgctggggcttggggaggggagggggcgccttgttctccctccaggtctgatcataaacaattaccaggaactagcattgtgggacattagggcccccggcctcgggagaggtgccgcccagcttcccatgccagcccggagcccacagtgctgcccagcgtacctccctcaccgtct

SEQ ID NO: 34525 - DNA, 3362 bp, Homo sapiens
  source 1..3362: mol_type = unassigned DNA
attttgggacatggccactgcttcaccaaggtctgatactagtaataaccacagtggaaggttgcagttacaggtaactgtttctagtgccaaacttaaaagaaaaaagaactggttcggaacagcaatatatacagaagtagttgtagatggagaaattacgaaaacagcaaaatccagtagttcttctaatccaaaatgggatgaacagctaactgtaaatgttacgccacagactacattggaatttcaagtttggagccatcgcactttaaaagcagatgctttattaggaaaagcaacgatagatttgaaacaagctctgttgatacacaatagaaaattggaaagagtgaaagaacaattaaaactttccttggaaaacaagaatggcatagcacaaactggtgaattgacagttgtgcttgatggattggtgattgagcaagaaaatataacaaactgcagctcatctccaaccatagaaatacaggaaaatggtgatgccttacatgaaaatggagagccttcagcaaggacaactgccaggttggctgttgaaggcacgaatggaatagataatcatgtacctacaagcactctagtccaaaactcatgctgctcgtatgtagttaatggagacaacacaccttcatctccgtctcaggttgctgccagacccaaaaatacaccagctccaaaaccactcgcatctgagcctgccgatgacactgttaatggagaatcatcctcatttgcaccaactgataatgcgtctgtcacgggtactccagtagtgtctgaagaaaatgccttgtctccaaattgcactagtactactgttgaagatcctccagttcaagaaatactgacttcctcagaaaacaatgaatgtattccttctaccagtgcagaattggaatctgaagctagaagtatattagagcctgacacctctaattctagaagtagttctgcttttgaagcagccaaatcaagacagccagatgggtgtatggatcctgtacggcagcagtctgggaatgccaacacagaaaccttgccatcagggtgggaacaaagaaaagatcctcatggtagaacctattatgtggatcataatactcgaactaccacatgggagagaccacaacctttacctccaggttgggaaagaagagttgatgatcgtagaagagtttattatgtggatcataacaccagaacaacaacgtggcagcggcctaccatggaatctgtccgaaattttgaacagtggcaatctcagcggaaccaattgcagggagctatgcaacagtttaaccaacgatacctctattcggcttcaatgttagctgcagaaaatgacccttatggacctttgccaccaggctgggaaaaaagagtggattcaacagacagggtttactttgtgaatcataacacaaaaacaacccagtgggaagatccaagaactcaaggcttacagaatgaagaacccctgccagaaggctgggaaattagatatactcgtgaaggtgtaaggtactttgttgatcataacacaagaacaacaacattcaaagatcctcgcaatgggaagtcatctgtaactaaaggtggtccacaaattgcttatgaacgcggctttaggtggaagcttgctcacttccgttatttgtgccagtctaatgcactacctagtcatgtaaagatcaatgtgtcccggcagacattgtttgaagattccttccaacagattatggcattaaaaccctatgacttgaggaggcgcttatatgtaatatttagaggagaagaaggacttgattatggtggcctagcgagagaatggtttttcttgctttcacatgaagttttgaacccaatgtattgcttatttgagtatgcgggcaagaacaactattgtctgcagataaatccagcatcaaccattaatccagaccatctttcatacttctgtttcattggtcgttttattgccatggcactatttcatggaaagtttatcgatactggtttctctttaccattctacaagcgtatgttaagtaaaaaacttactattaaggatttggaatctattgatactgaattttataactcccttatctggataagagataacaacattgaagaatgtggcttagaaatgtacttttctgttgacatggagattttgggaaaagttacttcacatgacctgaagttgggaggttccaatattctggtgactgaggagaacaaagatgaatatattggtttaatgacagaatggcgtttttctcgaggagtacaagaacagaccaaagctttccttgatggttttaatgaagttgttcctcttcagtggctacagtacttcgatgaaaaagaattagaggttatgttgtgtggcatgcaggaggttgacttggcagattggcagagaaatactgtttatcgacattatacaagaaacagcaagcaaatcatttggttttggcagtttgtgaaagagacagacaatgaagtaagaatgcgactattgcagttcgtcactggaacctgccgtttacctctaggaggatttgctgagctcatgggaagtaatgggcctcaaaagttttgcattgaaaaagttggcaaagacacttggttaccaagaagccatacatgttttaatcgcttggatctaccaccatataagagttatgaacaactaaaggaaaaacttctttttgcaatagaagagacagagggatttggacaagaatgaatgtggcttcttattttggaggagctcttgcatttaaataccccagccaagaaaaattgcacagatagtgtatataagctgttcattctgtacagtgaattttccgaacctctcaaagtatgttttccgttcttccacagaaatatgcaaaacagttcatccttttctactttatttattgttcccttgaaatgactgaccaggaaaaagatcatccttaaattttgaagcaagtgagagactttattaaaaatacatatatatctatataaacatatatgatagtggctctagttttatagagctccaagtgtattaaacatgacagccattcattcataaagatctggatttgctttaccttgttaatattatctaggggaaaaagtgcaaattgctccatgttcttctctcccttatgtaacatctcctgagggtgtttagttgcatggctgttcagaaaggtattaagggcttaggccaaatcttactttgagtatgttaaaaaaaaaaaaatgctgctggcttttctgaagacaggtgcttgaacttgtcagtttgttttaaataaatacaatagttg

SEQ ID NO: 34526 - DNA, 2972 bp, Homo sapiens
  source 1..2972: mol_type = unassigned DNA
attttgggacatggccactgcttcaccaaggtctgatactagtaataaccacagtggaaggttgcagttacaggtaactgtttctagtgccaaacttaaaagaaaaaagaactggttcggaacagcaatatatacagaagtagttgtagatggagaaattacgaaaacagcaaaatccagtagttcttctaatccaaaatgggatgaacagctaactgtaaatgttacgccacagactacattggaatttcaagtttggagccatcgcactttaaaagcagatgctttattaggaaaagcaacgatagatttgaaacaagctctgttgatacacaatagaaaatttaatggagaatcatcctcatttgcaccaactgataatgcgtctgtcacgggtactccagtagtgtctgaagaaaatgccttgtctccaaattgcactagtactactgttgaagatcctccagttcaagaaatactgacttcctcagaaaacaatgaatgtattccttctaccagtgcagaattggaatctgaagctagaagtatattagagcctgacacctctaattctagaagtagttctgcttttgaagcagccaaatcaagacagccagatgggtgtatggatcctgtacggcagcagtctgggaatgccaacacagaaaccttgccatcagggtgggaacaaagaaaagatcctcatggtagaacctattatgtggatcataatactcgaactaccacatgggagagaccacaacctttacctccaggttgggaaagaagagttgatgatcgtagaagagtttattatgtggatcataacaccagaacaacaacgtggcagcggcctaccatggaatctgtccgaaattttgaacagtggcaatctcagcggaaccaattgcagggagctatgcaacagtttaaccaacgatacctctattcggcttcaatgttagctgcagaaaatgacccttatggacctttgccaccaggctgggaaaaaagagtggattcaacagacagggtttactttgtgaatcataacacaaaaacaacccagtgggaagatccaagaactcaaggcttacagaatgaagaacccctgccagaaggctgggaaattagatatactcgtgaaggtgtaaggtactttgttgatcataacacaagaacaacaacattcaaagatcctcgcaatgggaagtcatctgtaactaaaggtggtccacaaattgcttatgaacgcggctttaggtggaagcttgctcacttccgttatttgtgccagtctaatgcactacctagtcatgtaaagatcaatgtgtcccggcagacattgtttgaagattccttccaacagattatggcattaaaaccctatgacttgaggaggcgcttatatgtaatatttagaggagaagaaggacttgattatggtggcctagcgagagaatggtttttcttgctttcacatgaagttttgaacccaatgtattgcttatttgagtatgcgggcaagaacaactattgtctgcagataaatccagcatcaaccattaatccagaccatctttcatacttctgtttcattggtcgttttattgccatggcactatttcatggaaagtttatcgatactggtttctctttaccattctacaagcgtatgttaagtaaaaaacttactattaaggatttggaatctattgatactgaattttataactcccttatctggataagagataacaacattgaagaatgtggcttagaaatgtacttttctgttgacatggagattttgggaaaagttacttcacatgacctgaagttgggaggttccaatattctggtgactgaggagaacaaagatgaatatattggtttaatgacagaatggcgtttttctcgaggagtacaagaacagaccaaagctttccttgatggttttaatgaagttgttcctcttcagtggctacagtacttcgatgaaaaagaattagaggttatgttgtgtggcatgcaggaggttgacttggcagattggcagagaaatactgtttatcgacattatacaagaaacagcaagcaaatcatttggttttggcagtttgtgaaagagacagacaatgaagtaagaatgcgactattgcagttcgtcactggaacctgccgtttacctctaggaggatttgctgagctcatgggaagtaatgggcctcaaaagttttgcattgaaaaagttggcaaagacacttggttaccaagaagccatacatgttttaatcgcttggatctaccaccatataagagttatgaacaactaaaggaaaaacttctttttgcaatagaagagacagagggatttggacaagaatgaatgtggcttcttattttggaggagctcttgcatttaaataccccagccaagaaaaattgcacagatagtgtatataagctgttcattctgtacagtgaattttccgaacctctcaaagtatgttttccgttcttccacagaaatatgcaaaacagttcatccttttctactttatttattgttcccttgaaatgactgaccaggaaaaagatcatccttaaattttgaagcaagtgagagactttattaaaaatacatatatatctatataaacatatatgatagtggctctagttttatagagctccaagtgtattaaacatgacagccattcattcataaagatctggatttgctttaccttgttaatattatctaggggaaaaagtgcaaattgctccatgttcttctctcccttatgtaacatctcctgagggtgtttagttgcatggctgttcagaaaggtattaagggcttaggccaaatcttactttgagtatgttaaaaaaaaaaaaatgctgctggcttttctgaagacaggtgcttgaacttgtcagtttgttttaaataaatacaatagttg

SEQ ID NO: 34527 - DNA, 2708 bp, Homo sapiens
  source 1..2708: mol_type = unassigned DNA
attttgggacatggccactgcttcaccaaggtctgatactagtaataaccacagtggaaggttgcagttacaggtaactgttaatggagaatcatcctcatttgcaccaactgataatgcgtctgtcacgggtactccagtagtgtctgaagaaaatgccttgtctccaaattgcactagtactactgttgaagatcctccagttcaagaaatactgacttcctcagaaaacaatgaatgtattccttctaccagtgcagaattggaatctgaagctagaagtatattagagcctgacacctctaattctagaagtagttctgcttttgaagcagccaaatcaagacagccagatgggtgtatggatcctgtacggcagcagtctgggaatgccaacacagaaaccttgccatcagggtgggaacaaagaaaagatcctcatggtagaacctattatgtggatcataatactcgaactaccacatgggagagaccacaacctttacctccaggttgggaaagaagagttgatgatcgtagaagagtttattatgtggatcataacaccagaacaacaacgtggcagcggcctaccatggaatctgtccgaaattttgaacagtggcaatctcagcggaaccaattgcagggagctatgcaacagtttaaccaacgatacctctattcggcttcaatgttagctgcagaaaatgacccttatggacctttgccaccaggctgggaaaaaagagtggattcaacagacagggtttactttgtgaatcataacacaaaaacaacccagtgggaagatccaagaactcaaggcttacagaatgaagaacccctgccagaaggctgggaaattagatatactcgtgaaggtgtaaggtactttgttgatcataacacaagaacaacaacattcaaagatcctcgcaatgggaagtcatctgtaactaaaggtggtccacaaattgcttatgaacgcggctttaggtggaagcttgctcacttccgttatttgtgccagtctaatgcactacctagtcatgtaaagatcaatgtgtcccggcagacattgtttgaagattccttccaacagattatggcattaaaaccctatgacttgaggaggcgcttatatgtaatatttagaggagaagaaggacttgattatggtggcctagcgagagaatggtttttcttgctttcacatgaagttttgaacccaatgtattgcttatttgagtatgcgggcaagaacaactattgtctgcagataaatccagcatcaaccattaatccagaccatctttcatacttctgtttcattggtcgttttattgccatggcactatttcatggaaagtttatcgatactggtttctctttaccattctacaagcgtatgttaagtaaaaaacttactattaaggatttggaatctattgatactgaattttataactcccttatctggataagagataacaacattgaagaatgtggcttagaaatgtacttttctgttgacatggagattttgggaaaagttacttcacatgacctgaagttgggaggttccaatattctggtgactgaggagaacaaagatgaatatattggtttaatgacagaatggcgtttttctcgaggagtacaagaacagaccaaagctttccttgatggttttaatgaagttgttcctcttcagtggctacagtacttcgatgaaaaagaattagaggttatgttgtgtggcatgcaggaggttgacttggcagattggcagagaaatactgtttatcgacattatacaagaaacagcaagcaaatcatttggttttggcagtttgtgaaagagacagacaatgaagtaagaatgcgactattgcagttcgtcactggaacctgccgtttacctctaggaggatttgctgagctcatgggaagtaatgggcctcaaaagttttgcattgaaaaagttggcaaagacacttggttaccaagaagccatacatgttttaatcgcttggatctaccaccatataagagttatgaacaactaaaggaaaaacttctttttgcaatagaagagacagagggatttggacaagaatgaatgtggcttcttattttggaggagctcttgcatttaaataccccagccaagaaaaattgcacagatagtgtatataagctgttcattctgtacagtgaattttccgaacctctcaaagtatgttttccgttcttccacagaaatatgcaaaacagttcatccttttctactttatttattgttcccttgaaatgactgaccaggaaaaagatcatccttaaattttgaagcaagtgagagactttattaaaaatacatatatatctatataaacatatatgatagtggctctagttttatagagctccaagtgtattaaacatgacagccattcattcataaagatctggatttgctttaccttgttaatattatctaggggaaaaagtgcaaattgctccatgttcttctctcccttatgtaacatctcctgagggtgtttagttgcatggctgttcagaaaggtattaagggcttaggccaaatcttactttgagtatgttaaaaaaaaaaaaatgctgctggcttttctgaagacaggtgcttgaacttgtcagtttgttttaaataaatacaatagttg

SEQ ID NO: 34528 - DNA, 2163 bp, Homo sapiens
  source 1..2163: mol_type = unassigned DNA
atggccactgcttcaccaaggtctgatactagtaataaccacagtggaaggttgcagttacaggtaactgtttctagtgccaaacttaaaagaaaaaagaactggttcggaacagcaatatatacagaagtagttgtagatggagaaattacgaaaacagcaaaatccagtagttcttctaatccaaaatgggatgaacagctaactgtaaatgttacgccacagactacattggaatttcaagtttggagccatcgcactttaaaagcagatgctttattaggaaaagcaacgatagatttgaaacaagctctgttgatacacaatagaaaattggaaagagtgaaagaacaattaaaactttccttggaaaacaagaatggcatagcacaaactggtgaattgacagttgtgcttgatggattggtgattgagcaagaaaatataacaaactgcagctcatctccaaccatagaaatacaggaaaatggtgatgccttacatgaaaatggagagccttcagcaaggacaactgccagttaatggagaatcatcctcatttgcaccaactgataatgcgtctgtcacgggtactccagtagtgtctgaagaaaatgccttgtctccaaattgcactagtactactgttgaagatcctccagttcaagaaatactgacttcctcagaaaacaatgaatgtattccttctaccagtgcagaattggaatctgaagctagaagtatattagagcctgacacctctaattctagaagtagttctgcttttgaagcagccaaatcaagacagccagatgggtgtatggatcctgtacggcagcagtctgggaatgccaacacagaaaccttgccatcagggtgggaacaaagaaaagatcctcatggtagaacctattatgtggatcataatactcgaactaccacatgggagagaccacaacctttacctccaggttgggaaagaagagttgatgatcgtagaagagtttattatgtggatcataacaccagaacaacaacgtggcagcggcctaccatggaatctgtccgaaattttgaacagtggcaatctcagcggaaccaattgcagggagctatgcaacagtttaaccaacgatacctctattcggcttcaatgttagctgcagaaaatgacccttatggacctttgccaccaggctgggaaaaaagagtggattcaacagacagggtttactttgtgaatcataacacaaaaacaacccagtgggaagatccaagaactcaaggcttacagaatgaagaacccctgccagaaggctgggaaattagatatactcgtgaaggtgtaaggtactttgttgatcataacacaagaacaacaacattcaaagatcctcgcaatgggaagtcatctgtaactaaaggtggtccacaaattgcttatgaacgcggctttaggtggaagcttgctcacttccgttatttgtgccagtctaatgcactacctagtcatgtaaagatcaatgtgtcccggcagacattgtttgaagattccttccaacagattatggcattaaaaccctatgacttgaggaggcgcttatatgtaatatttagaggagaagaaggacttgattatggtggcctagcgagagaatggtttttcttgctttcacatgaagttttgaacccaatgtattgcttatttgagtatgcgggcaagaacaactattgtctgcagataaatccagcatcaaccattaatccagaccatctttcatacttctgtttcattggtcgttttattgccatggcactatttcatggaaagtttatcgatactggtttctctttaccattctacaagcgtatgttaagtaaaaaacttactattaaggatttggaatctattgatactgaattttataactcccttatctggataaggtttgaagattttgttttgcaataagtcatttttttgaaacccattttgtttcattttgttaattagtgtatatatatttatttcacccagagataacaacattgaagaatgtggcttagaaatgtacttttctgttgacatggagattttgggaaaagttacttcacatgacctgaagttgggaggttccaatattctggtgactgaggagaaca

SEQ ID NO: 34529 - DNA, 4686 bp, Homo sapiens
  source 1..4686: mol_type = unassigned DNA
ggcgagctccgcgtgcgggttccgagtggctgctggcggcctgggctgccggggccgacgcctgggtggctgctgccgccgcgcctgctgcgagatggcgatcttgggcgcggaagggtgagggcgcccgccgcaggaggaggtgccgctgccgtggccgcccggctgccgggagccgacagcttcgcgccggggttgtctcctcacagactatgagctccttgaaagagggaatcgtgtcttactcatctttgtatccccagtgtctagcagttcctgatacatagttttagctgaattttgggacatggccactgcttcaccaaggtctgatactagtaataaccacagtggaaggttgcagttacaggtaactgtttctagtgccaaacttaaaagaaaaaagaactggttcggaacagcaatatatacagaagtagttgtagatggagaaattacgaaaacagcaaaatccagtagttcttctaatccaaaatgggatgaacagctaactgtaaatgttacgccacagactacattggaatttcaagtttggagccatcgcactttaaaagcagatgctttattaggaaaagcaacgatagatttgaaacaagctctgttgatacacaatagaaaattggaaagagtgaaagaacaattaaaactttccttggaaaacaagaatggcatagcacaaactggtgaattgacagttgtgcttgatggattggtgattgagcaagaaaatataacaaactgcagctcatctccaaccatagaaatacaggaaaatggtgatgccttacatgaaaatggagagccttcagcaaggacaactgccaggttggctgttgaaggcacgaatggaatagataatcatgtacctacaagcactctagtccaaaactcatgctgctcgtatgtagttaatggagacaacacaccttcatctccgtctcaggttgctgccagacccaaaaatacaccagctccaaaaccactcgcatctgagcctgccgatgacactgttaatggagaatcatcctcatttgcaccaactgataatgcgtctgtcacgggtactccagtagtgtctgaagaaaatgccttgtctccaaattgcactagtactactgttgaagatcctccagttcaagaaatactgacttcctcagaaaacaatgaatgtattccttctaccagtgcagaattggaatctgaagctagaagtatattagagcctgacacctctaattctagaagtagttctgcttttgaagcagccaaatcaagacagccagatgggtgtatggatcctgtacggcagcagtctgggaatgccaacacagaaaccttgccatcagggtgggaacaaagaaaagatcctcatggtagaacctattatgtggatcataatactcgaactaccacatgggagagaccacaacctttacctccaggttgggaaagaagagttgatgatcgtagaagagtttattatgtggatcataacaccagaacaacaacgtggcagcggcctaccatggaatctgtccgaaattttgaacagtggcaatctcagcggaaccaattgcagggagctatgcaacagtttaaccaacgatacctctattcggcttcaatgttagctgcagaaaatgacccttatggacctttgccaccaggctgggaaaaaagagtggattcaacagacagggtttactttgtgaatcataacacaaaaacaacccagtgggaagatccaagaactcaaggcttacagaatgaagaacccctgccagaaggctgggaaattagatatactcgtgaaggtgtaaggtactttgttgatcataacacaagaacaacaacattcaaagatcctcgcaatgggaagtcatctgtaactaaaggtggtccacaaattgcttatgaacgcggctttaggtggaagcttgctcacttccgttatttgtgccagtctaatgcactacctagtcatgtaaagatcaatgtgtcccggcagacattgtttgaagattccttccaacagattatggcattaaaaccctatgacttgaggaggcgcttatatgtaatatttagaggagaagaaggacttgattatggtggcctagcgagagaatggtttttcttgctttcacatgaagttttgaacccaatgtattgcttatttgagtatgcgggcaagaacaactattgtctgcagataaatccagcatcaaccattaatccagaccatctttcatacttctgtttcattggtcgttttattgccatggcactatttcatggaaagtttatcgatactggtttctctttaccattctacaagcgtatgttaagtaaaaaacttactattaaggatttggaatctattgatactgaattttataactcccttatctggataagagataacaacattgaagaatgtggcttagaaatgtacttttctgttgacatggagattttgggaaaagttacttcacatgacctgaagttgggaggttccaatattctggtgactgaggagaacaaagatgaatatattggtttaatgacagaatggcgtttttctcgaggagtacaagaacagaccaaagctttccttgatggttttaatgaagttgttcctcttcagtggctacagtacttcgatgaaaaagaattagaggttatgttgtgtggcatgcaggaggttgacttggcagattggcagagaaatactgtttatcgacattatacaagaaacagcaagcaaatcatttggttttggcagtttgtgaaagagacagacaatgaagtaagaatgcgactattgcagttcgtcactggaacctgccgtttacctctaggaggatttgctgagctcatgggaagtaatgggcctcaaaagttttgcattgaaaaagttggcaaagacacttggttaccaagaagccatacatgttttaatcgcttggatctaccaccatataagagttatgaacaactaaaggaaaaacttctttttgcaatagaagagacagagggatttggacaagaatgaatgtggcttcttattttggaggagctcttgcatttaaataccccagccaagaaaaattgcacagatagtgtatataagctgttcattctgtacagtgaattttccgaacctctcaaagtatgttttccgttcttccacagaaatatgcaaaacagttcatccttttctactttatttattgttcccttgaaatgactgaccaggaaaaagatcatccttaaattttgaagcaagtgagagactttattaaaaatacatatatatctatataaacatatatgatagtggctctagttttatagagctccaagtgtattaaacatgacagccattcattcataaagatctggatttgctttaccttgttaatattatctaggggaaaaagtgcaaattgctccatgttcttctctcccttatgtaacatctcctgagggtgtttagttgcatggctgttcagaaaggtattaagggcttaggccaaatcttactttgagtatgttaaaaaaaaaaaaatgctgctggcttttctgaagacaggtgcttgaacttgtcagtttgttttaaataaatacaatagttgaaaatttttctctgttacatcagtaatattgttaaagtaatggatagaaccataacttacacatgaaagtcatatactagatccaatactatttagtttattatcgaaattggaaggattcattgagcagcatagaagtttgtttacatgttactttgagatgctaggtatttgtggaattaaaaagaatcaggctcttttgtactttgtttttaaatctgtgatgcttttcaaatttaattcataataaattgatgcaatttcatacttaggaacatacaaaaggtaatgtaaactctgccacttttttgtgttcaaaattttggtttttatgaagccagatggattgaagagttacataagcatttgaatgctctaatataaggctaatgattttctgttagtgtttgaatatcttcattcctctcaaattcataacagttctatttaactgaattaaataaccatatgaaaaatcttttgggtctccccctttttacacagataattatttttgtcataacactttttaattgtttttcatcataggggcctttgctgaactacaaaaatgtgtaacaaattaaaatctgatgtgaatgatattaatgctacttttagcaaactgggcttcctaatacaaaattttaaatttccatttgtatcatgcttttaatatgcactgtaaatttcattaacttaaacattttttaatagccatggaactgacttcttaaaatctgttgcctataaatatttcactgctaagtacatacagaaaaacagtaattattgttttgccaaaattttatttttctacatattgagagtgtgttctccattttattcagaattcatagtaaagacgaaagaaaggcagagatctgcttggttgaatagactccttttccaaatccttattatgaacactctggtaattttcaagcctaaagaattaaaaaaaaaattctaatgtatgtgacaggttatgtgatagagggaaactggccttcaaaaaggactgcgt

SEQ ID NO: 34530 - DNA, 4439 bp, Homo sapiens
  source 1..4439: mol_type = unassigned DNA
ttgtcttacagcttcacggtgatgatatggcatctgccagctctagccgggcaggagtggccctgccttttgagaagtctcagctcactttgaaagtggtgtccgcaaagcccaaggtgcataatcgtcaacctcgaattaactcctacgtggaggtggcggtggatggactccccagtgagaccaagaagactgggaagcgcattgggagctctgagcttctctggaatgagatcatcattttgaatgtcacggcacagagtcatttagatttaaaggtctggagctgccataccttgagaaatgaactgctaggcaccgcatctgtcaacctctccaacgtcttgaagaacaatgggggcaaaatggagaacatgcagctgaccctgaacctgcagacggagaacaaaggcagcgttgtctcaggcggagagctgacaattttcctggacgggccaactgttgatctgggaaatgtgcctaatggcagtgccctgacagatggatcacagctgccttcgagagactccagtggaacagcagtagctccagagaaccggcaccagccccccagcacaaactgctttggtggaagatcccggacgcacagacattcgggtgcttcagccagaacaaccccagcaaccggcgagcaaagccccggtgctcggagccggcaccgccagcccgtcaagaactcaggccacagtggcttggccaatggcacagtgaatgatgaacccacaacagccactgatcccgaagaaccttccgttgttggtgtgacgtccccacctgctgcacccttgagtgtgaccccgaatcccaacacgacttctctccctgccccagccacaccggctgaaggagaggaacccagcacttcgggtacacagcagctcccagcggctgcccaggcccccgacgctctgcctgctggatgggaacagcgagagctgcccaacggacgtgtctattatgttgaccacaataccaagaccaccacctgggagcggccccttcctccaggctgggaaaaacgcacagatccccgaggcaggttttactatgtggatcacaatactcggaccaccacctggcagcgtccgaccgcggagtacgtgcgcaactatgagcagtggcagtcgcagcggaatcagctccagggggccatgcagcacttcagccaaagattcctctaccagtcttcgagtgcttcgactgaccatgatcccctgggccccctccctcctggctgggagaagagacaggacaatggacgggtgtattacgtgaaccataacactcgcacgacccagtgggaggatccccggacccaggggatgatccaggaaccagctctgcccccaggatgggagatgaaatacaccagcgagggggtgcgatactttgtggaccacaatacccgcaccaccacctttaaggatcctcgcccggggtttgagtcggggacgaagcaaggttcccctggtgcttatgaccgcagttttcggtggaagtatcaccagttccgtttcctctgccattcaaatgccctacctagccacgtgaagatcagcgtttccaggcagacgcttttcgaagattccttccaacagatcatgaacatgaaaccctatgacctgcgccgccggctctacatcatcatgcgtggcgaggagggcctggactatgggggcatcgccagagagtggtttttcctcctgtctcatgaggtgctcaaccctatgtattgtttatttgaatatgccggaaagaacaattactgcctgcagatcaaccccgcctcctccatcaacccggaccacctcacctactttcgctttataggcagattcatcgccatggcgctgtaccatggaaagttcatcgacacgggcttcaccctccctttctacaagcggatgctcaataagagaccaaccctgaaagacctggagtccattgaccctgagttctacaactccattgtctggatcaaagagaacaacctggaagaatgtggcctggagctgtacttcatccaggacatggagatactgggcaaggtgacgacccacgagctgaaggagggcggcgagagcatccgggtcacagaggagaacaaggaagagtacatcatgctgctgactgactggcgtttcacccgaggcgtggaagagcagaccaaagccttcctggatggcttcaacgaggtggccccgctggagtggctgcgctactttgacgagaaagagctggagctgatgctgtgcggcatgcaggagatagacatgagcgactggcagaagagcaccatctaccggcactacaccaagaacagcaagcagatccagtggttctggcaggtggtgaaggagatggacaacgagaagaggatccggctgctgcagtttgtcaccggtacctgccgcctgcccgtcgggggatttgccgaactcatcggtagcaacggaccacagaagttttgcattgacaaagttggcaaggaaacctggctgcccagaagccacacctgcttcaaccgtctggatcttccaccctacaagagctacgaacagctgagagagaagctgctgtatgccattgaggagaccgagggctttggacaggagtaaccgaggccgcccctcccacgccccccagcgcacatgtagtcctgagtcctccctgcctgagaggccactggccccgcagcccttgggaggcccccgtggatgtggccctgtgtgggaccacactgtcatctcgctgctggcagaaaagcctgatcccaggaggccctgcagttcccccgacccgcggatggcagtctggaataaagccccctagttgcctttggccccacctttgcaaagttccagagggctgaccctctctgcaaaactctcccctgtcctctagaccccaccctgggtgtatgtgagtgtgcaagggaaggtgttgcatccccaggggctgccgcagaggccggagacctcctggactagttcggcgaggagactggccactgggggtggctgttcgggactgagagcgccaagggtctttgccagcaaaggaggttctgcctgtaattgagcctctctgatgatggagatgaagtgaaggtctgagggagcgggccctggggcgaggccatctctgcctgcctccctagcaggcgccagcggtggaggctgagtcgcaggacacatgccggccagttaattcattctcagccaatgaaggtttgtctaagctgcctgggtatccacgggacaaaaacagcaaactccctcagactttgtccatgtataaacttgaagtggttgtgttgtagggttgcaggttttttgttacgctgctgtcactttctgtccaggagctggcaccccaggtgttctgagaccttgagggacccagacctttgggtccaagagtttcccaaacagccacgcctctcaggaacccacctggcggttccgtgagctcaggcaggcctgacccggcggcacagcctggcagggacctcgtccccaagcctggcagaatgagaggggttgaggtcccgagcgccactcctagccttgccgccttcaatagagaagaaatccctttgctagatagggtcccccaggcagtccccagtggcgggacacaggggtccggctgtggagctcccctgccagcccctggagctccaggagggcctgttggtcccctgttcagaatggagtgcagcccgccagcggaaagtgttcattctgcataggtgtgaggctttatctgcacacaggacatgaaaaccagcagaaaggccctgagctgctgcatagccccatctgatttctgcagttcccgccagcctccaacacggggactctgccgtaactggaatcttcataggtcatattgaaatcttcaaggtgaccatgccccaccggggtgctggggcagtagtcatggcagactcccggcctgggcccccaggattctaggacccccaggcagccccttggactggtcccgggtgccttccaagcacagtctccatgctcccagattctcgaccttcccccggcccgggaggtgcagcctgcgtctgcctctgtcgtgtgtgctgatttgagtggcttagcttgccacagcgcagcctcttctgtccctttcagtcatttgctgtacttccctgtggcacgttaccatggaagccgctccagggtgggtcagggtgcaagctgctggtgaggtttggaagcatcaggctcacgggtgttcatgtgtgttcgtgcgtgtgtgtgcgtacgtgtatataactgaagtgtctgtacggaatgccctttgctagccatgggctggtcaccagattgttttgtaatgcccgccccttgcctcgatattgccagtttcttgtgcaataaacaatcagcagctgt

SEQ ID NO: 34531 - DNA, 4515 bp, Homo sapiens
  source 1..4515: mol_type = unassigned DNA
gcgcggtcacgtgacccggcccgagtgcgggcggtggaaggcggaagtaggagaggagttcggcgccgcttctgtggccacggcagcttcacggtgatgatatggcatctgccagctctagccgggcaggagtggccctgccttttgagaagtctcagctcactttgaaagtggtgtccgcaaagcccaaggtgcataatcgtcaacctcgaattaactcctacgtggaggtggcggtggatggactccccagtgagaccaagaagactgggaagcgcattgggagctctgagcttctctggaatgagatcatcattttgaatgtcacggcacagagtcatttagatttaaaggtctggagctgccataccttgagaaatgaactgctaggcaccgcatctgtcaacctctccaacgtcttgaagaacaatgggggcaaaatggagaacatgcagctgaccctgaacctgcagacggagaacaaaggcagcgttgtctcaggcggagagctgacaattttcctggacgggccaactgttgatctgggaaatgtgcctaatggcagtgccctgacagatggatcacagctgccttcgagagactccagtggaacagcagtagctccagagaaccggcaccagccccccagcacaaactgctttggtggaagatcccggacgcacagacattcgggtgcttcagccagaacaaccccagcaaccggcgagcaaagccccggtgctcggagccggcaccgccagcccgtcaagaactcaggccacagtggcttggccaatggcacagtgaatgatgaacccacaacagccactgatcccgaagaaccttccgttgttggtgtgacgtccccacctgctgcacccttgagtgtgaccccgaatcccaacacgacttctctccctgccccagccacaccggctgaaggagaggaacccagcacttcgggtacacagcagctcccagcggctgcccaggcccccgacgctctgcctgctggatgggaacagcgagagctgcccaacggacgtgtctattatgttgaccacaataccaagaccaccacctgggagcggccccttcctccaggctgggaaaaacgcacagatccccgaggcaggttttactatgtggatcacaatactcggaccaccacctggcagcgtccgaccgcggagtacgtgcgcaactatgagcagtggcagtcgcagcggaatcagctccagggggccatgcagcacttcagccaaagattcctctaccagtcttcgagtgcttcgactgaccatgatcccctgggccccctccctcctggctgggagaagagacaggacaatggacgggtgtattacgtgaaccataacactcgcacgacccagtgggaggatccccggacccaggggatgatccaggaaccagctctgcccccaggatgggagatgaaatacaccagcgagggggtgcgatactttgtggaccacaatacccgcaccaccacctttaaggatcctcgcccggggtttgagtcggggacgaagcaaggttcccctggtgcttatgaccgcagttttcggtggaagtatcaccagttccgtttcctctgccattcaaatgccctacctagccacgtgaagatcagcgtttccaggcagacgcttttcgaagattccttccaacagatcatgaacatgaaaccctatgacctgcgccgccggctctacatcatcatgcgtggcgaggagggcctggactatgggggcatcgccagagagtggtttttcctcctgtctcatgaggtgctcaaccctatgtattgtttatttgaatatgccggaaagaacaattactgcctgcagatcaaccccgcctcctccatcaacccggaccacctcacctactttcgctttataggcagattcatcgccatggcgctgtaccatggaaagttcatcgacacgggcttcaccctccctttctacaagcggatgctcaataagagaccaaccctgaaagacctggagtccattgaccctgagttctacaactccattgtctggatcaaagagaacaacctggaagaatgtggcctggagctgtacttcatccaggacatggagatactgggcaaggtgacgacccacgagctgaaggagggcggcgagagcatccgggtcacagaggagaacaaggaagagtacatcatgctgctgactgactggcgtttcacccgaggcgtggaagagcagaccaaagccttcctggatggcttcaacgaggtggccccgctggagtggctgcgctactttgacgagaaagagctggagctgatgctgtgcggcatgcaggagatagacatgagcgactggcagaagagcaccatctaccggcactacaccaagaacagcaagcagatccagtggttctggcaggtggtgaaggagatggacaacgagaagaggatccggctgctgcagtttgtcaccggtacctgccgcctgcccgtcgggggatttgccgaactcatcggtagcaacggaccacagaagttttgcattgacaaagttggcaaggaaacctggctgcccagaagccacacctgcttcaaccgtctggatcttccaccctacaagagctacgaacagctgagagagaagctgctgtatgccattgaggagaccgagggctttggacaggagtaaccgaggccgcccctcccacgccccccagcgcacatgtagtcctgagtcctccctgcctgagaggccactggccccgcagcccttgggaggcccccgtggatgtggccctgtgtgggaccacactgtcatctcgctgctggcagaaaagcctgatcccaggaggccctgcagttcccccgacccgcggatggcagtctggaataaagccccctagttgcctttggccccacctttgcaaagttccagagggctgaccctctctgcaaaactctcccctgtcctctagaccccaccctgggtgtatgtgagtgtgcaagggaaggtgttgcatccccaggggctgccgcagaggccggagacctcctggactagttcggcgaggagactggccactgggggtggctgttcgggactgagagcgccaagggtctttgccagcaaaggaggttctgcctgtaattgagcctctctgatgatggagatgaagtgaaggtctgagggagcgggccctggggcgaggccatctctgcctgcctccctagcaggcgccagcggtggaggctgagtcgcaggacacatgccggccagttaattcattctcagccaatgaaggtttgtctaagctgcctgggtatccacgggacaaaaacagcaaactccctcagactttgtccatgtataaacttgaagtggttgtgttgtagggttgcaggttttttgttacgctgctgtcactttctgtccaggagctggcaccccaggtgttctgagaccttgagggacccagacctttgggtccaagagtttcccaaacagccacgcctctcaggaacccacctggcggttccgtgagctcaggcaggcctgacccggcggcacagcctggcagggacctcgtccccaagcctggcagaatgagaggggttgaggtcccgagcgccactcctagccttgccgccttcaatagagaagaaatccctttgctagatagggtcccccaggcagtccccagtggcgggacacaggggtccggctgtggagctcccctgccagcccctggagctccaggagggcctgttggtcccctgttcagaatggagtgcagcccgccagcggaaagtgttcattctgcataggtgtgaggctttatctgcacacaggacatgaaaaccagcagaaaggccctgagctgctgcatagccccatctgatttctgcagttcccgccagcctccaacacggggactctgccgtaactggaatcttcataggtcatattgaaatcttcaaggtgaccatgccccaccggggtgctggggcagtagtcatggcagactcccggcctgggcccccaggattctaggacccccaggcagccccttggactggtcccgggtgccttccaagcacagtctccatgctcccagattctcgaccttcccccggcccgggaggtgcagcctgcgtctgcctctgtcgtgtgtgctgatttgagtggcttagcttgccacagcgcagcctcttctgtccctttcagtcatttgctgtacttccctgtggcacgttaccatggaagccgctccagggtgggtcagggtgcaagctgctggtgaggtttggaagcatcaggctcacgggtgttcatgtgtgttcgtgcgtgtgtgtgcgtacgtgtatataactgaagtgtctgtacggaatgccctttgctagccatgggctggtcaccagattgttttgtaatgcccgccccttgcctcgatattgccagtttcttgtgcaataaacaatcagcagctgtg

SEQ ID NO: 34532 - DNA, 4491 bp, Homo sapiens
  source 1..4491: mol_type = unassigned DNA
ttcggcgccgcttctgtggccacggcaggtagcgagcgctggcgcggggggcgcgtcttacagcttcacggtgatgatatggcatctgccagctctagccgggcaggagtggccctgccttttgagaagtctcagctcactttgaaagtggtgtccgcaaagcccaaggtgcataatcgtcaacctcgaattaactcctacgtggaggtggcggtggatggactccccagtgagaccaagaagactgggaagcgcattgggagctctgagcttctctggaatgagatcatcattttgaatgtcacggcacagagtcatttagatttaaaggtctggagctgccataccttgagaaatgaactgctaggcaccgcatctgtcaacctctccaacgtcttgaagaacaatgggggcaaaatggagaacatgcagctgaccctgaacctgcagacggagaacaaaggcagcgttgtctcaggcggagagctgacaattttcctggacgggccaactgttgatctgggaaatgtgcctaatggcagtgccctgacagatggatcacagctgccttcgagagactccagtggaacagcagtagctccagagaaccggcaccagccccccagcacaaactgctttggtggaagatcccggacgcacagacattcgggtgcttcagccagaacaaccccagcaaccggcgagcaaagccccggtgctcggagccggcaccgccagcccgtcaagaactcaggccacagtggcttggccaatggcacagtgaatgatgaacccacaacagccactgatcccgaagaaccttccgttgttggtgtgacgtccccacctgctgcacccttgagtgtgaccccgaatcccaacacgacttctctccctgccccagccacaccggctgaaggagaggaacccagcacttcgggtacacagcagctcccagcggctgcccaggcccccgacgctctgcctgctggatgggaacagcgagagctgcccaacggacgtgtctattatgttgaccacaataccaagaccaccacctgggagcggccccttcctccaggctgggaaaaacgcacagatccccgaggcaggttttactatgtggatcacaatactcggaccaccacctggcagcgtccgaccgcggagtacgtgcgcaactatgagcagtggcagtcgcagcggaatcagctccagggggccatgcagcacttcagccaaagattcctctaccagtcttcgagtgcttcgactgaccatgatcccctgggccccctccctcctggctgggagaagagacaggacaatggacgggtgtattacgtgaaccataacactcgcacgacccagtgggaggatccccggacccaggggatgatccaggaaccagctctgcccccaggatgggagatgaaatacaccagcgagggggtgcgatactttgtggaccacaatacccgcaccaccacctttaaggatcctcgcccggggtttgagtcggggacgaagcaaggttcccctggtgcttatgaccgcagttttcggtggaagtatcaccagttccgtttcctctgccattcaaatgccctacctagccacgtgaagatcagcgtttccaggcagacgcttttcgaagattccttccaacagatcatgaacatgaaaccctatgacctgcgccgccggctctacatcatcatgcgtggcgaggagggcctggactatgggggcatcgccagagagtggtttttcctcctgtctcatgaggtgctcaaccctatgtattgtttatttgaatatgccggaaagaacaattactgcctgcagatcaaccccgcctcctccatcaacccggaccacctcacctactttcgctttataggcagattcatcgccatggcgctgtaccatggaaagttcatcgacacgggcttcaccctccctttctacaagcggatgctcaataagagaccaaccctgaaagacctggagtccattgaccctgagttctacaactccattgtctggatcaaagagaacaacctggaagaatgtggcctggagctgtacttcatccaggacatggagatactgggcaaggtgacgacccacgagctgaaggagggcggcgagagcatccgggtcacagaggagaacaaggaagagtacatcatgctgctgactgactggcgtttcacccgaggcgtggaagagcagaccaaagccttcctggatggcttcaacgaggtggccccgctggagtggctgcgctactttgacgagaaagagctggagctgatgctgtgcggcatgcaggagatagacatgagcgactggcagaagagcaccatctaccggcactacaccaagaacagcaagcagatccagtggttctggcaggtggtgaaggagatggacaacgagaagaggatccggctgctgcagtttgtcaccggtacctgccgcctgcccgtcgggggatttgccgaactcatcggtagcaacggaccacagaagttttgcattgacaaagttggcaaggaaacctggctgcccagaagccacacctgcttcaaccgtctggatcttccaccctacaagagctacgaacagctgagagagaagctgctgtatgccattgaggagaccgagggctttggacaggagtaaccgaggccgcccctcccacgccccccagcgcacatgtagtcctgagtcctccctgcctgagaggccactggccccgcagcccttgggaggcccccgtggatgtggccctgtgtgggaccacactgtcatctcgctgctggcagaaaagcctgatcccaggaggccctgcagttcccccgacccgcggatggcagtctggaataaagccccctagttgcctttggccccacctttgcaaagttccagagggctgaccctctctgcaaaactctcccctgtcctctagaccccaccctgggtgtatgtgagtgtgcaagggaaggtgttgcatccccaggggctgccgcagaggccggagacctcctggactagttcggcgaggagactggccactgggggtggctgttcgggactgagagcgccaagggtctttgccagcaaaggaggttctgcctgtaattgagcctctctgatgatggagatgaagtgaaggtctgagggagcgggccctggggcgaggccatctctgcctgcctccctagcaggcgccagcggtggaggctgagtcgcaggacacatgccggccagttaattcattctcagccaatgaaggtttgtctaagctgcctgggtatccacgggacaaaaacagcaaactccctcagactttgtccatgtataaacttgaagtggttgtgttgtagggttgcaggttttttgttacgctgctgtcactttctgtccaggagctggcaccccaggtgttctgagaccttgagggacccagacctttgggtccaagagtttcccaaacagccacgcctctcaggaacccacctggcggttccgtgagctcaggcaggcctgacccggcggcacagcctggcagggacctcgtccccaagcctggcagaatgagaggggttgaggtcccgagcgccactcctagccttgccgccttcaatagagaagaaatccctttgctagatagggtcccccaggcagtccccagtggcgggacacaggggtccggctgtggagctcccctgccagcccctggagctccaggagggcctgttggtcccctgttcagaatggagtgcagcccgccagcggaaagtgttcattctgcataggtgtgaggctttatctgcacacaggacatgaaaaccagcagaaaggccctgagctgctgcatagccccatctgatttctgcagttcccgccagcctccaacacggggactctgccgtaactggaatcttcataggtcatattgaaatcttcaaggtgaccatgccccaccggggtgctggggcagtagtcatggcagactcccggcctgggcccccaggattctaggacccccaggcagccccttggactggtcccgggtgccttccaagcacagtctccatgctcccagattctcgaccttcccccggcccgggaggtgcagcctgcgtctgcctctgtcgtgtgtgctgatttgagtggcttagcttgccacagcgcagcctcttctgtccctttcagtcatttgctgtacttccctgtggcacgttaccatggaagccgctccagggtgggtcagggtgcaagctgctggtgaggtttggaagcatcaggctcacgggtgttcatgtgtgttcgtgcgtgtgtgtgcgtacgtgtatataactgaagtgtctgtacggaatgccctttgctagccatgggctggtcaccagattgttttgtaatgcccgccccttgcctcgatattgccagtttcttgtgcaataaacaatcagcagctgt

SEQ ID NO: 34533 - DNA, 2569 bp, Homo sapiens
  source 1..2569: mol_type = unassigned DNA
attttatagaaacgtttagtactcaccaaggccctcagtggaactggctgaaaatagcagcagactcactcagaaaagaattggagagatccatggcagggaagagagattaagggaaggtagagcgcttaggagagcttgaaaacccaaaggtggagaacatgcagctgaccctgaacctgcagacggagaacaaaggcagcgttgtctcaggcggagagctgacaattttcctggacgggccaactgttgatctgggaaatgtgcctaatggcagtgccctgacagatggatcacagctgccttcgagagactccagtggaacagcagtagctccagagaaccggcaccagccccccagcacaaactgctttggtggaagatcccggacgcacagacattcgggtgcttcagccagaacaaccccagcaaccggcgagcaaagccccggtgctcggagccggcaccgccagcccgtcaagaactcaggccacagtggcttggccaatggcacagtgaatgatgaacccacaacagccactgatcccgaagaaccttccgttgttggtgtgacgtccccacctgctgcacccttgagtgtgaccccgaatcccaacacgacttctctccctgccccagccacaccggctgaaggagaggaacccagcacttcgggtacacagcagctcccagcggctgcccaggcccccgacgctctgcctgctggatgggaacagcgagagctgcccaacggacgtgtctattatgttgaccacaataccaagaccaccacctgggagcggccccttcctccaggctgggaaaaacgcacagatccccgaggcaggttttactatgtggatcacaatactcggaccaccacctggcagcgtccgaccgcggagtacgtgcgcaactatgagcagtggcagtcgcagcggaatcagctccagggggccatgcagcacttcagccaaagattcctctaccagtcttcgagtgcttcgactgaccatgatcccctgggccccctccctcctggctgggagaagagacaggacaatggacgggtgtattacgtgaaccataacactcgcacgacccagtgggaggatccccggacccaggggatgatccaggaaccagctctgcccccaggatgggagatgaaatacaccagcgagggggtgcgatactttgtggaccacaatacccgcaccaccacctttaaggatcctcgcccggggtttgagtcggggacgaagcaaggttcccctggtgcttatgaccgcagttttcggtggaagtatcaccagttccgtttcctctgccattcaaatgccctacctagccacgtgaagatcagcgtttccaggcagacgcttttcgaagattccttccaacagatcatgaacatgaaaccctatgacctgcgccgccggctctacatcatcatgcgtggcgaggagggcctggactatgggggcatcgccagagagtggtttttcctcctgtctcatgaggtgctcaaccctatgtattgtttatttgaatatgccggaaagaacaattactgcctgcagatcaaccccgcctcctccatcaacccggaccacctcacctactttcgctttataggcagattcatcgccatggcgctgtaccatggaaagttcatcgacacgggcttcaccctccctttctacaagcggatgctcaataagagaccaaccctgaaagacctggagtccattgaccctgagttctacaactccattgtctggatcaaagagaacaacctggaagaatgtggcctggagctgtacttcatccaggacatggagatactgggcaaggtgacgacccacgagctgaaggagggcggcgagagcatccgggtcacagaggagaacaaggaagagtacatcatgctgctgactgactggcgtttcacccgaggcgtggaagagcagaccaaagccttcctggatggcttcaacgaggtggccccgctggagtggctgcgctactttgacgagaaagagctggagctgatgctgtgcggcatgcaggagatagacatgagcgactggcagaagagcaccatctaccggcactacaccaagaacagcaagcagatccagtggttctggcaggtggtgaaggagatggacaacgagaagaggatccggctgctgcagtttgtcaccggtacctgccgcctgcccgtcgggggatttgccgaactcatcggtagcaacggaccacagaagttttgcattgacaaagttggcaaggaaacctggctgcccagaagccacacctgcttcaaccgtctggatcttccaccctacaagagctacgaacagctgagagagaagctgctgtatgccattgaggagaccgagggctttggacaggagtaaccgaggccgcccctcccacgccccccagcgcacatgtagtcctgagtcctccctgcctgagaggccactggccccgcagcccttgggaggcccccgtggatgtggccctgtgtgggaccacactgtcatctcgctgctggcag

SEQ ID NO: 34534 - DNA, 2723 bp, Homo sapiens
  source 1..2723: mol_type = unassigned DNA
atggggaaagagagagggtgctccgagggggttgtgggaggtacagattccctgtggcacctccgactttttctacctatggtacccaaggaatgtcacggcacagagtcatttagatttaaaggtctggagctgccataccttgagaaatgaactgctaggcaccgcatctgtcaacctctccaacgtcttgaagaacaatgggggcaaaatggagaacatgcagctgaccctgaacctgcagacggagaacaaaggcagcgttgtctcaggcggagagctgacaattttcctggacgggccaactgttgatctgggaaatgtgcctaatggcagtgccctgacagatggatcacagctgccttcgagagactccagtggaacagcagtagctccagagaaccggcaccagccccccagcacaaactgctttggtggaagatcccggacgcacagacattcgggtgcttcagccagaacaaccccagcaaccggcgagcaaagccccggtgctcggagccggcaccgccagcccgtcaagaactcaggccacagtggcttggccaatggcacagtgaatgatgaacccacaacagccactgatcccgaagaaccttccgttgttggtgtgacgtccccacctgctgcacccttgagtgtgaccccgaatcccaacacgacttctctccctgccccagccacaccggctgaaggagaggaacccagcacttcgggtacacagcagctcccagcggctgcccaggcccccgacgctctgcctgctggatgggaacagcgagagctgcccaacggacgtgtctattatgttgaccacaataccaagaccaccacctgggagcggccccttcctccaggctgggaaaaacgcacagatccccgaggcaggttttactatgtggatcacaatactcggaccaccacctggcagcgtccgaccgcggagtacgtgcgcaactatgagcagtggcagtcgcagcggaatcagctccagggggccatgcagcacttcagccaaagattcctctaccagtcttcgagtgcttcgactgaccatgatcccctgggccccctccctcctggctgggagaagagacaggacaatggacgggtgtattacgtgaaccataacactcgcacgacccagtgggaggatccccggacccaggggatgatccaggaaccagctctgcccccaggatgggagatgaaatacaccagcgagggggtgcgatactttgtggaccacaatacccgcaccaccacctttaaggatcctcgcccggggtttgagtcggggacgaagcaaggttcccctggtgcttatgaccgcagttttcggtggaagtatcaccagttccgtttcctctgccattcaaatgccctacctagccacgtgaagatcagcgtttccaggcagacgcttttcgaagattccttccaacagatcatgaacatgaaaccctatgacctgcgccgccggctctacatcatcatgcgtggcgaggagggcctggactatgggggcatcgccagagagtggtttttcctcctgtctcatgaggtgctcaaccctatgtattgtttatttgaatatgccggaaagaacaattactgcctgcagatcaaccccgcctcctccatcaacccggaccacctcacctactttcgctttataggcagattcatcgccatggcgctgtaccatggaaagttcatcgacacgggcttcaccctccctttctacaagcggatgctcaataagagaccaaccctgaaagacctggagtccattgaccctgagttctacaactccattgtctggatcaaagagaacaacctggaagaatgtggcctggagctgtacttcatccaggacatggagatactgggcaaggtgacgacccacgagctgaaggagggcggcgagagcatccgggtcacagaggagaacaaggaagagtacatcatgctgctgactgactggcgtttcacccgaggcgtggaagagcagaccaaagccttcctggatggcttcaacgaggtggccccgctggagtggctgcgctactttgacgagaaagagctggagctgatgctgtgcggcatgcaggagatagacatgagcgactggcagaagagcaccatctaccggcactacaccaagaacagcaagcagatccagtggttctggcaggtggtgaaggagatggacaacgagaagaggatccggctgctgcagtttgtcaccggtacctgccgcctgcccgtcgggggatttgccgaactcatcggtagcaacggaccacagaagttttgcattgacaaagttggcaaggaaacctggctgcccagaagccacacctgcttcaaccgtctggatcttccaccctacaagagctacgaacagctgagagagaagctgctgtatgccattgaggagaccgagggctttggacaggagtaaccgaggccgcccctcccacgccccccagcgcacatgtagtcctgagtcctccctgcctgagaggccactggccccgcagcccttgggaggcccccgtggatgtggccctgtgtgggaccacactgtcatctcgctgctggcagaaaagcctgatcccaggaggccctgcagttcccccgacccgcggatggcagtctggaataaagccccctagttgcctttggccccacctttgcaa

SEQ ID NO: 34535 - DNA, 4471 bp, Homo sapiens
  source 1..4471: mol_type = unassigned DNA
ggcggaagtaggagaggagttcggcgccgcttctgtggccacggcagcttcacggtgatgatatggcatctgccagctctagccgggcaggagtggccctgccttttgagaagtctcagctcactttgaaagtggtgtccgcaaagcccaaggtgcataatcgtcaacctcgaattaactcctacgtggaggtggcggtggatggactccccagtgagaccaagaagactgggaagcgcattgggagctctgagcttctctggaatgagatcatcattttgaatgtcacggcacagagtcatttagatttaaaggtctggagctgccataccttgagaaatgaactgctaggcaccgcatctgtcaacctctccaacgtcttgaagaacaatgggggcaaaatggagaacatgcagctgaccctgaacctgcagacggagaacaaaggcagcgttgtctcaggcggagagctgacaattttcctggacgggccaactgttgatctgggaaatgtgcctaatggcagtgccctgacagatggatcacagctgccttcgagagactccagtggaacagcagtagctccagagaaccggcaccagccccccagcacaaactgctttggtggaagatcccggacgcacagacattcgggtgcttcagccagaacaaccccagcaaccggcgagcaaagccccggtgctcggagccggcaccgccagcccgtcaagaactcaggccacagtggcttggccaatggcacagtgaatgatgaacccacaacagccactgatcccgaagaaccttccgttgttggtgtgacgtccccacctgctgcacccttgagtgtgaccccgaatcccaacacgacttctctccctgccccagccacaccggctgaaggagaggaacccagcacttcgggtacacagcagctcccagcggctgcccaggcccccgacgctctgcctgctggatgggaacagcgagagctgcccaacggacgtgtctattatgttgaccacaataccaagaccaccacctgggagcggccccttcctccaggctgggaaaaacgcacagatccccgaggcaggttttactatgtggatcacaatactcggaccaccacctggcagcgtccgaccgcggagtacgtgcgcaactatgagcagtggcagtcgcagcggaatcagctccagggggccatgcagcacttcagccaaagattcctctaccagtcttcgagtgcttcgactgaccatgatcccctgggccccctccctcctggctgggagaagagacaggacaatggacgggtgtattacgtgaaccataacactcgcacgacccagtgggaggatccccggacccaggggatgatccaggaaccagctctgcccccaggatgggagatgaaatacaccagcgagggggtgcgatactttgtggaccacaatacccgcaccaccacctttaaggatcctcgcccggggtttgagtcggggacgaagcaaggttcccctggtgcttatgaccgcagttttcggtggaagtatcaccagttccgtttcctctgccattcaaatgccctacctagccacgtgaagatcagcgtttccaggcagacgcttttcgaagattccttccaacagatcatgaacatgaaaccctatgacctgcgccgccggctctacatcatcatgcgtggcgaggagggcctggactatgggggcatcgccagagagtggtttttcctcctgtctcatgaggtgctcaaccctatgtattgtttatttgaatatgccggaaagaacaattactgcctgcagatcaaccccgcctcctccatcaacccggaccacctcacctactttcgctttataggcagattcatcgccatggcgctgtaccatggaaagttcatcgacacgggcttcaccctccctttctacaagcggatgctcaataagagaccaaccctgaaagacctggagtccattgaccctgagttctacaactccattgtctggatcaaagagaacaacctggaagaatgtggcctggagctgtacttcatccaggacatggagatactgggcaaggtgacgacccacgagctgaaggagggcggcgagagcatccgggtcacagaggagaacaaggaagagtacatcatgctgctgactgactggcgtttcacccgaggcgtggaagagcagaccaaagccttcctggatggcttcaacgaggtggccccgctggagtggctgcgctactttgacgagaaagagctggagctgatgctgtgcggcatgcaggagatagacgcgactggcagaagagcaccatctaccggcactacaccaagaacagcaagcagatccagtggttctggcaggtggtgaaggagatggacaacgagaagaggatccggctgctgcagtttgtcaccggtacctgccgcctgcccgtcgggggatttgccgaactcatcggtagcaacggaccacagaagttttgcattgacaaagttggcaaggaaacctggctgcccagaagccacacctgcttcaaccgtctggatcttccaccctacaagagctacgaacagctgagagagaagctgctgtatgccattgaggagaccgagggctttggacaggagtaaccgaggccgcccctcccacgccccccagcgcacatgtagtcctgagtcctccctgcctgagaggccactggccccgcagcccttgggaggcccccgtggatgtggccctgtgtgggaccacactgtcatctcgctgctggcagaaaagcctgatcccaggaggccctgcagttcccccgacccgcggatggcagtctggaataaagccccctagttgcctttggccccacctttgcaaagttccagagggctgaccctctctgcaaaactctcccctgtcctctagaccccaccctgggtgtatgtgagtgtgcaagggaaggtgttgcatccccaggggctgccgcagaggccggagacctcctggactagttcggcgaggagactggccactgggggtggctgttcgggactgagagcgccaagggtctttgccagcaaaggaggttctgcctgtaattgagcctctctgatgatggagatgaagtgaaggtctgagggagcgggccctggggcgaggccatctctgcctgcctccctagcaggcgccagcggtggaggctgagtcgcaggacacatgccggccagttaattcattctcagccaatgaaggtttgtctaagctgcctgggtatccacgggacaaaaacagcaaactccctcagactttgtccatgtataaacttgaagtggttgtgttgtagggttgcaggttttttgttacgctgctgtcactttctgtccaggagctggcaccccaggtgttctgagaccttgagggacccagacctttgggtccaagagtttcccaaacagccacgcctctcaggaacccacctggcggttccgtgagctcaggcaggcctgacccggcggcacagcctggcagggacctcgtccccaagcctggcagaatgagaggggttgaggtcccgagcgccactcctagccttgccgccttcaatagagaagaaatccctttgctagatagggtcccccaggcagtccccagtggcgggacacaggggtccggctgtggagctcccctgccagcccctggagctccaggagggcctgttggtcccctgttcagaatggagtgcagcccgccagcggaaagtgttcattctgcataggtgtgaggctttatctgcacacaggacatgaaaaccagcagaaaggccctgagctgctgcatagccccatctgatttctgcagttcccgccagcctccaacacggggactctgccgtaactggaatcttcataggtcatattgaaatcttcaaggtgaccatgccccaccggggtgctggggcagtagtcatggcagactcccggcctgggcccccaggattctaggacccccaggcagccccttggactggtcccgggtgccttccaagcacagtctccatgctcccagattctcgaccttcccccggcccgggaggtgcagcctgcgtctgcctctgtcgtgtgtgctgatttgagtggcttagcttgccacagcgcagcctcttctgtccctttcagtcatttgctgtacttccctgtggcacgttaccatggaagccgctccagggtgggtcagggtgcaagctgctggtgaggtttggaagcatcaggctcacgggtgttcatgtgtgttcgtgcgtgtgtgtgcgtacgtgtatataactgaagtgtctgtacggaatgccctttgctagccatgggctggtcaccagattgttttgtaatgcccgccccttgcctcgatattgccagtttcttgtgcaataaacaatcagcagctgt

SEQ ID NO: 34536 - DNA, 3672 bp, Homo sapiens
  source 1..3672: mol_type = unassigned DNA
cccctcctgcgtgtggttcttggagaaagttggaggtggtggtgatttcagtcgccttggccgccttgagccggagctgagcggaggcactgggccgagcctgcttcccgggccttcctaccatgccagggctgctccctgcctccgccaccctggcacaccttcacccgcgtaccgcctcctccccgtcgctctgccttttccaaaactcacttgggccctccgtgcgcagggttcttttttggtttttctgtaaaaatcaaaacaaaaaacagagacttttgagaggagcagatgccacctaaagtcccactgcattccctgcaaagcgctcaaatgtggaagccagtcattggcatttttattttttattgattgattgattttttcaccagtggctttttgtaacctctgtgttctgctgtgtttcttgtgtttagtcttcgagtgcttcgactgaccatgatcccctgggccccctccctcctggctgggagaagagacaggacaatggacgggtgtattacgtgaaccataacactcgcacgacccagtgggaggatccccggacccaggggatgatccaggaaccagctctgcccccaggatgggagatgaaatacaccagcgagggggtgcgatactttgtggaccacaatacccgcaccaccacctttaaggatcctcgcccggggtttgagtcggggacgaagcaaggttcccctggtgcttatgaccgcagttttcggtggaagtatcaccagttccgtttcctctgccattcaaatgccctacctagccacgtgaagatcagcgtttccaggcagacgcttttcgaagattccttccaacagatcatgaacatgaaaccctatgacctgcgccgccggctctacatcatcatgcgtggcgaggagggcctggactatgggggcatcgccagagagtggtttttcctcctgtctcatgaggtgctcaaccctatgtattgtttatttgaatatgccggaaagaacaattactgcctgcagatcaaccccgcctcctccatcaacccggaccacctcacctactttcgctttataggcagattcatcgccatggcgctgtaccatggaaagttcatcgacacgggcttcaccctccctttctacaagcggatgctcaataagagaccaaccctgaaagacctggagtccattgaccctgagttctacaactccattgtctggatcaaagagaacaacctggaagaatgtggcctggagctgtacttcatccaggacatggagatactgggcaaggtgacgacccacgagctgaaggagggcggcgagagcatccgggtcacagaggagaacaaggaagagtacatcatgctgctgactgactggcgtttcacccgaggcgtggaagagcagaccaaagccttcctggatggcttcaacgaggtggccccgctggagtggctgcgctactttgacgagaaagagctggagctgatgctgtgcggcatgcaggagatagacatgagcgactggcagaagagcaccatctaccggcactacaccaagaacagcaagcagatccagtggttctggcaggtggtgaaggagatggacaacgagaagaggatccggctgctgcagtttgtcaccggtacctgccgcctgcccgtcgggggatttgccgaactcatcggtagcaacggaccacagaagttttgcattgacaaagttggcaaggaaacctggctgcccagaagccacacctgcttcaaccgtctggatcttccaccctacaagagctacgaacagctgagagagaagctgctgtatgccattgaggagaccgagggctttggacaggagtaaccgaggccgcccctcccacgccccccagcgcacatgtagtcctgagtcctccctgcctgagaggccactggccccgcagcccttgggaggcccccgtggatgtggccctgtgtgggaccacactgtcatctcgctgctggcagaaaagcctgatcccaggaggccctgcagttcccccgacccgcggatggcagtctggaataaagccccctagttgcctttggccccacctttgcaaagttccagagggctgaccctctctgcaaaactctcccctgtcctctagaccccaccctgggtgtatgtgagtgtgcaagggaaggtgttgcatccccaggggctgccgcagaggccggagacctcctggactagttcggcgaggagactggccactgggggtggctgttcgggactgagagcgccaagggtctttgccagcaaaggaggttctgcctgtaattgagcctctctgatgatggagatgaagtgaaggtctgagggagcgggccctggggcgaggccatctctgcctgcctccctagcaggcgccagcggtggaggctgagtcgcaggacacatgccggccagttaattcattctcagccaatgaaggtttgtctaagctgcctgggtatccacgggacaaaaacagcaaactccctcagactttgtccatgtataaacttgaagtggttgtgttgtagggttgcaggttttttgttacgctgctgtcactttctgtccaggagctggcaccccaggtgttctgagaccttgagggacccagacctttgggtccaagagtttcccaaacagccacgcctctcaggaacccacctggcggttccgtgagctcaggcaggcctgacccggcggcacagcctggcagggacctcgtccccaagcctggcagaatgagaggggttgaggtcccgagcgccactcctagccttgccgccttcaatagagaagaaatccctttgctagatagggtcccccaggcagtccccagtggcgggacacaggggtccggctgtggagctcccctgccagcccctggagctccaggagggcctgttggtcccctgttcagaatggagtgcagcccgccagcggaaagtgttcattctgcataggtgtgaggctttatctgcacacaggacatgaaaaccagcagaaaggccctgagctgctgcatagccccatctgatttctgcagttcccgccagcctccaacacggggactctgccgtaactggaatcttcataggtcatattgaaatcttcaaggtgaccatgccccaccggggtgctggggcagtagtcatggcagactcccggcctgggcccccaggattctaggacccccaggcagccccttggactggtcccgggtgccttccaagcacagtctccatgctcccagattctcgaccttcccccggcccgggaggtgcagcctgcgtctgcctctgtcgtgtgtgctgatttgagtggcttagcttgccacagcgcagcctcttctgtccctttcagtcatttgctgtacttccctgtggcacgttaccatggaagccgctccagggtgggtcagggtgcaagctgctggtgaggtttggaagcatcaggctcacgggtgttcatgtgtgttcgtgcgtgtgtgtgcgtacgtgtatataactgaagtgtctgtacggaatgccctttgctagccatgggctggtcaccagattgttttgtaatgcccgccccttgcctcgatattgccagtttcttgtgcaataaacaatcagcagct

SEQ ID NO: 34537 - DNA, 2474 bp, Homo sapiens
  source 1..2474: mol_type = unassigned DNA
agatgaaacagaaaggctaaagagggctggagtcaggggacttctcttccaccagcttcacggtgatgatatggcatctgccagctctagccgggcaggagtggccctgccttttgagaagtctcagctcactttgaaagtggtgtccgcaaagcccaaggtgcataatcgtcaacctcgaattaactcctacgtggaggtggcggtggatggactccccagtgagaccaagaagactgggaagcgcattgggagctctgagcttctctggaatgagatcatcattttgaatgtcacggcacagagtcatttagatttaaaggtctggagctgccataccttgagaaatgaactgctaggcaccgcatctgtcaacctctccaacgtcttgaagaacaatgggggcaaaatggagaacatgcagctgaccctgaacctgcagacggagaacaaaggcagcgttgtctcaggcggagagctgacaattttcctggacgggccaactgttgatctgggaaatgtgcctaatggcagtgccctgacagatggatcacagctgccttcgagagactccagtggaacagcagtagctccagagaaccggcaccagccccccagcacaaactgctttggtggaagatcccggacgcacagacattcgggtgcttcagccagaacaaccccagcaaccggcgagcaaagccccggtgctcggagccggcaccgccagcccgtcaagaactcaggccacagtggcttggccaatggcacagtgaatgatgaacccacaacagccactgatcccgaagaaccttccgttgttggtgtgacgtccccacctgctgcacccttgagtgtgaccccgaatcccaacacgacttctctccctgccccagccacaccggctgaaggagaggaacccagcacttcgggtacacagcagctcccagcggctgcccaggcccccgacgctctgcctgctggatgggaacagcgagagctgcccaacggacgtgtctattatgttgaccacaataccaagaccaccacctgggagcggccccttcctccagggtaggtcatcaactgagaagacctgagactctggaactgacaccatgagtcacccaatggcttcttgaaacggtccctttctgcggaggtagcatagcacagtgacgtttattccgggtcacttgattgcttttcctatccacttaccttaatattgctcccatgtcttaggacatattagaattattagaagatctctgggaaacaaaaggcgcatgggaggccaagatttagagtgttgatgcattccgccgtaccctatgcccagcctgtccctaaaggcagagtgcttcttattcggcagggcttcgtgagaatgccgccaagttatccaaaaccaaaggatgagagaggcttccaagagagggaagactgtccaagttcaaggagaaggggtttggttccctgtctgccagggacagaaagttctttccacatgtgtctcctggtcccgagagctttcaaaaggggatgtattctgctccaagaaagaatcacctcccagtaaagtagccatgaagggctcctgtataaaatatgcacacttcccctgccctgagtttgtggagggaaaggctgtcggaagtagggactcttaggagagcccgtgtgccctgtttggttcagctgtcaggcgtgtgccacacacatcccacctcatcttctggtcccataattctccatggatgggctgcttttagctccagttttccagtagaatgcttgagttttccttttttccgtacctcctggaggatgaaactcataacctgtcatcatcagtactcactgtgttttccactttgacttgaagtcaaatgaagttaccaaagttaaacatggacttctcaaattagaaaaaaacaaacaacaaaaaaacaggttaagtgttttgttatgaaaattatgaaaatgttcttattattatggaaaatttcaaatagatatagagagaataatgttacaaacccccacatactcaacatttagcttcaaaaattatcaactcatggcgggttttgtttcatctgtacaaactagtcggcacactatgatggcctgtggacaaaatccggccctctgactgtttttgtaaataaggttttattggaacacagccacacatatttgttgacttattgtttttggctgtttttgtacttcattggcagagttgagtaattgcagcagactctatggcttgcaaaacctaaaataattactttgtgtagcgctttatagaaaaaatttgctaactcccgatctgtaacccccaacctatccgccgcaccctgatctaggtaattttgaagcaaatcccaaatgtcacatcatctatccatatttcactatgtatttctaaaacatattcttttattcaaaataaaactctaatatca

SEQ ID NO: 34538 - DNA, 474 bp, Homo sapiens
  source 1..474: mol_type = unassigned DNA
gggaacgcggcggagctgtgagccggcgactcgggtccctgaggtctggattctttctccgctactgagacacggcggacacacacaaacacagaaccacacagccagtcccaggagcccagtaatggagagccccaaaaagaagaaccagcagctgaaagtcgggatcctacacctgggcagcagacagaagaagatcaggatacagctgagatcccaggtgctgggaagggaaatgcgcgacatggaaggtgatctgcaagagctgcatcagtcaaacaccggggataaatctggatttgggttccggcgtcaaggtgaagataatacctaaagaggaacactgtaaaatgccagaagcaggtgaagagcaaccacaagtttaaatgaagacaagctgaaacaacgcaagctggttttatattagatatttgacttaaactatctcaataaagttttgcagctttcaccaaa

SEQ ID NO: 34539 - DNA, 614 bp, Homo sapiens
  source 1..614: mol_type = unassigned DNA
ggacctgggaaggagcataggacagggcaaggcgggataaggaggggcaccacagcccttaaggcacgagggaacctcactgcgcatgctcctttggtgcccacctcagtgcgcatgttcactgggcgtcttcccatcggccccttcgccagtgtggggaacgcggcggagctgtgagccggcgactcgggtccctgaggtctggattctttctccgctactgagacacggcggacacacacaaacacagaaccacacagccagtcccaggagcccagtaatggagagccccaaaaagaagaaccagcagctgaaagtcgggatcctacacctgggcagcagacagaagaagatcaggatacagctgagatcccagtgcgcgacatggaaggtgatctgcaagagctgcatcagtcaaacaccggggataaatctggatttgggttccggcgtcaaggtgaagataatacctaaagaggaacactgtaaaatgccagaagcaggtgaagagcaaccacaagtttaaatgaagacaagctgaaacaacgcaagctggttttatattagatatttgacttaaactatctcaataaagttttgcagctttcaccaaa

SEQ ID NO: 34540 - DNA, 622 bp, Homo sapiens
  source 1..622: mol_type = unassigned DNA
gttaatggggacctgggaaggagcataggacagggcaaggcgggataaggaggggcaccacagcccttaaggcacgagggaacctcactgcgcatgctcctttggtgcccacctcagtgcgcatgttcactgggcgtcttcccatcggccccttcgccagtgtggggaacgcggcggagctgtgagccggcgactcgggtccctgaggtctggattctttctccgctactgagacacggcggacacacacaaacacagaaccacacagccagtcccaggagcccagtaatggagagccccaaaaagaagaaccagcagctgaaagtcgggatcctacacctgggcagcagacagaagaagatcaggatacagctgagatcccagtgcgcgacatggaaggtgatctgcaagagctgcatcagtcaaacaccggggataaatctggatttgggttccggcgtcaaggtgaagataatacctaaagaggaacactgtaaaatgccagaagcaggtgaagagcaaccacaagtttaaatgaagacaagctgaaacaacgcaagctggttttatattagatatttgacttaaactatctcaataaagttttgcagctttcaccaaa

SEQ ID NO: 34541 - DNA, 350 bp, Homo sapiens
  source 1..350: mol_type = unassigned DNA
atggagagccccaaaaagaagaaccagcagctgaaagtcgggatcctacacctgggcagcagacagaagaagatcaggatacagctgagatcccaggtgctgggaagggaaatgcgcgacatggaaggtgatctgcaagagctgcatcagtcaaacaccggggataaatctggatttgggttccggcgtcaaggtgaagataatacctaaagaggaacactgtaaaatgccagaagcaggtgaagagcaaccacaagtttaaatgaagacaagctgaaacaacgcaagctggttttatattagatatttgacttaaactatctcaataaagttttgcagctttcaccaaa

SEQ ID NO: 34542 - DNA, 474 bp, Homo sapiens; identical to SEQ ID NO: 34538
  source 1..474: mol_type = unassigned DNA

SEQ ID NO: 34543 - DNA, 614 bp, Homo sapiens; identical to SEQ ID NO: 34539
  source 1..614: mol_type = unassigned DNA

SEQ ID NO: 34544 - DNA, 350 bp, Homo sapiens; identical to SEQ ID NO: 34541
  source 1..350: mol_type = unassigned DNA

SEQ ID NO: 34545 - DNA, 622 bp, Homo sapiens; identical to SEQ ID NO: 34540
  source 1..622: mol_type = unassigned DNA

SEQ ID NO: 34546 - DNA, 472 bp, Homo sapiens
  source 1..472: mol_type = unassigned DNA
cctagactaaccagtttgtgttggtcctccgctgagctgttaatccagggaagagttgcccttctgaagaatatgtggatttaatggagaccaagacacacacaaacacagaaccacacagccagtcccaggagcccagtaatggagagccccaaaaagaagaaccagcagctgaaagtcgggatcctacacctgggcagcagacagaagaagatcaggatacagctgagatcccagtgcgcgacatggaaggtgatctgcaagagctgcatcagtcaaacaccggggataaatctggatttgggttccggcgtcaaggtgaagataatacctaaagaggaacactgtaaaatgccagaagcaggtgaagagcaaccacaagtttaaatgaagacaagctgaaacaacgcaagctggttttatattagatatttgacttaaactatctcaataaagttttgcagctttcacc

SEQ ID NO: 34547 - DNA, 474 bp, Homo sapiens; identical to SEQ ID NO: 34538
  source 1..474: mol_type = unassigned DNA

SEQ ID NO: 34548 - DNA, 614 bp, Homo sapiens; identical to SEQ ID NO: 34539
  source 1..614: mol_type = unassigned DNA

SEQ ID NO: 34549 - DNA, 622 bp, Homo sapiens; identical to SEQ ID NO: 34540
  source 1..622: mol_type = unassigned DNA

SEQ ID NO: 34550 - DNA, 350 bp, Homo sapiens; identical to SEQ ID NO: 34541
  source 1..350: mol_type = unassigned DNA

SEQ ID NO: 34551 - DNA, 474 bp, Homo sapiens; identical to SEQ ID NO: 34538
  source 1..474: mol_type = unassigned DNA

SEQ ID NO: 34552 - DNA, 614 bp, Homo sapiens; identical to SEQ ID NO: 34539
  source 1..614: mol_type = unassigned DNA

SEQ ID NO: 34553 - DNA, 622 bp, Homo sapiens; identical to SEQ ID NO: 34540
  source 1..622: mol_type = unassigned DNA

SEQ ID NO: 34554 - DNA, 497 bp, Homo sapiens
  source 1..497: mol_type = unassigned DNA
gtgagggtgtgagggtcgcgttcctgctgtctggactttttctgtcccactgagacgcagctgtgtgaaatatgatttggcgaggaagatcaacatataggcctaggccgaggagaagtgtaccacctcctgagctgattgggcctatgctggagcccggtgatgaggagcctcagcaagaggaaccaccaactgaaagtcgggatcctgcacctggtcaggagagagaagaagatcagggtgcagctgagactcaagtgcctgacctggaagctgatctccaggagctgtctcagtcaaagactgggggtgaatgtggaaatggtcctgatgaccaggggaagattctgccaaaatcagaacaatttaaaatgccagaaggaggtgacaggcaaccacaggtttaaatgaagacaagctgaaacaacacaaaactgtttttatctaagatatttgacttaaaaatatcgaaataaacttttgcagctttctccaaa

SEQ ID NO: 34555 - DNA, 486 bp, Homo sapiens
  source 1..486: mol_type = unassigned DNA
aagcattcagaaggcacacatacttacacttgccctgagacttagttcgaaatgtgaaatatgatttggcgaggaagatcaacatataggcctaggccgaggagaagtgtaccacctcctgagctgattgggcctatgctggagcccggtgatgaggagcctcagcaagaggaaccaccaactgaaagtcgggatcctgcacctggtcaggagagagaagaagatcagggtgcagctgagactcaagtgcctgacctggaagctgatctccaggagctgtctcagtcaaagactgggggtgaatgtggaaatggtcctgatgaccaggggaagattctgccaaaatcagaacaatttaaaatgccagaaggaggtgacaggcaaccacaggtttaaatgaagacaagctgaaacaacacaaaactgtttttatctaagatatttgacttaaaaatatcgaaataaacttttgcagctttctccaaa

SEQ ID NO: 34556 - DNA, 5688 bp, Homo sapiens
  source 1..5688: mol_type = unassigned DNA
gtctcttaggagtgaggtacctggagttcggggaccccaacctgtgacaatgacagcagacaaattggttttctttgtgaatggcagaaaggtggtggagaaaaatgcagatccagagacaacccttttggcctacctgagaagaaagttggggctgagtggaaccaagctcggctgtggagaggggggctgcggggcttgcacagtgatgctctccaagtatgatcgtctgcagaacaagatcgtccacttttctgccaatgcctgcctggcccccatctgctccttgcaccatgttgcagtgacaactgtggaaggaataggaagcaccaagacgaggctgcatcctgtgcaggagagaattgccaaaagccacggctcccagtgcgggttctgcacccctggcatcgtcatgagtatgtacacactgctccggaatcagcccgagcccaccatggaggagattgagaatgccttccaaggaaatctgtgccgctgcacaggctacagacccatcctccagggcttccggacctttgccagggatggtggatgctgtggaggagatgggaataatccaaattgctgcatgaaccagaagaaagaccactcagtcagcctctcgccatctttattcaaaccagaggagttcacgcccctggatccaacccaggagcccatttttcccccagagttgctgaggctgaaagacactcctcggaagcagctgcgatttgaaggggagcgtgtgacgtggatacaggcctcaaccctcaaggagctgctggacctcaaggctcagcaccctgacgccaagctggtcgtggggaacacggagattggcattgagatgaagttcaagaatatgctgtttcctatgattgtctgcccagcctggatccctgagctgaattcggtagaacatggacccgacggtatctcctttggagctgcttgccccctgagcattgtggaaaaaaccctggtggatgctgttgctaagcttcctgcccaaaagacagaggtgttcagaggggtcctggagcagctgcgctggtttgctgggaagcaagtcaagtctgtggcgtccgttggagggaacatcatcactgccagccccatctccgacctcaaccccgtgttcatggccagtggggccaagctgacacttgtgtccagaggcaccaggagaactgtccagatggaccacaccttcttccctggctacagaaagaccctgctgagcccggaggagatactgctctccatagagatcccctacagcagggagggggagtatttctcagcattcaagcaggcctcccggagagaagatgacattgccaaggtaaccagtggcatgagagttttattcaagccaggaaccacagaggtacaggagctggccctttgctatggtggaatggccaacagaaccatctcagccctcaagaccactcagaggcagctttccaagctctggaaggaggagctgctgcaggacgtgtgtgcaggactggcagaggagctgcatctgcctcccgatgcccctggtggcatggtggacttccggtgcaccctcaccctcagcttcttcttcaagttctacctgacagtccttcagaagctgggccaagagaacctggaagacaagtgtggtaaactggaccccactttcgccagtgcaactttactgtttcagaaagaccccccagccgatgtccagctcttccaagaggtgcccaagggtcagtctgaggaggacatggtgggccggcccctgccccacctggcagcggacatgcaggcctctggtgaggccgtgtactgtgacgacattcctcgctacgagaatgagctgtctctccggctggtcaccagcacccgggcccacgccaagatcaagtccatagatacatcagaagctaagaaggttccagggtttgtttgtttcatttccgctgatgatgttcctgggagtaacataactggaatttgtaatgatgagacagtctttgcgaaggataaggttacttgtgttgggcatatcattggtgctgtggttgctgacaccccggaacacacacagagagctgcccaaggggtgaaaatcacctatgaagaactaccagccattatcacaattgaggatgctataaagaacaactccttttatggacctgagctgaagatcgagaaaggggacctaaagaaggggttttccgaagcagataatgttgtgtcaggggagatatacatcggtggccaagagcacttctacctggagactcactgcaccattgctgttccaaaaggcgaggcaggggagatggagctctttgtgtctacacagaacaccatgaagacccagagctttgttgcaaaaatgttgggggttccagcaaaccggattgtggttcgagtgaagagaatgggaggaggctttggaggcaaggagacccggagcactgtggtgtccacggcagtggccctggctgcatataagaccggccgccctgtgcgatgcatgctggaccgtgatgaggacatgctgataactggtggcagacatcccttcctggccagatacaaggttggcttcatgaagactgggacagttgtggctcttgaggtggaccacttcagcaatgtggggaacacccaggatctctctcagagtattatggaacgagctttattccacatggacaactgctataaaatccccaacatccggggcactgggcggctgtgcaaaaccaaccttccctccaacacggccttccggggctttggggggccccaggggatgctcattgccgagtgctggatgagtgaagttgcagtgacctgtgggatgcctgcagaggaggtgcggagaaaaaacctgtacaaagaaggggacctgacacacttcaaccagaagcttgagggtttcaccttgcccagatgctgggaagaatgcctagcaagctctcagtatcatgctcggaagagtgaggttgacaagttcaacaaggagaattgttggaaaaagagaggattgtgcataattcccaccaagtttggaataagctttacagttccttttctgaatcaggcaggagccctacttcatgtgtacacagatggctctgtgctgctgacccacggggggactgagatgggccaaggccttcataccaaaatggtccaggtggccagtagagctctgaaaatccccacctctaagatttatatcagcgagacaagcactaacactgtgcccaacacctctcccacggctgcctctgtcagcgctgacctcaatggacaggccgtctatgcggcttgtcagaccatcttgaaaaggctggaaccctacaagaagaagaatcccagtggctcctgggaagactgggtcacagctgcctacatggacacagtgagcttgtctgccactgggttttatagaacacccaatctgggctacagctttgagactaactcagggaaccccttccactacttcagctatggggtggcttgctctgaagtagaaatcgactgcctaacaggagatcataagaacctccgcacagatattgtcatggatgttggctccagtctaaaccctgccattgatattggacaggtggaaggggcatttgtccagggccttggcctcttcaccctagaggagctacactattcccccgaggggagcctgcacacccgtggccctagcacctacaagatcccggcatttggcagcatccccattgagttcagggtgtccctgctccgcgactgccccaacaagaaggccatctatgcatcgaaggctgttggagagccgcccctcttcctggctgcttctatcttctttgccatcaaagatgccatccgtgcagctcgagctcagcacacaggtaataacgtgaaggaactcttccggctagacagccctgccaccccggagaagatccgcaatgcctgcgtggacaagttcaccaccctgtgtgtcactggtgtcccagaaaactgcaaaccctggtctgtgagggtctaaagagagagtcctcagcagagtcttcttgtgctgcctttgggcttccatggagcaggaggaacataccacagaacatggatctattaaagtcacagaatgacagacctgtgatttgtcaagatgggatttggaagacaagtgaatgcaatggaagattttgatcaaaaatgtaatttgtaaacacaatgataagcaaattcaaaactgttatgcctaaatggtgaatatgcaattaggatcattttctgtctgttttaatcatgtatctggaatagggtcgggaagggtttgtgctattccccacttactggacagcctgtataacctcaagttctgatggtgtctgtcctttgaagaggattcccacaaacctctagaagcttaaaccgaagttactttaaatcgtgtgccttcctgtgaaagcctggccttcaaaccaatgaacagcaaagcataaccttgaatctatactcaaattttgcaatgaggcagtggggtaaggttaaatcctctaaccatctttgaatcattggaaagaataaagaatgaaacaaattcaaggttaattggatctgattttgtgaagctgcataaagcaagattactctataatacaaaaatccaaccaactcaattattgagcacgtacaatgttctagatttctttcccttcctctttgaagagaatatttgtattccaaatactctttgagtatttacaaaaaagattatgtttaatctttacatttgaagccaaagtaatttccacctagaaatgatgctatcagtcctggcatggtggctcacccctataatcccagcactttgggaggctaaggcaggagaattgcttgagcccagcagtttgagaccagcctgggcaacatagagagctcctgtctttaaaaaaaatttttttaattagttggtcttgatagtgcatgcctgtagtcccaactacttgaaaggctgaggtggagagatcatttgagctcaggaggttgaggctgcagtgagctatgattgcgccactgcactcctgcctgagcgactgagcaagatcttgtctctgaagaaaaaaaaagaaataaaaatgctgctatcaaaatcaagcccaaccagaggtagaagagccaagaagcctgggttctcatcctagctctgtctcttctgtctctatctttgtgatcttggactgtcaattccccttcctgtgatccattttactgcaaacataagggttgcagtaaagggttgtctcacgtcttctgctttaaaagcctataaatatatgacctgaaaactccagttacataaaggatctgcagctatctaaggcttggttttcttactgtcatatgatacctgggtctaatgaactctgctgagatcacctcaagtttctgcggttggtaaagagaacaagggaagaacaaacatcccttttattgctccaaatggtgatttaatccctacatggtgctgggtggacaatgtgtcactgtcacatgccttcactgtataaatccaaccttctgccagagagaatctgtggttctggccatggagggaggatagtggaaatgatatagttggactggtgcttgatgtcactaataaatgaaactgtcagctgg

SEQ ID NO: 34557 - DNA, 4126 bp, Homo sapiens
  source 1..4126: mol_type = unassigned DNA
ggaggaagatggcgggcgggctgctctgaagagacctcggcggcggcggaggaggagagaagcgcagcgccgcgccgcgccggggcccatgtggggaggagtcggagtcgctgttgccgccgccgcctgtagctgctggacccgagtgggagtgagggggaaacggcaggatgaagttcgccgagcacctctccgcgcacatcactcccgagtggaggaagcaatacatccagtatgaggctttcaaggatatgctgtattcagctcaggaccaggcaccttctgtggaagttacagatgaggacacagtaaagaggtattttgccaagtttgaagagaagtttttccaaacctgtgaaaaagaacttgccaaaatcaacacattttattcagagaagctcgcagaggctcagcgcaggtttgctacacttcagaatgagcttcagtcatcactggatgcacagaaagaaagcactggtgttactacgctgcgacaacgcagaaagccagtcttccacttgtcccatgaggaacgtgtccaacatagaaatattaaagaccttaaactggccttcagtgagttctacctcagtctaatcctgctgcagaactatcagaatctgaattttacagggtttcgaaaaatcctgaaaaagcatgacaagatcctggaaacatctcgtggagcagattggcgagtggctcacgtagaggtggccccattttatacatgcaagaaaatcaaccagcttatctctgaaactgaggctgtagtgaccaatgaacttgaagatggtgacagacaaaaggctatgaagcgtttacgtgtcccccctttgggagctgctcagcctgcaccagcatggactacttttagagttggcctattttgtggaatattcattgtactgaatattacccttgtgcttgccgctgtatttaaacttgaaacagatagaagtatatggcccttgataagaatctatcggggtggctttcttctgattgaattcctttttctactgggcatcaacacgtatggttggagacaggctggagtaaaccatgtactcatctttgaacttaatccgagaagcaatttgtctcatcaacatctctttgagattgctggattcctcgggatattgtggtgcctgagccttctggcatgcttctttgctccaattagtgtcatccccacatatgtgtatccacttgccctttatggatttatggttttcttccttatcaaccccaccaaaactttctactataaatcccggttttggctgcttaaactgctgtttcgagtatttacagcccccttccataaggtaggctttgctgatttctggctggcggatcagctgaacagcctgtcagtgatactgatggacctggaatatatgatctgcttctacagtttggagctcaaatgggatgaaagtaagggcctgttgccaaataattcagaagaacgaggtcactcggacactatggtgttcttttacctgtggattgtcttttatatcatcagttcctgctataccctcatctgggatctcaagatggactggggtctcttcgataagaatgctggagagaacactttcctccgggaagagattgtatacccccaaaaagcctactactactgtgccataatagaggatgtgattctgcgctttgcttggactatccaaatctcgattacctctacaactttgttgcctcattctggggacatcattgctactgtctttgccccacttgaggttttccggcgatttgtgtggaacttcttccgcctggagaatgaacatctgaataactgtggtgaattccgtgctgtgcgggacatctctgtggcccccctgaacgcagatgatcagactctcctagaacagatgatggaccaggatgatggggtacgaaaccgccagaagaatcggtcatggaagtacaaccagagcatatccctgcgccggcctcgcctcgcttctcaatccaaggctcgtgacactaaggtattgatagaagacacagatgatgaagctaacacttgaattttctgaagtctagcttaacatctttggttttcctactctacaatcctttcctcgaccaacgcaacctctagtacctttccagccgaaaacaggagaaaacacataacacattttccgagctcttccggatcggatcctatggactccaaacaagctcactgtgtttcttttcttttcttctggtttaattttaattttctattttcaaaacaaatatttacttcatttgccaatcagaggatgttttaagaaacaaaacatagtatcttatggattgtttacaatcacaaggacatagatacctatcaggatgaagaacaggcattgcaaggaccctctgatgggacggtactgagatatctcggcttccgctcagcccggttttgactggttgaaaccggacattggtttttaaattttttgtcagtttatgtggagaatttttttctttccttcatacccagcgcaaaggcactggccgcacttgcaggaaaagtgcaacttaaagcagtaccttcattcatgaagctactttttaatttgatgtaacttttcttattttgggaagggttgctgggtgggtgggaaatatgatgtatttgttacacatagttttctcattatttatgaaacttaaccatacagaatgatataactcctgtgcaatgaaggtgataacagtaaaagaaggcaggggaaacttacgttggatgacatttatgagggtcagtcccacatacctctttcaggagacaacttgcaccagtttgaccttttcttttctttgtttttattttaagccaaagtttcattgctaacttcttaagttgctgctgctttagagtcctgagcatatctctcataacaaggaatcccacacttcacaccaccggctgaatttcatggaagaggttctgataatttttttaactttttaaggaacagatgtggaatacactggcccatatttcaaccttaacagctgaagctatgccttattatgcatccacatgtatggtccctgtagcgtgacctttactagctctgaatcagaagacagagctatttcagaggctctgtgtgccctcactagatagtttttcttctgggttcaaccactttagccagaatttgatcaaattaaaagtctgtcatggggaaactatatttttgagcacatggaacaaattatacttcctcattcatattatgttgatacaaaagaccttggcagccatttctcccagcagttttaaaggatgaacattggatttcatgccatcccatagaaaacctgttttaaaattttagggatctttacttggtcatacatgaaaagtacactgcttagaaattatagactattatgatctgtccacagtgcccattgtcacttctttgtctcatttcttccctttgttccttagtcatccaaataagcctgaaaaccataagagatattactttattgaatatggttggcattaaatttagcatttcattatctaacaaaattaatataaattccaggacatggtaaaatgtgttttaataacccccagacccaaatgaaaatttcaaagtcaataccagcagattcatgaaagtaaatttagtcctataattttcagcttaattataaacaaaggaacaaataagtggaagggcagctattaccattcgcttagtcaaaacattcggttactgccctttaatacactcctatcatcagcacttccaccatgtattacaagtcttgacccatccctgtcgtaactccagtaaaagttactgttactagaaaatttttatcaattaactgacaaatagtttctttttaaagtagtttcttccatctttattctgactagcttccaaaatgtgttccctttttgaatcgaggtttttttgttttgttttgttttctgaaaaaatcatacaactttgtgcttctattgcttttttgtgttttgttaagcatgtcccttggcccaaatggaagaggaaatgtttaattaatgctttttagtttaaataaattgaatcatttataataa

SEQ ID NO: 34558 - DNA, 8474 bp, Homo sapiens
  source 1..8474: mol_type = unassigned DNA
gcggggaggggcggggctatggagaggaggaggaagatggcgggcgggctgctctgaagagacctcggcggcggcggaggaggagagaagcgcagcgccgcgccgcgccggggcccatgtggggaggagtcggagtcgctgttgccgccgccgcctgtagctgctggacccgagtgggagtgagggggaaacggcaggatgaagttcgccgagcacctctccgcgcacatcactcccgagtggaggaagcaatacatccagtatgaggctttcaaggatatgctgtattcagctcaggaccaggcaccttctgtggaagttacagatgaggacacagtaaagaggtattttgccaagtttgaagagaagtttttccaaacctgtgaaaaagaacttgccaaaatcaacacattttattcagagaagctcgcagaggctcagcgcaggtttgctacacttcagaatgagcttcagtcatcactggatgcacagaaagaaagcactggtgttactacgctgcgacaacgcagaaagccagtcttccacttgtcccatgaggaacgtgtccaacatagaaatattaaagaccttaaactggccttcagtgagttctacctcagtctaatcctgctgcagaactatcagaatctgaattttacagggtttcgaaaaatcctgaaaaagcatgacaagatcctggaaacatctcgtggagcagattggcgagtggctcacgtagaggtggccccattttatacatgcaagaaaatcaaccagcttatctctgaaactgaggctgtagtgaccaatgaacttgaagatggtgacagacaaaaggctatgaagcgtttacgtgtcccccctttgggagctgctcagcctgcaccagcatggactacttttagagttggcctattttgtggaatattcattgtactgaatattacccttgtgcttgccgctgtatttaaacttgaaacagatagaagtatatggcccttgataagaatctatcggggtggctttcttctgattgaattcctttttctactgggcatcaacacgtatggttggagacaggctggagtaaaccatgtactcatctttgaacttaatccgagaagcaatttgtctcatcaacatctctttgagattgctggattcctcgggatattgtggtgcctgagccttctggcatgcttctttgctccaattagtgtcatccccacatatgtgtatccacttgccctttatggatttatggttttcttccttatcaaccccaccaaaactttctactataaatcccggttttggctgcttaaactgctgtttcgagtatttacagcccccttccataaggtaggctttgctgatttctggctggcggatcagctgaacagcctgtcagtgatactgatggacctggaatatatgatctgcttctacagtttggagctcaaatgggatgaaagtaagggcctgttgccaaataattcagaagaatcaggaatttgccacaaatatacatatggtgtgcgggccattgttcagtgcattcctgcttggcttcgcttcatccagtgcctgcgccgatatcgagacacaaaaagggcctttcctcatttagttaatgctggcaaatactccacaactttcttcatggtgacgtttgcagccctttacagcactcacaaagaacgaggtcactcggacactatggtgttcttttacctgtggattgtcttttatatcatcagttcctgctataccctcatctgggatctcaagatggactggggtctcttcgataagaatgctggagagaacactttcctccgggaagagattgtatacccccaaaaagcctactactactgtgccataatagaggatgtgattctgcgctttgcttggactatccaaatctcgattacctctacaactttgttgcctcattctggggacatcattgctactgtctttgccccacttgaggttttccggcgatttgtgtggaacttcttccgcctggagaatgaacatctgaataactgtggtgaattccgtgctgtgcgggacatctctgtggcccccctgaacgcagatgatcagactctcctagaacagatgatggaccaggatgatggggtacgaaaccgccagaagaatcggtcatggaagtacaaccagagcatatccctgcgccggcctcgcctcgcttctcaatccaaggctcgtgacactaaggtattgatagaagacacagatgatgaagctaacacttgaattttctgaagtctagcttaacatctttggttttcctactctacaatcctttcctcgaccaacgcaacctctagtacctttccagccgaaaacaggagaaaacacataacacattttccgagctcttccggatcggatcctatggactccaaacaagctcactgtgtttcttttcttttcttctggtttaattttaattttctattttcaaaacaaatatttacttcatttgccaatcagaggatgttttaagaaacaaaacatagtatcttatggattgtttacaatcacaaggacatagatacctatcaggatgaagaacaggcattgcaaggaccctctgatgggacggtactgagatatctcggcttccgctcagcccggttttgactggttgaaaccggacattggtttttaaattttttgtcagtttatgtggagaatttttttctttccttcatacccagcgcaaaggcactggccgcacttgcaggaaaagtgcaacttaaagcagtaccttcattcatgaagctactttttaatttgatgtaacttttcttattttgggaagggttgctgggtgggtgggaaatatgatgtatttgttacacatagttttctcattatttatgaaacttaaccatacagaatgatataactcctgtgcaatgaaggtgataacagtaaaagaaggcaggggaaacttacgttggatgacatttatgagggtcagtcccacatacctctttcaggagacaacttgcaccagtttgaccttttcttttctttgtttttattttaagccaaagtttcattgctaacttcttaagttgctgctgctttagagtcctgagcatatctctcataacaaggaatcccacacttcacaccaccggctgaatttcatggaagaggttctgataatttttttaactttttaaggaacagatgtggaatacactggcccatatttcaaccttaacagctgaagctatgccttattatgcatccacatgtatggtccctgtagcgtgacctttactagctctgaatcagaagacagagctatttcagaggctctgtgtgccctcactagatagtttttcttctgggttcaaccactttagccagaatttgatcaaattaaaagtctgtcatggggaaactatatttttgagcacatggaacaaattatacttcctcattcatattatgttgatacaaaagaccttggcagccatttctcccagcagttttaaaggatgaacattggatttcatgccatcccatagaaaacctgttttaaaattttagggatctttacttggtcatacatgaaaagtacactgcttagaaattatagactattatgatctgtccacagtgcccattgtcacttctttgtctcatttcttccctttgttccttagtcatccaaataagcctgaaaaccataagagatattactttattgaatatggttggcattaaatttagcatttcattatctaacaaaattaatataaattccaggacatggtaaaatgtgttttaataacccccagacccaaatgaaaatttcaaagtcaataccagcagattcatgaaagtaaatttagtcctataattttcagcttaattataaacaaaggaacaaataagtggaagggcagctattaccattcgcttagtcaaaacattcggttactgccctttaatacactcctatcatcagcacttccaccatgtattacaagtcttgacccatccctgtcgtaactccagtaaaagttactgttactagaaaatttttatcaattaactgacaaatagtttctttttaaagtagtttcttccatctttattctgactagcttccaaaatgtgttccctttttgaatcgaggtttttttgttttgttttgttttctgaaaaaatcatacaactttgtgcttctattgcttttttgtgttttgttaagcatgtcccttggcccaaatggaagaggaaatgtttaattaatgctttttagtttaaataaattgaatcatttataataatcagtgttaacaatttagtgacccttggtaggttaaaggttgcattatttatacttgagatttttttcccctaactattctgttttttgtactttaaaactatgggggaaatatcactggtctgtcaagaaacagcagtaattattactgagttaaattgaaaagtccagtggaccaggcatttcttatataaataaaattggtggtactaatgtgtatccagagacatttgaattattaactttattctttattagtgaatctctatgatggcacacataaaatcttacagttgacttctgctgtttgaattccccagtgtttttacattaatgtatcctatggccagtttagtctttcttcaactgttacagttctaggccctaatcggtcttattctttcacatatgatgcaatgatagatgtaatccttttctgaagtgtttgtcggattggcatagtctattcaaaaataaggcttatgtaactttcagcttgctatgtgacagaagtttaaatgtgtatttaagtacacagctttatgttcctcttaaagctgtaaagagaaaagaggacttttcctcatcaagagagcttgggagacaaagcatacatttaatttttttctttcaaaaaaggcaatgtgcactttcctctcctaaattttatatgccctagcagttgcgaatgttgtgtccaccttacaatttgattggaggctcccatacactgaaactctcaatagaattcttaaaaatgaacatcagctgggcgcagtggctcacgtctgtaatcccagcactttgggaggccaaggtgggcagatcacgagctcaggagttcgagaccagcctgaccaacatggtgaaaccccgtctctactaaaaatacaaaaattagctgggcgtggtggcgcatgcctgtaatcccagctactcaggagactgaggcaggagaattgcttaaacctgggaagcagaggttgcagtgagactagatcatgccactgcactccactgccactgcctgggcaacagagcaagactccatctcaaaaacaaacaaaaaaaatcacagactcattttaaaggagcagcaacctaaccaaatacaaacttcatttgattttaggtttagaaattctagttttattttggagaatcactcagtttttaatatcaattaaaatagtcctcaaaggaatgaagaggaagtctaaataaatgaataaaactcatttttcattttatggtagtatagaaagcattgatgtgtgtagagaaattaaaagacaagagtggtttactgtctatgcacaaatgagtgcctatatttaaggctgcctataccattacagtggcgtaattggtgatttcatagcatacagagaaacaatgaaatcaaagattaaatcattaggttatgatggtcatttgtaagattggaaagtagtcaaaaacccatgtgcaactttttttcagcactctaccattaggctccttaggcaagctgcttaacttccgtcagaagcaaaggtgtgggagaacaccattcacctcagtagtaacttataaaaaccgtttaaagaaggaaaatgggccccagcccctaggatccctgacttcctgatattctaaacatgagagttctgtgactttaactgagctctttaccagaagtaacgtgttgatgtatattatctttccaccatgctttgaccaaagtacattcacagtaactagagaaagcagatcatccatttctggataggtgaactacggcaaggtaagaacagaaaaaagtaaagtagtattgagtcatgcaggtatcagattaacagacattcattgaagataagtgaaataactttggagatagcagagaagagcaagaagatgttggacgttggcagtaagccgcagcaaggcagttaggaaagtacgtgagcctgatgacgcgaaggtgatgcctccatctgtccgcttagtggttattaaattgctgggaaagacctgcctttattttcctatcatcttttccccattactttgcattattcaggaaataattatttattcccaaatgcagttttctaagcagtgaccacaaaaatttcttattctaaggaaaataattaagaaaataaccctatctgtggcattgttttaaaatgtgggatacaaatctggtaagcagatttcaggtcattattgttttcttttaatggtttacatgaaattttcctctcaaaaaacaagtacctcttactgtataacatttgagtttttaaaattgagatagcttctgagagaaaaaaagaaagttgaatttgtagctctctcaactacaaaatcaccacacttttctcaaatctaataggaattcagtgtcattacagatacggtctctagtgaccaggtgaagacaattgaagctttggtagaacttctgcaaaagttaggtaaagaagaataaatccaatttatcagctttgttcatattctttttctgagtgatctaaatttttcttgcttgtgatcattagctaagacaaggagtgttaaaggttttctaaatgcaaacacatacgtttctgcatttcagaagtcagtcttgatagtaaatcctacaaactctcaactttctgcattgtattttaagtctatacaatgttagagcacatggtaatgtgggacagagttgattatatgatagcatgagaaatttgcactggttggtgttacaaaccaatgatctaaccagcatactctccaaatatgaaaaagtaaaaacatctcattaggtttggaagagcctaaggtagtccatacaggaagtttgcctgagaacagagaggagcctgttgattggcatggctcatgatgcctttcttgtatgaattatcaaaactgatactgagttgcccctagaaaacagccttccagaatatgtttgcttatttatggtggaagaggaagtgagaacaagatgagagtttcccttaaagtgaggagaatcattatacaactttgcaactgaagtatgtttccttgtagcaaacctttggtttattttatcgtcaaatcaaagccaccctcagttttttgtatggtgccatcaacctaaggaggacaatcaaataacctattgtttgccttggattcagtatatctactaagtacacagtctcgtataccttcaaaccagttacttgactaaacttccaccatattaccttagttcttcctatgccctttcctctgtgccaccacaaatcagagggaaagactgcagtacttctagaaagttgtggacttctaagaaagagccaggcttccatctcactatcccttgatcattatctctgaagtccctacctgcacttccctgattgccctgtagcaacaccagcatggtgggaattggagggaaagattgtggaaaatccctaaagggtcattgttcatgacgttattttgaattgtaaaattgtgagccactcacatttcaattacaaaaagaacagaactcttaatcacgttgtgaagattaatttcttgccattttctggattagcacagaagcttgtatcaatgaagagtatttaggaggggaatagggggaaaattgtatttttctgttcaaactctctccttctatttgtgtttccttcacccctctccctccaccacactgtgttggtcaaatgatactattctatgaaaccctgagctatagttgtcaaaagtaactatggattgtgattagtcctctgtgggtgcttccttccctcttttttctccctcactctctttctcagtctccactctggtaaatggaaaaggtgatgtcgaagaattgatgcttgcttggactcatgttgtatctgtgactatgctattagctgtctcctttttccttcctatatgggtagaattcttatgacttatgaagttcccttcttgataagtaggttaaatgcacaatgtggtactgttttatagtttctagatggttgtataaagcaaaaagttaatgtggttatgtgtttttaaagaaaataagtgattggtcactaaactctgtccttttttcattattacaatttctctctgttttccaaca

SEQ ID NO: 34559 - DNA, 2315 bp, Homo sapiens
  source 1..2315: mol_type = unassigned DNA
gtgtgcctacactggtcccacaggttttcagctgtggagtttgggatctgagcttggagcccatttgtttctggcagttccgctcatattttccacttgaagacatcgcctcccttccttccaagctgggagaccagaagtcaacaacaggagggtggagaggccgggtctcacaatccgcttggctggggagtccactgaggttcttgcatcctgaagcaaaccatggagagctggtggggacttccctgtcttgcgttcctgtgttttctaatgcacgcccgaggtcaaagagactttgatttggcagatgcccttgatgaccctgaacccaccaagaagccaaactcagatatctacccaaagccaaaaccaccttactacccacagcccgagaatcccgacagcggtggaaatatctacccaaggccaaagccacgccctcaaccccagcctggcaattccggcaacagtggaggttacttcaatgatgtggaccgtgatgacggacgctacccgcccaggcccaggccacggccgcctgcaggaggtggcggcggtggctactccagttatggcaactccgacaacacgcacggtggagatcaccattcaacgtatggcaatccagaaggcaatatggtagcaaaaatcgtgtctcccatcgtatccgtggtggtggtgacactgctgggagcagcagccagttatttcaaactaaacaataggagaaattgtttcaggacccatgaaccagaaaatgtctgaagatgttaagatcccctgattactttgagaaaaacaactaaaacaagaaccgtgtttatcactgttgtggagatttccttttattcttgacacaatttgatgacctaaagtgtgttttcttctgtgtaaagtacatgagctgcctcactaagcattcccaactcattgaatgtgatgtggttataaagataagttaggcagctagaccctgcgttctaaaaaaggattgcttgcaatgttggtttggctattcatttgcacaaagagactgtggctctctgttgtgagatcttcagctacctcatggtgcaataacacacacacgcttaaccatgttgatggcacaaagcggtgagcagtagggaggtagaatatcttggtggggaggggatgttatcagcttctgggagatgaagaatattgttgaggttccaaagatgctggacctgtgctaaattcttcagtgatatgaaaaaatcattgagcattcattattgcgaatgaagtggggatgcattatttctgacacccacaagcagggtttgatcatcctttcagctttgagatatctgcacataaaattattattacctgaagaaaataaggctgcattttgaaatgttaagtgcaaaatgactgatgttaaaaccatctgggggaaatcttgggatgctttttcctaggaaatcatatggttgtgatatgttttggcgcataggagacagaaatagtgattatcaggcgttgagcctttttgtagtatttttagtctttgatactctgtaagtgctagttcctaaggcaccaacattgcattccttggtttatactttttctattcatcagggtaggaagtcttaaatccttaggcatccaagaagtatactagctttttgcttctcttttagaaatacttgtggggagagaaaaaaggatggtttgggcatattggtatagtttgagtaaactaaggttaatgttcatataacatttagactttgccataaatatcagaaccaaagatcaagacattcatgtacagtctggaatgtatatatggggcccataaaaattcccagtatgcatgttttatgctcaccattatgaattggggtcttcaaagagagaaggttgaaagtggaaagcacttgaaagggctccccggtttgtaaaatatctttaatcattcacattaggtacctcggagttgcgggtctcaaatgtggattcatgcatcatttgtgcagtttgaagatagtccatatttcctatttcagtattaggtcctgcaacacttttcaattcttgtagaaggtttttttcaggagtggtgatgtctgatgctcaattactattttccctataagagtttcagcatgagcttaattaaattcttgtgaaaaaacctgtgtttttagttacacacacacacacacacacacctacttaaatggaatctaaacatttttagcctttaatccattccattttctaaaactgtcataaactatttttaatcattttaaataaatgtaaaagaaaaataa

SEQ ID NO: 34560 - DNA, 979 bp, Homo sapiens
  source 1..979: mol_type = unassigned DNA
gtgcctacactggtcccacaggttttcagctgtggagtttgggatctgagcttggagcccatttgtttctggcagttccgctcatattttccacttgaagacatcgcctcccttccttccaagctgggagaccagaagtcaacaacaggagggtggagaggccgggtctcacaatccgcttggctggggagtccactgaggttcttgcatcctgaagcaaaccatggagagctggtggggacttccctgtcttgcgttcctgtgttttctaatgcacgcccgaggtcaaagagactttgatttggcagatgcccttgatgaccctgaacccaccaagaagccaaactcagatatctacccaaagccaaaaccaccttactacccacagcccgagaatcccgacagcggtggaaatatctacccaaggccaaagccacgccctcaaccccagcctggcaattccggcaacagtggaggttacttcaatgatgtggaccgtgatgacggacgctacccgcccaggcccaggccacggccgcctgcaggaggtggcggcggtggctactccagttatggcaactccgacaacacgcacggaagagggggctatagactcaactctcgttatggaaatacttatggtggagatcaccattcaacgtatggcaatccagaaggcaatatggtagcaaaaatcgtgtctcccatcgtatccgtggtggtggtgacactgctgggagcagcagccagttatttcaaactaaacaataggagaaattgtttcaggacccatgaaccagaaaatgtctgaagatgttaagatcccctgattactttgagaaaaacaactaaaacaagaaccgtgtttatcactgttgtggagatttccttttattcttgacacaatttgatgacctaaagtgtgttttcttctgtgtaaagtacatgagctgcctcactaagcattcccaactcattg

SEQ ID NO: 34561 - DNA, 2887 bp, Homo sapiens
  source 1..2887: mol_type = unassigned DNA
gtgcctacactggtcccacaggttttcagctgtggagtttgggatctgagcttggagcccatttgtttctggcagttccgctcatattttccacttgaagacatcgcctcccttccttccaagctgggagaccagaagtcaacaacaggagggtggagaggccgggtctcacaatccgcttggctggggagtccactgaggttcttgcatcctgaagcaaaccatggagagctggtggggacttccctgtcttgcgttcctgtgttttctaatgcacgcccgaggtcaaagagactttgatttggcagatgcccttgatgaccctgaacccaccaagaagccaaactcagatatctacccaaagccaaaaccaccttactacccacagcccgagaatcccgacagcggtggaaatatctacccaaggccaaagccacgccctcaaccccagcctggcaattccggcaacagtggaggtagttacttcaatgatgtggaccgtgatgacggacgctacccgcccaggcccaggccacggccgcctgcaggaggtggcggcggtggctactccagttatggcaactccgacaacacgcacggtggagatcaccattcaacgtatggcaatccagaaggcaatatggtagcaaaaatcgtgtctcccatcgtatccgtggtggtggtgacactgctgggagcagcagccagttatttcaaactaaacaataggagaaattgtttcaggacccatgaaccagaaaatgtctgaagatgttaagatcccctgattactttgagaaaaacaactaaaacaagaaccgtgtttatcactgttgtggagatttccttttattcttgacacaatttgatgacctaaagtgtgttttcttctgtgtaaagtacatgagctgcctcactaagcattcccaactcattgaatgtgatgtggttataaagataagttaggcagctagaccctgcgttctaaaaaaggattgcttgcaatgttggtttggctattcatttgcacaaagagactgtggctctctgttgtgagatcttcagctacctcatggtgcaataacacacacacgcttaaccatgttgatggcacaaagcggtgagcagtagggaggtagaatatcttggtggggaggggatgttatcagcttctgggagatgaagaatattgttgaggttccaaagatgctggacctgtgctaaattcttcagtgatatgaaaaaatcattgagcattcattattgcgaatgaagtggggatgcattatttctgacacccacaagcagggtttgatcatcctttcagctttgagatatctgcacataaaattattattacctgaagaaaataaggctgcattttgaaatgttaagtgcaaaatgactgatgttaaaaccatctgggggaaatcttgggatgctttttcctaggaaatcatatggttgtgatatgttttggcgcataggagacagaaatagtgattatcaggcgttgagcctttttgtagtatttttagtctttgatactctgtaagtgctagttcctaaggcaccaacattgcattccttggtttatactttttctattcatcagggtaggaagtcttaaatccttaggcatccaagaagtatactagctttttgcttctcttttagaaatacttgtggggagagaaaaaaggatggtttgggcatattggtatagtttgagtaaactaaggttaatgttcatataacatttagactttgccataaatatcagaaccaaagatcaagacattcatgtacagtctggaatgtatatatggggcccataaaaattcccagtatgcatgttttatgctcaccattatgaattggggtcttcaaagagagaaggttgaaagtggaaagcacttgaaagggctccccggtttgtaaaatatctttaatcattcacattaggtacctcggagttgcgggtctcaaatgtggattcatgcatcatttgtgcagtttgaagatagtccatatttcctatttcagtattaggtcctgcaacacttttcaattcttgtagaaggtttttttcaggagtggtgatgtctgatgctcaattactattttccctataagagtttcagcatgagcttaattaaattcttgtgaaaaaacctgtgtttttagttacacacacacacacacacacacctacttaaatggaatctaaacatttttagcctttaatccattccattttctaaaactgtcataaactatttttaatcattttaaataaatgtaaaagaaaaataactggatttgattattgaatagtttttttctatatttcacaaataaattgtatgaaatgactgtagaagtggccccaaaattatgaaccttcgtagctgtgaatatgatgccataaatctcttttaaagctcaagatagactatgaacatatgaaatacatagttacctaatcatgagactaaattcacctgggtgacaaggctaacgttcaagctacttaagatgaaaatatttgaatcatgattgcttgggggaacctctctttgaggggtcatgaggaccacctgctgggcattctgttttcatgctgagaaggtgagaattgaacagatgagaaaagccttgataaaacgtcatctccatgtaatttagagaaggataaccttgactgtacagctgacccttgaacaacacagggctgaactgcacatgtccacctgtatgtgagtttgcttctggctctgccattactgagacagcaggaccaaccctccatctactcaatgggaagatgataaggatgaagacctttatggtgatccgcttccacttaataaatagtaaattcatt

SEQ ID NO: 34562 - DNA, 894 bp, Homo sapiens
  source 1..894: mol_type = unassigned DNA
tcaacaacaggagggtggagaggccgggtctcacaatccgcttggctggggagtccactgaggttcttgcatcctgaagcaaaccatggagagctggtggggacttccctgtcttgcgttcctgtgttttctaatgcacgcccgaggctggctgtcccagatccaagattagatttttcagttccgtacgaggacctctttaagaaactccaatgaactcataaagtacaggatttgaacaacggttgagtcaaagagactttgatttggcagatgcccttgatgaccctgaacccaccaagaagccaaactcagatatctacccaaagccaaaaccaccttactacccacagcccgagaatcccgacagcggtggaaatatctacccaaggccaaagccacgccctcaaccccagcctggcaattccggcaacagtggaggtagttacttcaatgatgtggaccgtgatgacggacgctacccgcccaggcccaggccacggccgcctgcaggaggtggcggcggtggctactccagttatggcaactccgacaacacgcacggtggagatcaccattcaacgtatggcaatccagaaggcaatatggtagcaaaaatcgtgtctcccatcgtatccgtggtggtggtgacactgctgggagcagcagccagttatttcaaactaaacaataggagaaattgtttcaggacccatgaaccagaaaatgtctgaagatgttaagatcccctgattactttgagaaaaacaactaaaacaagaaccgtgtttatcactgttgtggagatttccttttattcttgacacaatttgatgacctaaagtgtgttttcttctgtgtaaagtacatgagctgcctcactaagcattccca

SEQ ID NO: 34563 - DNA, 12582 bp, Homo sapiens
  source 1..12582: mol_type = unassigned DNA
atgttcccaatgcagaagggctccctcaacctcctgaggcagaaatgggaatcttgtgattatcagagaagtgagtgtcatcccagggacagccattgtacaattttccagcctcaggaaagcaaattgcttgcgcctgaaggagaggtagtatcagcacctcaatctttggatcccacaagtctgccctacagtacaggggaagagatgtggagttcgaagccggaagagaaggattctgtggacaagagtaacaacaccagggaatatggtcggccagaagtgctgaaggaggattccctgagcagtcggcgcaggattgaacgcttttccattgcccttgatgagctgaggagtgtgtttgaggctcctaagagtggaaacaaaccagctgagtacggtggaaaggaagtggaaattgagcgaagtttgtgctcgccagcttttaagagtcaccctgggagccagctggaggattctgtgaaagattcagacaagaaaggcaaggaaacatcttttgacaagatgtcacctgaaagtggtcacagccgcatctttgaagcgactgctggccctaataagcctgagagtggatttgcagaagacagtgctgctcggggcgagggtgtgtcagacctccacgaagtggtctccctgaaggagcggatggcgaggtaccaggcagctgtttccaggggtgactgccgcagcttctctgctaatatgatggaagaatcagaaatgtgcgcagtgcctggtggtttggccaaggtgaagaaacaatttgaggacgaaattacttcttcccgtaatacctttgctcaataccaatatcaacatcagaacagatctgagcaggaggcaattcatagcagccaggttggcacttcaagaagcagccaggaaatggcaagaaatgaacaagaagggtccaaagtacagaaaattgatgttcatggaacagaaatggtctctcatcttgaaaagcacaccgaggaagtaaaccaagcatctcagtttcatcaatatgttcaagaaactgtcattgatacacctgaggatgaagagattccaaaggtttcgactaagttgttaaaagagcagtttgaaaagtctgcccaggaaaagatcctttattctgacaaagagatgacaaccccagccaagcagattaagactgaaagtgaatatgaagagactttcaagccatcatcagttgtgagtacctcttccacttcttgcgtttcaaccagccagaggaaggaaacatcaactacaagatatagtgatcacagtgtcacttcctcaactctggcacaaattaatgctacttcttcaggaatgacagaagaatttcctcctcccccacctgacgtacttcaaacttcagtagatgtgacagcattttcccagtcccctgaactgcccagtcctcctagaagactaccagtccccaaagatgtatattccaagcaaagaaatttgtatgaattaaaccgtttatataaacacatccatcctgagttaagaaaaaacttagaaaaagattatatcagtgaagtttctgagattgtttctagtcaaatgaactcagggagttcagtctcagcagatgtgcaacaagcccggtatgtttttgaaaacacaaatgacagttctcaaaaagatctgaactcagaaagagaatacttggaatgggatgaaattctgaagggagaggtgcagtccattagatggatctttgagaatcaaccattggattccatcaacaatggctctcctgatgaaggtgatatttccaggggcattgctgatcaagaaatcattgctggtggtgatgtgaaatataccacatggatgtttgaaacccaacccatcgacacacttggggcttattcttctgacactgtagaaaatgcagagaaaattcctgagctagccagaggagatgtctgcacagctcggtggatgtttgaaacaaggccattggactcaatgaataaaatgcatcaaagtcaagaagaatcagcggtaactatcagtaaggacataactgggggggatgtcaagactgtgagatacatgtttgaaactcaacatctagatcaacttggacagcttcattcagtggatgaggttcatttactgcagcttaggtctgagctcaaagaaattaagggaaatgttaaaagaagtataaaatgtttcgaaactcaaccattatatgttattagagatggttcgggccaaatgctggaaattaaaactgttcacagagaagacgttgaaaagggagatgtaagaacagcacggtggatgtttgaaacacagccgttggacacaattaacaaagatatcacagaaattaaagttgtccgaggaatatccatggaagaaaatgtcaaaggtggggtgagtaaggcaaagtggttatttgaaacccaacctttggagaaaatcaaagagtcagaagaggtcatcattgaaaaggaaaaaataataggtacagatgtctccagaaagtgttggatgtttgaaacccagccattagacattctaaaagaagttcctgatgcagattctctacaacgtgaggagataataggtggtgatgtacaaactactaagcatctatttgaaacacttccaattgaagcattaaaagacagtcctgatataggaaagcttcaaaaaatcactgcctctgaagaagaaaaaggggatgttaggcatcaaaaatggatttttgaaacccaacctctggaagacattagaaaagataaaaaggagtacacacgaacagtgaaacttgaagaagttgacagaggagatgtgaagaattacacacatatctttgaatcaaacaatttaattaaatttgatgcatcacataaaatagaggtggaaggagttacaagaggtgctgtagagttaaataaatctctcttcgagacaacaccactgtatgccattcaagatccccttggaaaatatcatcaagtaaagacagtccagcaagaagaaatcgtaagaggtgatgtaagaagctgtaggtggctttttgaaacaaggcccattgaccagtttgatgaaagcattcataaatttcaaataattagaggaatatctgctcaagaaatacagactggaaatgtgaaatctgccaaatggttgtttgaaacccaacctcttgattcaattaaatattttagtgatgtggaagaaacagaaagtaaaactgaacaaactagagatattgttaaaggggatgtcaaaacctgtaaatggctttttgagacccagccaatggagtctctttatgaaaaagtttcgttaatgaccagcagtgaagaaattcataagggagatgtcaaaacttgtacttggctctttgaaactcagccacttgataccataaaagatgactctgaaacagcagtcaaattgcaaactgtaaaacaggaggagatccaaggtggggatgttcgtacagcatgttttctttttgagacagaaaatttggacagcatacaaggagaagaagtgaaggaaatcaagcctgttgaaatggatatacaagctggagatgtttccagcatgaggtataaatttgaaaatcagtccttagattctataagttctagttcagaggaagttttgaaaaagatcaaaaccttaaaaactgaagatattcagaaaggcaatgttttaaattgtaggtggctttttgaaaaccaaccaattgataagataaaagaaagccaagaaggtgatgaatgtgttaagacggtgacagacatacaaggtggggatgtaagaaaggggtgctttatttttgagactttttctttagatgagattaaagaagaatctgactatatcagcaccaagaaaacaattactgaagaagtaatacagggtgatgtaaaaagctacagaatgctctttgaaacccagccactctatgcaattcaagaccgagaagggtcctatcatgaagtgaccacagttaaaaaagaagaggtaattcatggagatgtgcgaggaacaaggtggctttttgaaacaaagccattagactctattaataaatcagaaactgtgtatgttattaaatctgtcacacaagaagacattcagaagggagatgttagttctgtcagatacagatttgaaactcagccactggatcagatttctgaagaatcacataatattatgcccagtattgaccatatacaaggtggcaatgtaaagacaagtagacaattctttgagtctgaaaattttgataagaataactatatacgaacagtaagtgtcaatgaaatacaaaagggcaatgttaaaacatctacttggctatttgaaacccacactatggatgaactgagaggagaagggttagaatatgaaaatatcaagacagtcactcaggaagatgtgcagaaaggtgatgttaagcaggctgtgtggctttttgaaaatcgaactttcgattctattatggaagcacataaaggtatcacaaaaatgaccaaggaagaaatccctccttctgatgtcaaaacaaccacatggctctttgaaacaacaccacttcatgaatttaatgaaactagagtagaaaagatagaaattattggcaagagcattaaagaaaccttagaagatctctactctcaaaaagttatccaggctcctggaatcatcattgaagctgatgaaataggggatgttcgaatggcaaaatacaagctaatgaaccaagcatctcctgagatacagaaagaagaaattatcagggctgatctcagaaatataatggtgaacctactttccaaaagggactgtactgaaagagagattttgattagtgaagaagagaagggaaatgttaatttgactaaaactcaattattaaacagatcaactgaatttcatgctgaaaaagaagagatagtgaaaggtgatgtacaacaagcaataaaaaacctgttctctgaggaaagatctgtaaagaaaggcatcttaattcaggaagatgaaaaaggagatattaacatgactatctattgtcttcttcatgaaaatgatggtgacacaattgagcgtgaagaagtaataggtggtgatgtcaaacgtaccattcataatttattgtcttccacatcaaacaataaaatatctgaaagggctaaaattgatgcctctgagagaggaaatgttcagtttttcacaacctgcatagaagctggagctttggattatctgaaacaactccacacagagtcaaatgaaacactgacagctaagaaacaagaaggagagaaagaaatcattggtggtgatgttgaaggtacaaaactgttactgaagaaaaggcagtctctggttgaacgtactgttagtgaaactgacatcatccctggagatgtgcataacacagttaaggtttttatgaccgagcctcagagtacatttggtaagatacccaaagaagagattataaaaggtgatttgacatcaaccctaaattccctcagccaggctgtaaatcagaaaacagtgacgaaaacagaagaaattataaaaggtaacatgctagccacactcaagtcacttaaagaatcaagccatcgatggaaagaatctaaacagcctgatgccatccctggtgatattgaaaaagctattgaatgccttgaaaaagctacaaatacaaagacagaaattctgaaaaaggagcttctcaaagatgacctggaaacatcactaaggtctttgaaagaagcacaaagaagtttcaaagaggtacataaagaaggtgtaataaaaaaagatgctaaagctgtgatggcaggatcctcgggagagcagaaaacagatattcatcaggttgctgtccagaggaacaaaaatagtcttcttcagccaaagccaggtccatttgagccagcggccaagtggcaagggggagcagatactctcagtcaaactatggggaaatcttgccatggcaatttagtagaagaaagaactgaggttaatcttccaaaagcccccaaaggcactgtaaagattgtcatagatcgtgaacaaaacaatgatgctctggagaaaagccttagaagactatctaattcacaccataaatctaatgttttggaatcaggagacaaaacgggtgtctggactgatactacaggagaacagcatcttagagatgaatatatgagcagacaattaacttcaactgtgtcagttaagaataatctaacaactaaagaatcagacagggcagtgagagagctgaagaaggatgatgtctttaattccatccaatctgctggtaaaaccgttggaaagcaacagacatatgaactgagaaatgaccaccagaaaatggagggttttcatataaagagtcctaaaaagaccaaaaatattaaaatattaactgatacacaaagctccaagcccagtcccacccagcatccagtcagcatgccagttggaggaacttacgacctttcaggggactttcagaagcaaactttgttaaagcaagaaacaaaatattctaataaggatataaagaaaaagaatataaaccttcaaccaatgtggcagcttttgcctgtagagcaagacacatccaatgtaacagaaatgaaagtctctgaaaaaagtcacaatacatttaaggcaaccaacaaaaagcgggagactgatgttcacttgaaaagccaggactttctaatgaaaacaaatacttccacaggcttaaaaatggcaatggaaaggtccttgaatccaatcaactttaaccctgagaataatgtaaaagaaagtgagtgcccccttccacctccatctccacctcctccaccaccttctaatgcatcatctgaaattgaatttcctcttcctcctccacctcctttgatgatgtttcctgaaaaaaatgggtttcttccctcactgtccacagagaagataaaggctgaatttgaaagttttccaggcctccctcttcctccacctccagtagatgagaaatctgaaagagaaagttcatcgatgtttctgccgcctcctcctcctccaactccatctcaaaagccagcacatctcctttcctcctctgctccggaaaagcacagtggagacttcatgcaacaatattcccaaaaagaagcctcgaactctcagaattctcaggctaaaatcataacaggaaaaaccggtgtgttgccacctcccacattgcccaaacccaaacttcccaagcatataaaagataataagaacgatttttcccccaaagttgaactggcaacctccctgtcagatatggaatgtaaaattactacctcaaaggatcagaaaaaagtaatggtgatgaccagcagtgaacacacggagacaaagcagaacgttattagtaagagtcttgatgaaagaaaacaattatctattgactctgcaaactgtctctcacacacagttccaggaacttcagcacccaggaaaaaacagattgcgcctcttataaaatctcattcatttccagagagttcaggacaacaaaatccaaaaccttatatgagaaaatttaagacacctttaatgattgctgaagaaaaatatagacaacaaaaagaagaaattgaaaaacagaaacaggagagttcttactacaacattgttaaaactcaaagccaaaatcaacacataacagaggtggaaaaggaaatgccattacaaaaaaccaatgaggaggtttccctatctggaattgattcagaatgcactgtggttcaacccagcccaggctctcaaagtaatgctcggatactaggagtgtgttctgataaccaactctccacaacatcgccagaaacagtcgctgccaagaggctccaccatgttttagcagcttcagaagacaaagataagatgaaaaaggaagttttacaaagctcaagggacattatgcaatccaaatcagcttgcgaaattaaacaaagtcaccaagaatgtagtacccaacaaacacaacagaagaagtatttggagcagttgcacttgccccaaagcaaaccaatttccccaaatttcaaagttaaaaccatcaaacttccaactctagatcatacattaaatgaaacagaccacagctatgaaagtcataaacagcaatctgagattgatgttcaaacctttaccaaaaaacaatatctgaaaaccaagaaaactgaagcaagcactgaatgtagtcataagcaatctctggctgaaagacattatcagttacctaagaaggagaaaagagtgacagtacaattgcctacagaatccatacagaagaaccaggaagataagctcaagatggttcccaggaagcaaagagaatttagcggatctgacagagggaaacttccaggaagtgaagaaaaaaatcagggaccatcaatgattggtcgaaaagaagagagattaataactgaaagaaaacacgaacatctgaagaataaatcagcaccaaaggtcgtcaagcaaaaggttatcgatgcacatcttgattcacagactcagaattttcagcaaacacaaatacagaccgctgaaagtaaagctgaacataaaaaattgccccagccatataatagtctgcaggaagaaaaatgtctcgaagtcaagggcatacaagagaaacaagtcttctctaatactaaagattcaaagcaagagattacacagaacaaatctttcttttcctctgtgaaagaatcccagcgggatgatggaaaaggtgccttaaatatagtggaattcttgagaaaacgtgaagaactgcaacagattttgtcgagagtgaaacagtttgaagcagagccaaataaaagtggccttaaaacatttcagacactattaaatactatcccaggatggctgataagtgaagataagagagaatatgcagttcacattgccatggagaataatttagaaaaagtaaaagaagaaataacacatattaaaactcaagcggaagatatgcttgtgtcctatgaaaatataattcagacagccatgatgtcctccaaaacaggaaaaccgggaaataaacccactagtcttgatgaaacatcatccaaagtatctaatgttcatgtcagcaataataaaaatagtgaacagaaagaaaataaaattgccaaagagaaaacagtacagcaccaagtagcagctcatcatgaagcaactgttcgtagtcacgtgaaaacccatcaggaaattaaacttgatgatagcaacattcctcctccctctttaaaaacacgcccaccgtcaccaacttttatcacaatagaatctactgcccgacgaacagaaaaccctactaagaacgagctttctcagtcccctaaaaaggacagttatgttgaacccccaccaagaaggcccatgtcgcaaaaatctgaaattcacagagcaaacacttccccttctccacccaggagtcgctctgaacaacttgtcagactcaaagacaccactgcaaagttatccaaaggggccatcccatgtccagcagcaaccccggttccaattgtagagaagaggtctgaaatcatcatgtctcctgcaacacttcgtcgtcaaattaagatagaaactcgtggtagggactctccacctacaatcacaataccagtaaatataaatcatgctgctagtggttccttcagagaatctgtggacgctcaagaggaaatcaggaaagtggagaagagagctacttatgttcataaagatggactaaattccactgatcacatggtgcccgacactgaaagttatgatgcagttgaaatcatccgcaaggttgcagtgcctcctcgcctgtcagagcacacacagagatatgaagcggccaaccgaactgttcaaatggctgaaaatttcgtgaatgaccctgaaaatgaaataaacagatggttcagggaatttgagcatggcccagtttctgaagcaaagtcaaatagaagagtttatgcaaagggagaaacaaaccataacatacaacaagaaagtcgtacattttgtaaggaggaatttggattaacatctttaggaaacacgagttttacagacttttcttgcaaacatcctagagaactgcgagaaaagattcctgttaagcagcccaggatctgctctgaaaccaggtctctaagtgaacatttctcaggcatggatgcatttgagagtcaaattgttgagtcgaagatgaaaacctcttcatcacatagctcagaagctggcaaatctggctgtgacttcaagcatgccccaccaacctatgaggatgtcattgctggacatattttagatatctctgattcacctaaagaagtaagaaaaaattttcaaaagacgtggcaagagagtggaagagtttttaaaggcctgggatatgcaaccgcagatgcttctgcaactgagatgagaaccaccttccaagaggaatctgcatttataagtgaagctgctgctccaagacaaggaaatatgtatactttgtcaaaagacagtttatccaatggagtgcctagtggcagacaagcagaattttcataagtcctgcttccgatgccaccattgcaacagtaaactaagtttgggaaattatgcatcacttcatggacaaatatactgtaaacctcactttaaacaacttttcaaatccaaaggaaattatgatgaaggttttggacataagcagcataaagatagatggaactgcaaaaaccaaagcagatcagtggactttattcctaatgaagaaccaaatatgtgtaaaaatattgcagaaaacacccttgtacctggagatcgtaatgaacatttagatgctggtaacagtgaagggcaaaggaatgatttgagaaaattaggggaaaggggaaaattaaaagtcatttggcctccttccaaggagatccctaagaaaaccttaccctttgaggaagagctcaaaatgagtaaacctaagtggccacctgaaatgacaaccctgctatcccctgaatttaaaagtgaatctctgctagaagatgttagaactccagaaaataaaggacaaagacaagatcactttccatttttgcagccttatctacagtccacccatgtttgtcagaaagaggatgttataggaatcaaagaaatgaaaatgcctgaaggaagaaaagatgaaaagaaggaaggaaggaagaatgtgcaagataggccgagtgaagctgaagacacaaagagtaacaggaaaagtgctatggatcttaatgacaacaataatgtgattgtgcagagtgctgaaaaggagaaaaatgaaaaaactaaccaaactaatggtgcagaagttttacaggttactaacactgatgatgagatgatgccagaaaatcataaagaaaatttgaataagaataataataacaattatgtagcagtctcatatctgaataattgcaggcagaagacatctattttagaatttcttgatctattacccttgtcgagtgaagcaaatgacactgcaaatgaatatgaaattgagaagttagaaaatacatctagaatctcagagttacttggtatatttgaatctgaaaagacttattcgaggaatgtactagcaatggctctgaagaaacagactgacagagcagctgctggcagtcctgtgcagcctgctccaaaaccaagcctcagcagaggccttatggtaaaggggggaagttcaatcatctctcctgatacaaatctcttaaacattaaaggaagccattcaaagagcaaaaatttacactttttcttttctaacaccgtgaaaatcactgcattttccaagaaaaatgagaacattttcaattgtgatttaatagattctgtagatcaaattaaaaatatgccatgcttggatttaagggaatttggaaaggatgttaaaccttggcatgttgaaacaacagaagctgcccgcaataatgaaaacacaggttttgatgctctgagccatgaatgtacagctaagcctttgtttcccagagtggaggtgcagtcagaacaactcacggtggaagagcagattaaaagaaacaggtgctacagtgacactgagtaaaatatctatggccactgacagtccacacttaggcactgagagatattgatgttctgaaataagattttatgaatttggatacccttttgaggaacttgatgtaaacatggtgttcagaaatctcgtgtctatctcaatgggatatttcttgtattacaccttgtcatttttttcacaatttatttacatctacttttgtttgaactggaatgaagagatgaaacactatggatatgttttccattcaaatggcactttagcatattgttctgttttcctgtaaaacatcatgggtgtgatttttatactgctgctgcttgtcacaattattataacttctctgtaatttcctctgaaataaaattgaatcacctgaggtgcaaacc

SEQ ID NO: 34564 - DNA, 3292 bp, Homo sapiens
  source 1..3292: mol_type = unassigned DNA
ggagaaatctggcaggtctctaggcagacaaaagggaacatctggtagggactgggacatgtagaaaaaaggacaacctggacccatccatgttcccaatgcagaagggctccctcaacctcctgaggcagaaatgggaatcttgtgattatcagagaagtgagtgtcatcccagggacagccattgtacaattttccagcctcaggaaagcaaattgcttgcgcctgaaggagaggtagtatcagcacctcaatctttggatcccacaagtctgccctacagtacaggggaagagatgtggagttcgaagccggaagagaaggattctgtggacaagagtaacaacaccagggaatatggtcggccagaagtgctgaaggaggattccctgagcagtcggcgcaggattgaacgcttttccattgcccttgatgagctgaggagtgtgtttgaggctcctaagagtggaaacaaaccagctgagtacggtggaaaggaagtggaaattgagcgaagtttgtgctcgccagcttttaagagtcaccctgggagccagctggaggattctgtgaaagattcagacaagaaaggcaaggaaacatcttttgacaagatgtcacctgaaagtggtcacagccgcatctttgaagcgactgctggccctaataagcctgagagtggatttgcagaagacagtgctgctcggggcgagggtgtgtcagacctccacgaagtggtctccctgaaggagcggatggcgaggtaccaggcagctgtttccaggggtgactgccgcagcttctctgctaatatgatggaagaatcagaaatgtgcgcagtgcctggtggtttggccaaggtgaagaaacaatttgaggacgaaattacttcttcccgtaatacctttgctcaataccaatatcaacatcagaacagatctgagcaggaggcaattcatagcagccaggttggcacttcaagaagcagccaggaaatggcaagaaatgaacaagaagggtccaaagtacagaaaattgatgttcatggaacagaaatggtctctcatcttgaaaagcacaccgaggaagtaaaccaagcatctcagtttcatcaatatgttcaagaaactgtcattgatacacctgaggatgaagagattccaaaggtttcgactaagttgttaaaagagcagtttgaaaagtctgcccaggaaaagatcctttattctgacaaagagatgacaaccccagccaagcagattaagaagctgctgctccaagacaaggaaatatgtatactttgtcaaaagacagtttatccaatggagtgcctagtggcagacaagcagaattttcataagtcctgcttccgatgccaccattgcaacagtaaactaagtttgggaaattatgcatcacttcatggacaaatatactgtaaacctcactttaaacaacttttcaaatccaaaggaaattatgatgaaggttttggacataagcagcataaagatagatggaactgcaaaaaccaaagcagatcagtggactttattcctaatgaagaaccaaatatgtgtaaaaatattgcagaaaacacccttgtacctggagatcgtaatgaacatttagatgctggtaacagtgaagggcaaaggaatgatttgagaaaattaggggaaaggggaaaattaaaagtcatttggcctccttccaaggagatccctaagaaaaccttaccctttgaggaagagctcaaaatgagtaaacctaagtggccacctgaaatgacaaccctgctatcccctgaatttaaaagtgaatctctgctagaagatgttagaactccagaaaataaaggacaaagacaagatcactttccatttttgcagccttatctacagtccacccatgtttgtcagaaagaggatgttataggaatcaaagaaatgaaaatgcctgaaggaagaaaagatgaaaagaaggaaggaaggaagaatgtgcaagataggccgagtgaagctgaagacacaaagagtaacaggaaaagtgctatggatcttaatgacaacaataatgtgattgtgcagagtgctgaaaaggagaaaaatgaaaaaactaaccaaactaatggtgcagaagttttacaggttactaacactgatgatgagatgatgccagaaaatcataaagaaaatttgaataagaataataataacaattatgtagcagtctcatatctgaataattgcaggcagaagacatctattttagaatttcttgatctattacccttgtcgagtgaagcaaatgacactgcaaatgaatatgaaattgagaagttagaaaatacatctagaatctcagagttacttggtatatttgaatctgaaaagacttattcgaggaatgtactagcaatggctctgaagaaacagactgacagagcagctgctggcagtcctgtgcagcctgctccaaaaccaagcctcagcagaggccttatggtaaaggggggaagttcaatcatctctcctgatacaaatctcttaaacattaaaggaagccattcaaagagcaaaaatttacactttttcttttctaacaccgtgaaaatcactgcattttccaagaaaaatgagaacattttcaattgtgatttaatagattctgtagatcaaattaaaaatatgccatgcttggatttaagggaatttggaaaggatgttaaaccttggcatgttgaaacaacagaagctgcccgcaataatgaaaacacaggttttgatgctctgagccatgaatgtacagctaagcctttgtttcccagagtggaggtgcagtcagaacaactcacggtggaagagcagattaaaagaaacaggtgctacagtgacactgagtaaaatatctatggccactgacagtccacacttaggcactgagagatattgatgttctgaaataagattttatgaatttggatacccttttgaggaacttgatgtaaacatggtgttcagaaatctcgtgtctatctcaatgggatatttcttgtattacaccttgtcatttttttcacaatttatttacatctacttttgtttgaactggaatgaagagatgaaacactatggatatgttttccattcaaatggcactttagcatattgttctgttttcctgtaaaacatcatgggtgtgatttttatactgctgctgcttgtcacaattattataacttctctgtaatttcctctgaaataaaattgaatcacctgaggtgcaaacc

SEQ ID NO: 34565 - DNA, 12675 bp, Homo sapiens
  source 1..12675: mol_type = unassigned DNA
ggagaaatctggcaggtctctaggcagacaaaagggaacatctggtagggactgggacatgtagaaaaaaggacaacctggacccatccatgttcccaatgcagaagggctccctcaacctcctgaggcagaaatgggaatcttgtgattatcagagaagtgagtgtcatcccagggacagccattgtacaattttccagcctcaggaaagcaaattgcttgcgcctgaaggagaggtagtatcagcacctcaatctttggatcccacaagtctgccctacagtacaggggaagagatgtggagttcgaagccggaagagaaggattctgtggacaagagtaacaacaccagggaatatggtcggccagaagtgctgaaggaggattccctgagcagtcggcgcaggattgaacgcttttccattgcccttgatgagctgaggagtgtgtttgaggctcctaagagtggaaacaaaccagctgagtacggtggaaaggaagtggaaattgagcgaagtttgtgctcgccagcttttaagagtcaccctgggagccagctggaggattctgtgaaagattcagacaagaaaggcaaggaaacatcttttgacaagatgtcacctgaaagtggtcacagccgcatctttgaagcgactgctggccctaataagcctgagagtggatttgcagaagacagtgctgctcggggcgagggtgtgtcagacctccacgaagtggtctccctgaaggagcggatggcgaggtaccaggcagctgtttccaggggtgactgccgcagcttctctgctaatatgatggaagaatcagaaatgtgcgcagtgcctggtggtttggccaaggtgaagaaacaatttgaggacgaaattacttcttcccgtaatacctttgctcaataccaatatcaacatcagaacagatctgagcaggaggcaattcatagcagccaggttggcacttcaagaagcagccaggaaatggcaagaaatgaacaagaagggtccaaagtacagaaaattgatgttcatggaacagaaatggtctctcatcttgaaaagcacaccgaggaagtaaaccaagcatctcagtttcatcaatatgttcaagaaactgtcattgatacacctgaggatgaagagattccaaaggtttcgactaagttgttaaaagagcagtttgaaaagtctgcccaggaaaagatcctttattctgacaaagagatgacaaccccagccaagcagattaagactgaaagtgaatatgaagagactttcaagccatcatcagttgtgagtacctcttccacttcttgcgtttcaaccagccagaggaaggaaacatcaactacaagatatagtgatcacagtgtcacttcctcaactctggcacaaattaatgctacttcttcaggaatgacagaagaatttcctcctcccccacctgacgtacttcaaacttcagtagatgtgacagcattttcccagtcccctgaactgcccagtcctcctagaagactaccagtccccaaagatgtatattccaagcaaagaaatttgtatgaattaaaccgtttatataaacacatccatcctgagttaagaaaaaacttagaaaaagattatatcagtgaagtttctgagattgtttctagtcaaatgaactcagggagttcagtctcagcagatgtgcaacaagcccggtatgtttttgaaaacacaaatgacagttctcaaaaagatctgaactcagaaagagaatacttggaatgggatgaaattctgaagggagaggtgcagtccattagatggatctttgagaatcaaccattggattccatcaacaatggctctcctgatgaaggtgatatttccaggggcattgctgatcaagaaatcattgctggtggtgatgtgaaatataccacatggatgtttgaaacccaacccatcgacacacttggggcttattcttctgacactgtagaaaatgcagagaaaattcctgagctagccagaggagatgtctgcacagctcggtggatgtttgaaacaaggccattggactcaatgaataaaatgcatcaaagtcaagaagaatcagcggtaactatcagtaaggacataactgggggggatgtcaagactgtgagatacatgtttgaaactcaacatctagatcaacttggacagcttcattcagtggatgaggttcatttactgcagcttaggtctgagctcaaagaaattaagggaaatgttaaaagaagtataaaatgtttcgaaactcaaccattatatgttattagagatggttcgggccaaatgctggaaattaaaactgttcacagagaagacgttgaaaagggagatgtaagaacagcacggtggatgtttgaaacacagccgttggacacaattaacaaagatatcacagaaattaaagttgtccgaggaatatccatggaagaaaatgtcaaaggtggggtgagtaaggcaaagtggttatttgaaacccaacctttggagaaaatcaaagagtcagaagaggtcatcattgaaaaggaaaaaataataggtacagatgtctccagaaagtgttggatgtttgaaacccagccattagacattctaaaagaagttcctgatgcagattctctacaacgtgaggagataataggtggtgatgtacaaactactaagcatctatttgaaacacttccaattgaagcattaaaagacagtcctgatataggaaagcttcaaaaaatcactgcctctgaagaagaaaaaggggatgttaggcatcaaaaatggatttttgaaacccaacctctggaagacattagaaaagataaaaaggagtacacacgaacagtgaaacttgaagaagttgacagaggagatgtgaagaattacacacatatctttgaatcaaacaatttaattaaatttgatgcatcacataaaatagaggtggaaggagttacaagaggtgctgtagagttaaataaatctctcttcgagacaacaccactgtatgccattcaagatccccttggaaaatatcatcaagtaaagacagtccagcaagaagaaatcgtaagaggtgatgtaagaagctgtaggtggctttttgaaacaaggcccattgaccagtttgatgaaagcattcataaatttcaaataattagaggaatatctgctcaagaaatacagactggaaatgtgaaatctgccaaatggttgtttgaaacccaacctcttgattcaattaaatattttagtgatgtggaagaaacagaaagtaaaactgaacaaactagagatattgttaaaggggatgtcaaaacctgtaaatggctttttgagacccagccaatggagtctctttatgaaaaagtttcgttaatgaccagcagtgaagaaattcataagggagatgtcaaaacttgtacttggctctttgaaactcagccacttgataccataaaagatgactctgaaacagcagtcaaattgcaaactgtaaaacaggaggagatccaaggtggggatgttcgtacagcatgttttctttttgagacagaaaatttggacagcatacaaggagaagaagtgaaggaaatcaagcctgttgaaatggatatacaagctggagatgtttccagcatgaggtataaatttgaaaatcagtccttagattctataagttctagttcagaggaagttttgaaaaagatcaaaaccttaaaaactgaagatattcagaaaggcaatgttttaaattgtaggtggctttttgaaaaccaaccaattgataagataaaagaaagccaagaaggtgatgaatgtgttaagacggtgacagacatacaaggtggggatgtaagaaaggggtgctttatttttgagactttttctttagatgagattaaagaagaatctgactatatcagcaccaagaaaacaattactgaagaagtaatacagggtgatgtaaaaagctacagaatgctctttgaaacccagccactctatgcaattcaagaccgagaagggtcctatcatgaagtgaccacagttaaaaaagaagaggtaattcatggagatgtgcgaggaacaaggtggctttttgaaacaaagccattagactctattaataaatcagaaactgtgtatgttattaaatctgtcacacaagaagacattcagaagggagatgttagttctgtcagatacagatttgaaactcagccactggatcagatttctgaagaatcacataatattatgcccagtattgaccatatacaaggtggcaatgtaaagacaagtagacaattctttgagtctgaaaattttgataagaataactatatacgaacagtaagtgtcaatgaaatacaaaagggcaatgttaaaacatctacttggctatttgaaacccacactatggatgaactgagaggagaagggttagaatatgaaaatatcaagacagtcactcaggaagatgtgcagaaaggtgatgttaagcaggctgtgtggctttttgaaaatcgaactttcgattctattatggaagcacataaaggtatcacaaaaatgaccaaggaagaaatccctccttctgatgtcaaaacaaccacatggctctttgaaacaacaccacttcatgaatttaatgaaactagagtagaaaagatagaaattattggcaagagcattaaagaaaccttagaagatctctactctcaaaaagttatccaggctcctggaatcatcattgaagctgatgaaataggggatgttcgaatggcaaaatacaagctaatgaaccaagcatctcctgagatacagaaagaagaaattatcagggctgatctcagaaatataatggtgaacctactttccaaaagggactgtactgaaagagagattttgattagtgaagaagagaagggaaatgttaatttgactaaaactcaattattaaacagatcaactgaatttcatgctgaaaaagaagagatagtgaaaggtgatgtacaacaagcaataaaaaacctgttctctgaggaaagatctgtaaagaaaggcatcttaattcaggaagatgaaaaaggagatattaacatgactatctattgtcttcttcatgaaaatgatggtgacacaattgagcgtgaagaagtaataggtggtgatgtcaaacgtaccattcataatttattgtcttccacatcaaacaataaaatatctgaaagggctaaaattgatgcctctgagagaggaaatgttcagtttttcacaacctgcatagaagctggagctttggattatctgaaacaactccacacagagtcaaatgaaacactgacagctaagaaacaagaaggagagaaagaaatcattggtggtgatgttgaaggtacaaaactgttactgaagaaaaggcagtctctggttgaacgtactgttagtgaaactgacatcatccctggagatgtgcataacacagttaaggtttttatgaccgagcctcagagtacatttggtaagatacccaaagaagagattataaaaggtgatttgacatcaaccctaaattccctcagccaggctgtaaatcagaaaacagtgacgaaaacagaagaaattataaaaggtaacatgctagccacactcaagtcacttaaagaatcaagccatcgatggaaagaatctaaacagcctgatgccatccctggtgatattgaaaaagctattgaatgccttgaaaaagctacaaatacaaagacagaaattctgaaaaaggagcttctcaaagatgacctggaaacatcactaaggtctttgaaagaagcacaaagaagtttcaaagaggtacataaagaaggtgtaataaaaaaagatgctaaagctgtgatggcaggatcctcgggagagcagaaaacagatattcatcaggttgctgtccagaggaacaaaaatagtcttcttcagccaaagccaggtccatttgagccagcggccaagtggcaagggggagcagatactctcagtcaaactatggggaaatcttgccatggcaatttagtagaagaaagaactgaggttaatcttccaaaagcccccaaaggcactgtaaagattgtcatagatcgtgaacaaaacaatgatgctctggagaaaagccttagaagactatctaattcacaccataaatctaatgttttggaatcaggagacaaaacgggtgtctggactgatactacaggagaacagcatcttagagatgaatatatgagcagacaattaacttcaactgtgtcagttaagaataatctaacaactaaagaatcagacagggcagtgagagagctgaagaaggatgatgtctttaattccatccaatctgctggtaaaaccgttggaaagcaacagacatatgaactgagaaatgaccaccagaaaatggagggttttcatataaagagtcctaaaaagaccaaaaatattaaaatattaactgatacacaaagctccaagcccagtcccacccagcatccagtcagcatgccagttggaggaacttacgacctttcaggggactttcagaagcaaactttgttaaagcaagaaacaaaatattctaataaggatataaagaaaaagaatataaaccttcaaccaatgtggcagcttttgcctgtagagcaagacacatccaatgtaacagaaatgaaagtctctgaaaaaagtcacaatacatttaaggcaaccaacaaaaagcgggagactgatgttcacttgaaaagccaggactttctaatgaaaacaaatacttccacaggcttaaaaatggcaatggaaaggtccttgaatccaatcaactttaaccctgagaataatgtaaaagaaagtgagtgcccccttccacctccatctccacctcctccaccaccttctaatgcatcatctgaaattgaatttcctcttcctcctccacctcctttgatgatgtttcctgaaaaaaatgggtttcttccctcactgtccacagagaagataaaggctgaatttgaaagttttccaggcctccctcttcctccacctccagtagatgagaaatctgaaagagaaagttcatcgatgtttctgccgcctcctcctcctccaactccatctcaaaagccagcacatctcctttcctcctctgctccggaaaagcacagtggagacttcatgcaacaatattcccaaaaagaagcctcgaactctcagaattctcaggctaaaatcataacaggaaaaaccggtgtgttgccacctcccacattgcccaaacccaaacttcccaagcatataaaagataataagaacgatttttcccccaaagttgaactggcaacctccctgtcagatatggaatgtaaaattactacctcaaaggatcagaaaaaagtaatggtgatgaccagcagtgaacacacggagacaaagcagaacgttattagtaagagtcttgatgaaagaaaacaattatctattgactctgcaaactgtctctcacacacagttccaggaacttcagcacccaggaaaaaacagattgcgcctcttataaaatctcattcatttccagagagttcaggacaacaaaatccaaaaccttatatgagaaaatttaagacacctttaatgattgctgaagaaaaatatagacaacaaaaagaagaaattgaaaaacagaaacaggagagttcttactacaacattgttaaaactcaaagccaaaatcaacacataacagaggtggaaaaggaaatgccattacaaaaaaccaatgaggaggtttccctatctggaattgattcagaatgcactgtggttcaacccagcccaggctctcaaagtaatgctcggatactaggagtgtgttctgataaccaactctccacaacatcgccagaaacagtcgctgccaagaggctccaccatgttttagcagcttcagaagacaaagataagatgaaaaaggaagttttacaaagctcaagggacattatgcaatccaaatcagcttgcgaaattaaacaaagtcaccaagaatgtagtacccaacaaacacaacagaagaagtatttggagcagttgcacttgccccaaagcaaaccaatttccccaaatttcaaagttaaaaccatcaaacttccaactctagatcatacattaaatgaaacagaccacagctatgaaagtcataaacagcaatctgagattgatgttcaaacctttaccaaaaaacaatatctgaaaaccaagaaaactgaagcaagcactgaatgtagtcataagcaatctctggctgaaagacattatcagttacctaagaaggagaaaagagtgacagtacaattgcctacagaatccatacagaagaaccaggaagataagctcaagatggttcccaggaagcaaagagaatttagcggatctgacagagggaaacttccaggaagtgaagaaaaaaatcagggaccatcaatgattggtcgaaaagaagagagattaataactgaaagaaaacacgaacatctgaagaataaatcagcaccaaaggtcgtcaagcaaaaggttatcgatgcacatcttgattcacagactcagaattttcagcaaacacaaatacagaccgctgaaagtaaagctgaacataaaaaattgccccagccatataatagtctgcaggaagaaaaatgtctcgaagtcaagggcatacaagagaaacaagtcttctctaatactaaagattcaaagcaagagattacacagaacaaatctttcttttcctctgtgaaagaatcccagcgggatgatggaaaaggtgccttaaatatagtggaattcttgagaaaacgtgaagaactgcaacagattttgtcgagagtgaaacagtttgaagcagagccaaataaaagtggccttaaaacatttcagacactattaaatactatcccaggatggctgataagtgaagataagagagaatatgcagttcacattgccatggagaataatttagaaaaagtaaaagaagaaataacacatattaaaactcaagcggaagatatgcttgtgtcctatgaaaatataattcagacagccatgatgtcctccaaaacaggaaaaccgggaaataaacccactagtcttgatgaaacatcatccaaagtatctaatgttcatgtcagcaataataaaaatagtgaacagaaagaaaataaaattgccaaagagaaaacagtacagcaccaagtagcagctcatcatgaagcaactgttcgtagtcacgtgaaaacccatcaggaaattaaacttgatgatagcaacattcctcctccctctttaaaaacacgcccaccgtcaccaacttttatcacaatagaatctactgcccgacgaacagaaaaccctactaagaacgagctttctcagtcccctaaaaaggacagttatgttgaacccccaccaagaaggcccatgtcgcaaaaatctgaaattcacagagcaaacacttccccttctccacccaggagtcgctctgaacaacttgtcagactcaaagacaccactgcaaagttatccaaaggggccatcccatgtccagcagcaaccccggttccaattgtagagaagaggtctgaaatcatcatgtctcctgcaacacttcgtcgtcaaattaagatagaaactcgtggtagggactctccacctacaatcacaataccagtaaatataaatcatgctgctagtggttccttcagagaatctgtggacgctcaagaggaaatcaggaaagtggagaagagagctacttatgttcataaagatggactaaattccactgatcacatggtgcccgacactgaaagttatgatgcagttgaaatcatccgcaaggttgcagtgcctcctcgcctgtcagagcacacacagagatatgaagcggccaaccgaactgttcaaatggctgaaaatttcgtgaatgaccctgaaaatgaaataaacagatggttcagggaatttgagcatggcccagtttctgaagcaaagtcaaatagaagagtttatgcaaagggagaaacaaaccataacatacaacaagaaagtcgtacattttgtaaggaggaatttggattaacatctttaggaaacacgagttttacagacttttcttgcaaacatcctagagaactgcgagaaaagattcctgttaagcagcccaggatctgctctgaaaccaggtctctaagtgaacatttctcaggcatggatgcatttgagagtcaaattgttgagtcgaagatgaaaacctcttcatcacatagctcagaagctggcaaatctggctgtgacttcaagcatgccccaccaacctatgaggatgtcattgctggacatattttagatatctctgattcacctaaagaagtaagaaaaaattttcaaaagacgtggcaagagagtggaagagtttttaaaggcctgggatatgcaaccgcagatgcttctgcaactgagatgagaaccaccttccaagaggaatctgcatttataagtgaagctgctgctccaagacaaggaaatatgtatactttgtcaaaagacagtttatccaatggagtgcctagtggcagacaagcagaattttcataagtcctgcttccgatgccaccattgcaacagtaaactaagtttgggaaattatgcatcacttcatggacaaatatactgtaaacctcactttaaacaacttttcaaatccaaaggaaattatgatgaaggttttggacataagcagcataaagatagatggaactgcaaaaaccaaagcagatcagtggactttattcctaatgaagaaccaaatatgtgtaaaaatattgcagaaaacacccttgtacctggagatcgtaatgaacatttagatgctggtaacagtgaagggcaaaggaatgatttgagaaaattaggggaaaggggaaaattaaaagtcatttggcctccttccaaggagatccctaagaaaaccttaccctttgaggaagagctcaaaatgagtaaacctaagtggccacctgaaatgacaaccctgctatcccctgaatttaaaagtgaatctctgctagaagatgttagaactccagaaaataaaggacaaagacaagatcactttccatttttgcagccttatctacagtccacccatgtttgtcagaaagaggatgttataggaatcaaagaaatgaaaatgcctgaaggaagaaaagatgaaaagaaggaaggaaggaagaatgtgcaagataggccgagtgaagctgaagacacaaagagtaacaggaaaagtgctatggatcttaatgacaacaataatgtgattgtgcagagtgctgaaaaggagaaaaatgaaaaaactaaccaaactaatggtgcagaagttttacaggttactaacactgatgatgagatgatgccagaaaatcataaagaaaatttgaataagaataataataacaattatgtagcagtctcatatctgaataattgcaggcagaagacatctattttagaatttcttgatctattacccttgtcgagtgaagcaaatgacactgcaaatgaatatgaaattgagaagttagaaaatacatctagaatctcagagttacttggtatatttgaatctgaaaagacttattcgaggaatgtactagcaatggctctgaagaaacagactgacagagcagctgctggcagtcctgtgcagcctgctccaaaaccaagcctcagcagaggccttatggtaaaggggggaagttcaatcatctctcctgatacaaatctcttaaacattaaaggaagccattcaaagagcaaaaatttacactttttcttttctaacaccgtgaaaatcactgcattttccaagaaaaatgagaacattttcaattgtgatttaatagattctgtagatcaaattaaaaatatgccatgcttggatttaagggaatttggaaaggatgttaaaccttggcatgttgaaacaacagaagctgcccgcaataatgaaaacacaggttttgatgctctgagccatgaatgtacagctaagcctttgtttcccagagtggaggtgcagtcagaacaactcacggtggaagagcagattaaaagaaacaggtgctacagtgacactgagtaaaatatctatggccactgacagtccacacttaggcactgagagatattgatgttctgaaataagattttatgaatttggatacccttttgaggaacttgatgtaaacatggtgttcagaaatctcgtgtctatctcaatgggatatttcttgtattacaccttgtcatttttttcacaatttatttacatctacttttgtttgaactggaatgaagagatgaaacactatggatatgttttccattcaaatggcactttagcatattgttctgttttcctgtaaaacatcatgggtgtgatttttatactgctgctgcttgtcacaattattataacttctctgtaatttcctctgaaataaaattgaatcacctgaggtgcaaaccaaaa

SEQ ID NO: 34566 - DNA, 12269 bp, Homo sapiens
  source 1..12269: mol_type = unassigned DNA
atacagagctcagttcctaaaaataggtgccaagttgcatcctttagacgctctgctaaaataaattcagccgtcccatctacttgcttgatagacccttcagtggagcgggcctccactgcacccattgctttcaggggactgggaaattggctgtacatgaaacaagggaggaagctagtctgtgaagaactataaagatatatgatatttccacaaacttggggttaaacctaaatatcataaaagcgactgctggccctaataagcctgagagtggatttgcagaagacagtgctgctcggggcgagggtgtgtcagacctccacgaagtggtctccctgaaggagcggatggcgaggtaccaggcagctgtttccaggggtgactgccgcagcttctctgctaatatgatggaagaatcagaaatgtgcgcagtgcctggtggtttggccaaggtgaagaaacaatttgaggacgaaattacttcttcccgtaatacctttgctcaataccaatatcaacatcagaacagatctgagcaggaggcaattcatagcagccaggttggcacttcaagaagcagccaggaaatggcaagaaatgaacaagaagggtccaaagtacagaaaattgatgttcatggaacagaaatggtctctcatcttgaaaagcacaccgaggaagtaaaccaagcatctcagtttcatcaatatgttcaagaaactgtcattgatacacctgaggatgaagagattccaaaggtttcgactaagttgttaaaagagcagtttgaaaagtctgcccaggaaaagatcctttattctgacaaagagatgacaaccccagccaagcagattaagactgaaagtgaatatgaagagactttcaagccatcatcagttgtgagtacctcttccacttcttgcgtttcaaccagccagaggaaggaaacatcaactacaagatatagtgatcacagtgtcacttcctcaactctggcacaaattaatgctacttcttcaggaatgacagaagaatttcctcctcccccacctgacgtacttcaaacttcagtagatgtgacagcattttcccagtcccctgaactgcccagtcctcctagaagactaccagtccccaaagatgtatattccaagcaaagaaatttgtatgaattaaaccgtttatataaacacatccatcctgagttaagaaaaaacttagaaaaagattatatcagtgaagtttctgagattgtttctagtcaaatgaactcagggagttcagtctcagcagatgtgcaacaagcccggtatgtttttgaaaacacaaatgacagttctcaaaaagatctgaactcagaaagagaatacttggaatgggatgaaattctgaagggagaggtgcagtccattagatggatctttgagaatcaaccattggattccatcaacaatggctctcctgatgaaggtgatatttccaggggcattgctgatcaagaaatcattgctggtggtgatgtgaaatataccacatggatgtttgaaacccaacccatcgacacacttggggcttattcttctgacactgtagaaaatgcagagaaaattcctgagctagccagaggagatgtctgcacagctcggtggatgtttgaaacaaggccattggactcaatgaataaaatgcatcaaagtcaagaagaatcagcggtaactatcagtaaggacataactgggggggatgtcaagactgtgagatacatgtttgaaactcaacatctagatcaacttggacagcttcattcagtggatgaggttcatttactgcagcttaggtctgagctcaaagaaattaagggaaatgttaaaagaagtataaaatgtttcgaaactcaaccattatatgttattagagatggttcgggccaaatgctggaaattaaaactgttcacagagaagacgttgaaaagggagatgtaagaacagcacggtggatgtttgaaacacagccgttggacacaattaacaaagatatcacagaaattaaagttgtccgaggaatatccatggaagaaaatgtcaaaggtggggtgagtaaggcaaagtggttatttgaaacccaacctttggagaaaatcaaagagtcagaagaggtcatcattgaaaaggaaaaaataataggtacagatgtctccagaaagtgttggatgtttgaaacccagccattagacattctaaaagaagttcctgatgcagattctctacaacgtgaggagataataggtggtgatgtacaaactactaagcatctatttgaaacacttccaattgaagcattaaaagacagtcctgatataggaaagcttcaaaaaatcactgcctctgaagaagaaaaaggggatgttaggcatcaaaaatggatttttgaaacccaacctctggaagacattagaaaagataaaaaggagtacacacgaacagtgaaacttgaagaagttgacagaggagatgtgaagaattacacacatatctttgaatcaaacaatttaattaaatttgatgcatcacataaaatagaggtggaaggagttacaagaggtgctgtagagttaaataaatctctcttcgagacaacaccactgtatgccattcaagatccccttggaaaatatcatcaagtaaagacagtccagcaagaagaaatcgtaagaggtgatgtaagaagctgtaggtggctttttgaaacaaggcccattgaccagtttgatgaaagcattcataaatttcaaataattagaggaatatctgctcaagaaatacagactggaaatgtgaaatctgccaaatggttgtttgaaacccaacctcttgattcaattaaatattttagtgatgtggaagaaacagaaagtaaaactgaacaaactagagatattgttaaaggggatgtcaaaacctgtaaatggctttttgagacccagccaatggagtctctttatgaaaaagtttcgttaatgaccagcagtgaagaaattcataagggagatgtcaaaacttgtacttggctctttgaaactcagccacttgataccataaaagatgactctgaaacagcagtcaaattgcaaactgtaaaacaggaggagatccaaggtggggatgttcgtacagcatgttttctttttgagacagaaaatttggacagcatacaaggagaagaagtgaaggaaatcaagcctgttgaaatggatatacaagctggagatgtttccagcatgaggtataaatttgaaaatcagtccttagattctataagttctagttcagaggaagttttgaaaaagatcaaaaccttaaaaactgaagatattcagaaaggcaatgttttaaattgtaggtggctttttgaaaaccaaccaattgataagataaaagaaagccaagaaggtgatgaatgtgttaagacggtgacagacatacaaggtggggatgtaagaaaggggtgctttatttttgagactttttctttagatgagattaaagaagaatctgactatatcagcaccaagaaaacaattactgaagaagtaatacagggtgatgtaaaaagctacagaatgctctttgaaacccagccactctatgcaattcaagaccgagaagggtcctatcatgaagtgaccacagttaaaaaagaagaggtaattcatggagatgtgcgaggaacaaggtggctttttgaaacaaagccattagactctattaataaatcagaaactgtgtatgttattaaatctgtcacacaagaagacattcagaagggagatgttagttctgtcagatacagatttgaaactcagccactggatcagatttctgaagaatcacataatattatgcccagtattgaccatatacaaggtggcaatgtaaagacaagtagacaattctttgagtctgaaaattttgataagaataactatatacgaacagtaagtgtcaatgaaatacaaaagggcaatgttaaaacatctacttggctatttgaaacccacactatggatgaactgagaggagaagggttagaatatgaaaatatcaagacagtcactcaggaagatgtgcagaaaggtgatgttaagcaggctgtgtggctttttgaaaatcgaactttcgattctattatggaagcacataaaggtatcacaaaaatgaccaaggaagaaatccctccttctgatgtcaaaacaaccacatggctctttgaaacaacaccacttcatgaatttaatgaaactagagtagaaaagatagaaattattggcaagagcattaaagaaaccttagaagatctctactctcaaaaagttatccaggctcctggaatcatcattgaagctgatgaaataggggatgttcgaatggcaaaatacaagctaatgaaccaagcatctcctgagatacagaaagaagaaattatcagggctgatctcagaaatataatggtgaacctactttccaaaagggactgtactgaaagagagattttgattagtgaagaagagaagggaaatgttaatttgactaaaactcaattattaaacagatcaactgaatttcatgctgaaaaagaagagatagtgaaaggtgatgtacaacaagcaataaaaaacctgttctctgaggaaagatctgtaaagaaaggcatcttaattcaggaagatgaaaaaggagatattaacatgactatctattgtcttcttcatgaaaatgatggtgacacaattgagcgtgaagaagtaataggtggtgatgtcaaacgtaccattcataatttattgtcttccacatcaaacaataaaatatctgaaagggctaaaattgatgcctctgagagaggaaatgttcagtttttcacaacctgcatagaagctggagctttggattatctgaaacaactccacacagagtcaaatgaaacactgacagctaagaaacaagaaggagagaaagaaatcattggtggtgatgttgaaggtacaaaactgttactgaagaaaaggcagtctctggttgaacgtactgttagtgaaactgacatcatccctggagatgtgcataacacagttaaggtttttatgaccgagcctcagagtacatttggtaagatacccaaagaagagattataaaaggtgatttgacatcaaccctaaattccctcagccaggctgtaaatcagaaaacagtgacgaaaacagaagaaattataaaaggtaacatgctagccacactcaagtcacttaaagaatcaagccatcgatggaaagaatctaaacagcctgatgccatccctggtgatattgaaaaagctattgaatgccttgaaaaagctacaaatacaaagacagaaattctgaaaaaggagcttctcaaagatgacctggaaacatcactaaggtctttgaaagaagcacaaagaagtttcaaagaggtacataaagaaggtgtaataaaaaaagatgctaaagctgtgatggcaggatcctcgggagagcagaaaacagatattcatcaggttgctgtccagaggaacaaaaatagtcttcttcagccaaagccaggtccatttgagccagcggccaagtggcaagggggagcagatactctcagtcaaactatggggaaatcttgccatggcaatttagtagaagaaagaactgaggttaatcttccaaaagcccccaaaggcactgtaaagattgtcatagatcgtgaacaaaacaatgatgctctggagaaaagccttagaagactatctaattcacaccataaatctaatgttttggaatcaggagacaaaacgggtgtctggactgatactacaggagaacagcatcttagagatgaatatatgagcagacaattaacttcaactgtgtcagttaagaataatctaacaactaaagaatcagacagggcagtgagagagctgaagaaggatgatgtctttaattccatccaatctgctggtaaaaccgttggaaagcaacagacatatgaactgagaaatgaccaccagaaaatggagggttttcatataaagagtcctaaaaagaccaaaaatattaaaatattaactgatacacaaagctccaagcccagtcccacccagcatccagtcagcatgccagttggaggaacttacgacctttcaggggactttcagaagcaaactttgttaaagcaagaaacaaaatattctaataaggatataaagaaaaagaatataaaccttcaaccaatgtggcagcttttgcctgtagagcaagacacatccaatgtaacagaaatgaaagtctctgaaaaaagtcacaatacatttaaggcaaccaacaaaaagcgggagactgatgttcacttgaaaagccaggactttctaatgaaaacaaatacttccacaggcttaaaaatggcaatggaaaggtccttgaatccaatcaactttaaccctgagaataatgtaaaagaaagtgagtgcccccttccacctccatctccacctcctccaccaccttctaatgcatcatctgaaattgaatttcctcttcctcctccacctcctttgatgatgtttcctgaaaaaaatgggtttcttccctcactgtccacagagaagataaaggctgaatttgaaagttttccaggcctccctcttcctccacctccagtagatgagaaatctgaaagagaaagttcatcgatgtttctgccgcctcctcctcctccaactccatctcaaaagccagcacatctcctttcctcctctgctccggaaaagcacagtggagacttcatgcaacaatattcccaaaaagaagcctcgaactctcagaattctcaggctaaaatcataacaggaaaaaccggtgtgttgccacctcccacattgcccaaacccaaacttcccaagcatataaaagataataagaacgatttttcccccaaagttgaactggcaacctccctgtcagatatggaatgtaaaattactacctcaaaggatcagaaaaaagtaatggtgatgaccagcagtgaacacacggagacaaagcagaacgttattagtaagagtcttgatgaaagaaaacaattatctattgactctgcaaactgtctctcacacacagttccaggaacttcagcacccaggaaaaaacagattgcgcctcttataaaatctcattcatttccagagagttcaggacaacaaaatccaaaaccttatatgagaaaatttaagacacctttaatgattgctgaagaaaaatatagacaacaaaaagaagaaattgaaaaacagaaacaggagagttcttactacaacattgttaaaactcaaagccaaaatcaacacataacagaggtggaaaaggaaatgccattacaaaaaaccaatgaggaggtttccctatctggaattgattcagaatgcactgtggttcaacccagcccaggctctcaaagtaatgctcggatactaggagtgtgttctgataaccaactctccacaacatcgccagaaacagtcgctgccaagaggctccaccatgttttagcagcttcagaagacaaagataagatgaaaaaggaagttttacaaagctcaagggacattatgcaatccaaatcagcttgcgaaattaaacaaagtcaccaagaatgtagtacccaacaaacacaacagaagaagtatttggagcagttgcacttgccccaaagcaaaccaatttccccaaatttcaaagttaaaaccatcaaacttccaactctagatcatacattaaatgaaacagaccacagctatgaaagtcataaacagcaatctgagattgatgttcaaacctttaccaaaaaacaatatctgaaaaccaagaaaactgaagcaagcactgaatgtagtcataagcaatctctggctgaaagacattatcagttacctaagaaggagaaaagagtgacagtacaattgcctacagaatccatacagaagaaccaggaagataagctcaagatggttcccaggaagcaaagagaatttagcggatctgacagagggaaacttccaggaagtgaagaaaaaaatcagggaccatcaatgattggtcgaaaagaagagagattaataactgaaagaaaacacgaacatctgaagaataaatcagcaccaaaggtcgtcaagcaaaaggttatcgatgcacatcttgattcacagactcagaattttcagcaaacacaaatacagaccgctgaaagtaaagctgaacataaaaaattgccccagccatataatagtctgcaggaagaaaaatgtctcgaagtcaagggcatacaagagaaacaagtcttctctaatactaaagattcaaagcaagagattacacagaacaaatctttcttttcctctgtgaaagaatcccagcgggatgatggaaaaggtgccttaaatatagtggaattcttgagaaaacgtgaagaactgcaacagattttgtcgagagtgaaacagtttgaagcagagccaaataaaagtggccttaaaacatttcagacactattaaatactatcccaggatggctgataagtgaagataagagagaatatgcagttcacattgccatggagaataatttagaaaaagtaaaagaagaaataacacatattaaaactcaagcggaagatatgcttgtgtcctatgaaaatataattcagacagccatgatgtcctccaaaacaggaaaaccgggaaataaacccactagtcttgatgaaacatcatccaaagtatctaatgttcatgtcagcaataataaaaatagtgaacagaaagaaaataaaattgccaaagagaaaacagtacagcaccaagtagcagctcatcatgaagcaactgttcgtagtcacgtgaaaacccatcaggaaattaaacttgatgatagcaacattcctcctccctctttaaaaacacgcccaccgtcaccaacttttatcacaatagaatctactgcccgacgaacagaaaaccctactaagaacgagctttctcagtcccctaaaaaggacagttatgttgaacccccaccaagaaggcccatgtcgcaaaaatctgaaattcacagagcaaacacttccccttctccacccaggagtcgctctgaacaacttgtcagactcaaagacaccactgcaaagttatccaaaggggccatcccatgtccagcagcaaccccggttccaattgtagagaagaggtctgaaatcatcatgtctcctgcaacacttcgtcgtcaaattaagatagaaactcgtggtagggactctccacctacaatcacaataccagtaaatataaatcatgctgctagtggttccttcagagaatctgtggacgctcaagaggaaatcaggaaagtggagaagagagctacttatgttcataaagatggactaaattccactgatcacatggtgcccgacactgaaagttatgatgcagttgaaatcatccgcaaggttgcagtgcctcctcgcctgtcagagcacacacagagatatgaagcggccaaccgaactgttcaaatggctgaaaatttcgtgaatgaccctgaaaatgaaataaacagatggttcagggaatttgagcatggcccagtttctgaagcaaagtcaaatagaagagtttatgcaaagggagaaacaaaccataacatacaacaagaaagtcgtacattttgtaaggaggaatttggattaacatctttaggaaacacgagttttacagacttttcttgcaaacatcctagagaactgcgagaaaagattcctgttaagcagcccaggatctgctctgaaaccaggtctctaagtgaacatttctcaggcatggatgcatttgagagtcaaattgttgagtcgaagatgaaaacctcttcatcacatagctcagaagctggcaaatctggctgtgacttcaagcatgccccaccaacctatgaggatgtcattgctggacatattttagatatctctgattcacctaaagaagtaagaaaaaattttcaaaagacgtggcaagagagtggaagagtttttaaaggcctgggatatgcaaccgcagatgcttctgcaactgagatgagaaccaccttccaagaggaatctgcatttataagtgaagctgctgctccaagacaaggaaatatgtatactttgtcaaaagacagtttatccaatggagtgcctagtggcagacaagcagaattttcataagtcctgcttccgatgccaccattgcaacagtaaactaagtttgggaaattatgcatcacttcatggacaaatatactgtaaacctcactttaaacaacttttcaaatccaaaggaaattatgatgaaggttttggacataagcagcataaagatagatggaactgcaaaaaccaaagcagatcagtggactttattcctaatgaagaaccaaatatgtgtaaaaatattgcagaaaacacccttgtacctggagatcgtaatgaacatttagatgctggtaacagtgaagggcaaaggaatgatttgagaaaattaggggaaaggggaaaattaaaagtcatttggcctccttccaaggagatccctaagaaaaccttaccctttgaggaagagctcaaaatgagtaaacctaagtggccacctgaaatgacaaccctgctatcccctgaatttaaaagtgaatctctgctagaagatgttagaactccagaaaataaaggacaaagacaagatcactttccatttttgcagccttatctacagtccacccatgtttgtcagaaagaggatgttataggaatcaaagaaatgaaaatgcctgaaggaagaaaagatgaaaagaaggaaggaaggaagaatgtgcaagataggccgagtgaagctgaagacacaaagagtaacaggaaaagtgctatggatcttaatgacaacaataatgtgattgtgcagagtgctgaaaaggagaaaaatgaaaaaactaaccaaactaatggtgcagaagttttacaggttactaacactgatgatgagatgatgccagaaaatcataaagaaaatttgaataagaataataataacaattatgtagcagtctcatatctgaataattgcaggcagaagacatctattttagaatttcttgatctattacccttgtcgagtgaagcaaatgacactgcaaatgaatatgaaattgagaagttagaaaatacatctagaatctcagagttacttggtatatttgaatctgaaaagacttattcgaggaatgtactagcaatggctctgaagaaacagactgacagagcagctgctggcagtcctgtgcagcctgctccaaaaccaagcctcagcagaggccttatggtaaaggggggaagttcaatcatctctcctgatacaaatctcttaaacattaaaggaagccattcaaagagcaaaaatttacactttttcttttctaacaccgtgaaaatcactgcattttccaagaaaaatgagaacattttcaattgtgatttaatagattctgtagatcaaattaaaaatatgccatgcttggatttaagggaatttggaaaggatgttaaaccttggcatgttgaaacaacagaagctgcccgcaataatgaaaacacaggttttgatgctctgagccatgaatgtacagctaagcctttgtttcccagagtggaggtgcagtcagaacaactcacggtggaagagcagattaaaagaaacaggtgctacagtgacactgagtaaaatatctatggccactgacagtccacacttaggcactgagagatattgatgttctgaaataagattttatgaatttggatacccttttgaggaacttgatgtaaacatggtgttcagaaatctcgtgtctatctcaatgggatatttcttgtattacaccttgtcatttttttcacaatttatttacatctacttttgtttgaactggaatgaagagatgaaacactatggatatgttttccattcaaatggcactttagcatattgttctgttttcctgtaaaacatcatgggtgtgatttttatactgctgctgcttgtcacaattattataacttctctgtaatttcctctgaaataaaattgaatcacctgaggtgcaaacc

SEQ ID NO: 34567 - DNA, 2890 bp, Homo sapiens
  source 1..2890: mol_type = unassigned DNA
atacagagctcagttcctaaaaataggtgccaagttgcatcctttagacgctctgctaaaataaattcagccgtcccatctacttgcttgatagacccttcagtggagcgggcctccactgcacccattgctttcaggggactgggaaattggctgtacatgaaacaagggaggaagctagtctgtgaagaactataaagatatatgatatttccacaaacttggggttaaacctaaatatcataaaagcgactgctggccctaataagcctgagagtggatttgcagaagacagtgctgctcggggcgagggtgtgtcagacctccacgaagtggtctccctgaaggagcggatggcgaggtaccaggcagctgtttccaggggtgactgccgcagcttctctgctaatatgatggaagaatcagaaatgtgcgcagtgcctggtggtttggccaaggtgaagaaacaatttgaggacgaaattacttcttcccgtaatacctttgctcaataccaatatcaacatcagaacagatctgagcaggaggcaattcatagcagccaggttggcacttcaagaagcagccaggaaatggcaagaaatgaacaagaagggtccaaagtacagaaaattgatgttcatggaacagaaatggtctctcatcttgaaaagcacaccgaggaagtaaaccaagcatctcagtttcatcaatatgttcaagaaactgtcattgatacacctgaggatgaagagattccaaaggtttcgactaagttgttaaaagagcagtttgaaaagtctgcccaggaaaagatcctttattctgacaaagagatgacaaccccagccaagcagattaagaagctgctgctccaagacaaggaaatatgtatactttgtcaaaagacagtttatccaatggagtgcctagtggcagacaagcagaattttcataagtcctgcttccgatgccaccattgcaacagtaaactaagtttgggaaattatgcatcacttcatggacaaatatactgtaaacctcactttaaacaacttttcaaatccaaaggaaattatgatgaaggttttggacataagcagcataaagatagatggaactgcaaaaaccaaagcagatcagtggactttattcctaatgaagaaccaaatatgtgtaaaaatattgcagaaaacacccttgtacctggagatcgtaatgaacatttagatgctggtaacagtgaagggcaaaggaatgatttgagaaaattaggggaaaggggaaaattaaaagtcatttggcctccttccaaggagatccctaagaaaaccttaccctttgaggaagagctcaaaatgagtaaacctaagtggccacctgaaatgacaaccctgctatcccctgaatttaaaagtgaatctctgctagaagatgttagaactccagaaaataaaggacaaagacaagatcactttccatttttgcagccttatctacagtccacccatgtttgtcagaaagaggatgttataggaatcaaagaaatgaaaatgcctgaaggaagaaaagatgaaaagaaggaaggaaggaagaatgtgcaagataggccgagtgaagctgaagacacaaagagtaacaggaaaagtgctatggatcttaatgacaacaataatgtgattgtgcagagtgctgaaaaggagaaaaatgaaaaaactaaccaaactaatggtgcagaagttttacaggttactaacactgatgatgagatgatgccagaaaatcataaagaaaatttgaataagaataataataacaattatgtagcagtctcatatctgaataattgcaggcagaagacatctattttagaatttcttgatctattacccttgtcgagtgaagcaaatgacactgcaaatgaatatgaaattgagaagttagaaaatacatctagaatctcagagttacttggtatatttgaatctgaaaagacttattcgaggaatgtactagcaatggctctgaagaaacagactgacagagcagctgctggcagtcctgtgcagcctgctccaaaaccaagcctcagcagaggccttatggtaaaggggggaagttcaatcatctctcctgatacaaatctcttaaacattaaaggaagccattcaaagagcaaaaatttacactttttcttttctaacaccgtgaaaatcactgcattttccaagaaaaatgagaacattttcaattgtgatttaatagattctgtagatcaaattaaaaatatgccatgcttggatttaagggaatttggaaaggatgttaaaccttggcatgttgaaacaacagaagctgcccgcaataatgaaaacacaggttttgatgctctgagccatgaatgtacagctaagcctttgtttcccagagtggaggtgcagtcagaacaactcacggtggaagagcagattaaaagaaacaggtgctacagtgacactgagtaaaatatctatggccactgacagtccacacttaggcactgagagatattgatgttctgaaataagattttatgaatttggatacccttttgaggaacttgatgtaaacatggtgttcagaaatctcgtgtctatctcaatgggatatttcttgtattacaccttgtcatttttttcacaatttatttacatctacttttgtttgaactggaatgaagagatgaaacactatggatatgttttccattcaaatggcactttagcatattgttctgttttcctgtaaaacatcatgggtgtgatttttatactgctgctgcttgtcacaattattataacttctctgtaatttcctctgaaataaaattgaatcacctgaggtgcaaacc

SEQ ID NO: 34568 - DNA, 3221 bp, Homo sapiens
  source 1..3221: mol_type = unassigned DNA
gacaacctggacccatccatgttcccaatgcagaagggctccctcaacctcctgaggcagaaatgggaatcttgtgattatcagagaagtgagtgtcatcccagggacagccattgtacaattttccagcctcaggaaagcaaattgcttgcgcctgaaggagaggtagtatcagcacctcaatctttggatcccacaagtctgccctacagtacaggggaagagatgtggagttcgaagccggaagagaaggattctgtggacaagagtaacaacaccagggaatatggtcggccagaagtgctgaaggaggattccctgagcagtcggcgcaggattgaacgcttttccattgcccttgatgagctgaggagtgtgtttgaggctcctaagagtggaaacaaaccagctgagtacggtggaaaggaagtggaaattgagcgaagtttgtgctcgccagcttttaagagtcaccctgggagccagctggaggattctgtgaaagattcagacaagaaaggcaaggaaacatcttttgacaagatgtcacctgaaagtggtcacagccgcatctttgaagcgactgctggccctaataagcctgagagtggatttgcagaagacagtgctgctcggggcgagggtgtgtcagacctccacgaagtggtctccctgaaggagcggatggcgaggtaccaggcagctgtttccaggggtgactgccgcagcttctctgctaatatgatggaagaatcagaaatgtgcgcagtgcctggtggtttggccaaggtgaagaaacaatttgaggacgaaattacttcttcccgtaatacctttgctcaataccaatatcaacatcagaacagatctgagcaggaggcaattcatagcagccaggttggcacttcaagaagcagccaggaaatggcaagaaatgaacaagaagggtccaaagtacagaaaattgatgttcatggaacagaaatggtctctcatcttgaaaagcacaccgaggaagtaaaccaagcatctcagtttcatcaatatgttcaagaaactgtcattgatacacctgaggatgaagagattccaaaggtttcgactaagttgttaaaagagcagtttgaaaagtctgcccaggaaaagatcctttattctgacaaagagatgacaaccccagccaagcagattaagaagctgctgctccaagacaaggaaatatgtatactttgtcaaaagacagtttatccaatggagtgcctagtggcagacaagcagaattttcataagtcctgcttccgatgccaccattgcaacagtaaactaagtttgggaaattatgcatcacttcatggacaaatatactgtaaacctcactttaaacaacttttcaaatccaaaggaaattatgatgaaggttttggacataagcagcataaagatagatggaactgcaaaaaccaaagcagatcagtggactttattcctaatgaagaaccaaatatgtgtaaaaatattgcagaaaacacccttgtacctggagatcgtaatgaacatttagatgctggtaacagtgaagggcaaaggaatgatttgagaaaattaggggaaaggggaaaattaaaagtcatttggcctccttccaaggagatccctaagaaaaccttaccctttgaggaagagctcaaaatgagtaaacctaagtggccacctgaaatgacaaccctgctatcccctgaatttaaaagtgaatctctgctagaagatgttagaactccagaaaataaaggacaaagacaagatcactttccatttttgcagccttatctacagtccacccatgtttgtcagaaagaggatgttataggaatcaaagaaatgaaaatgcctgaaggaagaaaagatgaaaagaaggaaggaaggaagaatgtgcaagataggccgagtgaagctgaagacacaaagagtaacaggaaaagtgctatggatcttaatgacaacaataatgtgattgtgcagagtgctgaaaaggagaaaaatgaaaaaactaaccaaactaatggtgcagaagttttacaggttactaacactgatgatgagatgatgccagaaaatcataaagaaaatttgaataagaataataataacaattatgtagcagtctcatatctgaataattgcaggcagaagacatctattttagaatttcttgatctattacccttgtcgagtgaagcaaatgacactgcaaatgaatatgaaattgagaagttagaaaatacatctagaatctcagagttacttggtatatttgaatctgaaaagacttattcgaggaatgtactagcaatggctctgaagaaacagactgacagagcagctgctggcagtcctgtgcagcctgctccaaaaccaagcctcagcagaggccttatggtaaaggggggaagttcaatcatctctcctgatacaaatctcttaaacattaaaggaagccattcaaagagcaaaaatttacactttttcttttctaacaccgtgaaaatcactgcattttccaagaaaaatgagaacattttcaattgtgatttaatagattctgtagatcaaattaaaaatatgccatgcttggatttaagggaatttggaaaggatgttaaaccttggcatgttgaaacaacagaagctgcccgcaataatgaaaacacaggttttgatgctctgagccatgaatgtacagctaagcctttgtttcccagagtggaggtgcagtcagaacaactcacggtggaagagcagattaaaagaaacaggtgctacagtgacactgagtaaaatatctatggccactgacagtccacacttaggcactgagagatattgatgttctgaaataagattttatgaatttggatacccttttgaggaacttgatgtaaacatggtgttcagaaatctcgtgtctatctcaatgggatatttcttgtattacaccttgtcatttttttcacaatttatttacatctacttttgtttgaactggaatgaagagatgaaacactatggatatgttttccattcaaatggcactttagcatattgttctgttttcctgtaaaacatcatgggtgtgatttttatactgctgctgcttgtcacaattattataacttctctgtaatttcctctgaaataaaattgaatcacctgaggtgcaaacc

SEQ ID NO: 34569 - DNA, 5246 bp, Homo sapiens
  source 1..5246: mol_type = unassigned DNA
caagcatataaaagataataagaacgatttttcccccaaagttgaactggcaacctccctgtcagatatggaatgtaaaattactacctcaaaggatcagaaaaaagtaatggtgatgaccagcagtgaacacacggagacaaagcagaacgttattagtaagagtcttgatgaaagaaaacaattatctattgactctgcaaactgtctctcacacacagttccaggaacttcagcacccaggaaaaaacagattgcgcctcttataaaatctcattcatttccagagagttcaggacaacaaaatccaaaaccttatatgagaaaatttaagacacctttaatgattgctgaagaaaaatatagacaacaatgttaaaactcaaagccaaaatcaacacataacagaggtggaaaaggaaatgccattacaaaaaaccaatgaggaggtttccctatctggaattgattcagaatgcactgtggttcaacccagcccaggctctcaaagtaatgctcggatactaggagtgtgttctgataaccaactctccacaacatcgccagaaacagtcgctgccaagaggctccaccatgttttagcagcttcagaagacaaagataagatgaaaaaggaagttttacaaagctcaagggacattatgcaatccaaatcagcttgcgaaattaaacaaagtcaccaagaatgtagtacccaacaaacacaacagaagaagtatttggagcagttgcacttgccccaaagcaaaccaatttccccaaatttcaaagttaaaaccatcaaacttccaactctagatcatacattaaatgaaacagaccacagctatgaaagtcataaacagcaatctgagattgatgttcaaacctttaccaaaaaacaatatctgaaaaccaagaaaactgaagcaagcactgaatgtagtcataagcaatctctggctgaaagacattatcagttacctaagaaggagaaaagagtgacagtacaattgcctacagaatccatacagaagaaccaggaagataagctcaagatggttcccaggaagcaaagagaatttagcggatctgacagagggaaacttccaggaagtgaagaaaaaaatcagggaccatcaatgattggtcgaaaagaagagagattaataactgaaagaaaacacgaacatctgaagaataaatcagcaccaaaggtcgtcaagcaaaaggttatcgatgcacatcttgattcacagactcagaattttcagcaaacacaaatacagaccgctgaaagtaaagctgaacataaaaaattgccccagccatataatagtctgcaggaagaaaaatgtctcgaagtcaagggcatacaagagaaacaagtcttctctaatactaaagattcaaagcaagagattacacagaacaaatctttcttttcctctgtgaaagaatcccagcgggatgatggaaaaggtgccttaaatatagtggaattcttgagaaaacgtgaagaactgcaacagattttgtcgagagtgaaacagtttgaagcagagccaaataaaagtggccttaaaacatttcagacactattaaatactatcccaggatggctgataagtgaagataagagagaatatgcagttcacattgccatggagaataatttagaaaaagtaaaagaagaaataacacatattaaaactcaagcggaagatatgcttgtgtcctatgaaaatataattcagacagccatgatgtcctccaaaacaggaaaaccgggaaataaacccactagtcttgatgaaacatcatccaaagtatctaatgttcatgtcagcaataataaaaatagtgaacagaaagaaaataaaattgccaaagagaaaacagtacagcaccaagtagcagctcatcatgaagcaactgttcgtagtcacgtgaaaacccatcaggaaattaaacttgatgatagcaacattcctcctccctctttaaaaacacgcccaccgtcaccaacttttatcacaatagaatctactgcccgacgaacagaaaaccctactaagaacgagctttctcagtcccctaaaaaggacagttatgttgaacccccaccaagaaggcccatgtcgcaaaaatctgaaattcacagagcaaacacttccccttctccacccaggagtcgctctgaacaacttgtcagactcaaagacaccactgcaaagttatccaaaggggccatcccatgtccagcagcaaccccggttccaattgtagagaagaggtctgaaatcatcatgtctcctgcaacacttcgtcgtcaaattaagatagaaactcgtggtagggactctccacctacaatcacaataccagtaaatataaatcatgctgctagtggttccttcagagaatctgtggacgctcaagaggaaatcaggaaagtggagaagagagctacttatgttcataaagatggactaaattccactgatcacatggtgcccgacactgaaagttatgatgcagttgaaatcatccgcaaggttgcagtgcctcctcgcctgtcagagcacacacagagatatgaagcggccaaccgaactgttcaaatggctgaaaatttcgtgaatgaccctgaaaatgaaataaacagatggttcagggaatttgagcatggcccagtttctgaagcaaagtcaaatagaagagtttatgcaaagggagaaacaaaccataacatacaacaagaaagtcgtacattttgtaaggaggaatttggattaacatctttaggaaacacgagttttacagacttttcttgcaaacatcctagagaactgcgagaaaagattcctgttaagcagcccaggatctgctctgaaaccaggtctctaagtgaacatttctcaggcatggatgcatttgagagtcaaattgttgagtcgaagatgaaaacctcttcatcacatagctcagaagctggcaaatctggctgtgacttcaagcatgccccaccaacctatgaggatgtcattgctggacatattttagatatctctgattcacctaaagaagtaagaaaaaattttcaaaagacgtggcaagagagtggaagagtttttaaaggcctgggatatgcaaccgcagatgcttctgcaactgagatgagaaccaccttccaagaggaatctgcatttataagtgaagctgctgctccaagacaaggaaatatgtatactttgtcaaaagacagtttatccaatggagtgcctagtggcagacaagcagaattttcataagtcctgcttccgatgccaccattgcaacagtaaactaagtttgggaaattatgcatcacttcatggacaaatatactgtaaacctcactttaaacaacttttcaaatccaaaggaaattatgatgaaggttttggacataagcagcataaagatagatggaactgcaaaaaccaaagcagatcagtggactttattcctaatgaagaaccaaatatgtgtaaaaatattgcagaaaacacccttgtacctggagatcgtaatgaacatttagatgctggtaacagtgaagggcaaaggaatgatttgagaaaattaggggaaaggggaaaattaaaagtcatttggcctccttccaaggagatccctaagaaaaccttaccctttgaggaagagctcaaaatgagtaaacctaagtggccacctgaaatgacaaccctgctatcccctgaatttaaaagtgaatctctgctagaagatgttagaactccagaaaataaaggacaaagacaagatcactttccatttttgcagccttatctacagtccacccatgtttgtcagaaagaggatgttataggaatcaaagaaatgaaaatgcctgaaggaagaaaagatgaaaagaaggaaggaaggaagaatgtgcaagataggccgagtgaagctgaagacacaaagagtaacaggaaaagtgctatggatcttaatgacaacaataatgtgattgtgcagagtgctgaaaaggagaaaaatgaaaaaactaaccaaactaatggtgcagaagttttacaggttactaacactgatgatgagatgatgccagaaaatcataaagaaaatttgaataagaataataataacaattatgtagcagtctcatatctgaataattgcaggcagaagacatctattttagaatttcttgatctattacccttgtcgagtgaagcaaatgacactgcaaatgaatatgaaattgagaagttagaaaatacatctagaatctcagagttacttggtatatttgaatctgaaaagacttattcgaggaatgtactagcaatggctctgaagaaacagactgacagagcagctgctggcagtcctgtgcagcctgctccaaaaccaagcctcagcagaggccttatggtaaaggggggaagttcaatcatctctcctgatacaaatctcttaaacattaaaggaagccattcaaagagcaaaaatttacactttttcttttctaacaccgtgaaaatcactgcattttccaagaaaaatgagaacattttcaattgtgatttaatagattctgtagatcaaattaaaaatatgccatgcttggatttaagggaatttggaaaggatgttaaaccttggcatgttgaaacaacagaagctgcccgcaataatgaaaacacaggttttgatgctctgagccatgaatgtacagctaagcctttgtttcccagagtggaggtgcagtcagaacaactcacggtggaagagcagattaaaagaaacaggtgctacagtgacactgagtaaaatatctatggccactgacagtccacacttaggcactgagagatattgatgttctgaaataagattttatgaatttggatacccttttgaggaacttgatgtaaacatggtgttcagaaatctcgtgtctatctcaatgggatatttcttgtattacaccttgtcatttttttcacaatttatttacatctacttttgtttgaactggaatgaagagatgaaacactatggatatgttttccattcaaatggcactttagcatattgttctgttttcctgtaaaacatcatgggtgtgatttttatactgctgctgcttgtcacaattattataacttctctgtaatttcctctgaaataaaattgaatcacctgaggtgcaaacc

SEQ ID NO: 34570 - DNA, 2916 bp, Homo sapiens
  source 1..2916: mol_type = unassigned DNA
atgttcccaatgcagaagggctccctcaacctcctgaggcagaaatgggaatcttgtgattatcagagaagtgagtgtcatcccagggacagccattgtacaattttccagcctcaggaaagcaaattgcttgcgcctgaaggagaggtagtatcagcacctcaatctttggatcccacaagtctgccctacagtacaggggaagagatgtggagttcgaagccggaagagaaggattctgtggacaagagtaacaacaccagggaatatggtcggccagaagtgctgaaggaggattccctgagcagtcggcgcaggattgaacgcttttccattgcccttgatgagctgaggagtgtgtttgaggctcctaagagtggaaacaaaccagctgagtacggtggaaaggaagtggaaattgagcgaagtttgtgctcgccagcttttaagagtcaccctgggagccagctggaggattctgtgaaagattcagacaagaaaggcaaggaaacatcttttgacaagatgtcacctgaaagtggtcacagccgcatctttgaagcagtgttctccacggaccaagcccagattctcaggctccacctgcatccaaaattgacaaagacccccaagaacagcctcaaatcctcaacttatatttcgactgctggccctaataagcctgagagtggatttgcagaagacagtgctgctcggggcgagggtgtgtcagacctccacgaagtggtctccctgaaggagcggatggcgaggtaccaggcagctgtttccaggggtgactgccgcagcttctctgctaatatgatggaagaatcagaaatgtgcgcagtgcctggtggtttggccaaggtgaagaaacaatttgaggacgaaattacttcttcccgtaatacctttgctcaataccaatatcaacatcagaacagatctgagcaggaggcaattcatagcagccaggttggcacttcaagaagcagccaggaaatggcaagaaatgaacaagaagggtccaaagtacagaaaattgatgttcatggaacagaaatggtctctcatcttgaaaagcacaccgaggaagtaaaccaagcatctcagtttcatcaatatgttcaagaaactgtcattgatacacctgaggatgaagagattccaaaggtttcgactaagttgttaaaagagcagtttgaaaagtctgcccaggaaaagatcctttattctgacaaagagatgacaaccccagccaagcagattaagaagctgctgctccaagacaaggaaatatgtatactttgtcaaaagacagtttatccaatggagtgcctagtggcagacaagcagaattttcataagtcctgcttccgatgccaccattgcaacagtaaactaagtttgggaaattatgcatcacttcatggacaaatatactgtaaacctcactttaaacaacttttcaaatccaaaggaaattatgatgaaggttttggacataagcagcataaagatagatggaactgcaaaaaccaaagcagatcagtggactttattcctaatgaagaaccaaatatgtgtaaaaatattgcagaaaacacccttgtacctggagatcgtaatgaacatttagatgctggtaacagtgaagggcaaaggaatgatttgagaaaattaggggaaaggggaaaattaaaagtcatttggcctccttccaaggagatccctaagaaaaccttaccctttgaggaagagctcaaaatgagtaaacctaagtggccacctgaaatgacaaccctgctatcccctgaatttaaaagtgaatctctgctagaagatgttagaactccagaaaataaaggacaaagacaagatcactttccatttttgcagccttatctacagtccacccatgtttgtcagaaagaggatgttataggaatcaaagaaatgaaaatgcctgaaggaagaaaagatgaaaagaaggaaggaaggaagaatgtgcaagataggccgagtgaagctgaagacacaaagagtaacaggaaaagtgctatggatcttaatgacaacaataatgtgattgtgcagagtgctgaaaaggagaaaaatgaaaaaactaaccaaactaatggtgcagaagttttacaggttactaacactgatgatgagatgatgccagaaaatcataaagaaaatttgaataagaataataataacaattatgtagcagtctcatatctgaataattgcaggcagaagacatctattttagaatttcttgatctattacccttgtcgagtgaagcaaatgacactgcaaatgaatatgaaattgagaagttagaaaatacatctagaatctcagagttacttggtatatttgaatctgaaaagacttattcgaggaatgtactagcaatggctctgaagaaacagactgacagagcagctgctggcagtcctgtgcagcctgctccaaaaccaagcctcagcagaggccttatggtaaaggggggaagttcaatcatctctcctgatacaaatctcttaaacattaaaggaagccattcaaagagcaaaaatttacactttttcttttctaacaccgtgaaaatcactgcattttccaagaaaaatgagaacattttcaattgtgatttaatagattctgtagatcaaattaaaaatatgccatgcttggatttaagggaatttggaaaggatgttaaaccttggcatgttgaaacaacagaagctgcccgcaataatgaaaacacaggttttgatgctctgagccatgaatgtacagctaagcctttgtttcccagagtggaggtgcagtcagaacaactcacggtggaagagcagattaaaagaaacaggtgctacagtgacactgagtaa

SEQ ID NO: 34571 - DNA, 3391 bp, Homo sapiens
  source 1..3391: mol_type = unassigned DNA
ggagaaatctggcaggtctctaggcagacaaaagggaacatctggtagggactgggacatgtagaaaaaaggacaacctggacccatccatgttcccaatgcagaagggctccctcaacctcctgaggcagaaatgggaatcttgtgattatcagagaagtgagtgtcatcccagggacagccattgtacaattttccagcctcaggaaagcaaattgcttgcgcctgaaggagaggtagtatcagcacctcaatctttggatcccacaagtctgccctacagtacaggggaagagatgtggagttcgaagccggaagagaaggattctgtggacaagagtaacaacaccagggaatatggtcggccagaagtgctgaaggaggattccctgagcagtcggcgcaggattgaacgcttttccattgcccttgatgagctgaggagtgtgtttgaggctcctaagagtggaaacaaaccagctgagtacggtggaaaggaagtggaaattgagcgaagtttgtgctcgccagcttttaagagtcaccctgggagccagctggaggattctgtgaaagattcagacaagaaaggcaaggaaacatcttttgacaagatgtcacctgaaagtggtcacagccgcatctttgaagcagtgttctccacggaccaagcccagattctcaggctccacctgcatccaaaattgacaaagacccccaagaacagcctcaaatcctcaacttatatttcgactgctggccctaataagcctgagagtggatttgcagaagacagtgctgctcggggcgagggtgtgtcagacctccacgaagtggtctccctgaaggagcggatggcgaggtaccaggcagctgtttccaggggtgactgccgcagcttctctgctaatatgatggaagaatcagaaatgtgcgcagtgcctggtggtttggccaaggtgaagaaacaatttgaggacgaaattacttcttcccgtaatacctttgctcaataccaatatcaacatcagaacagatctgagcaggaggcaattcatagcagccaggttggcacttcaagaagcagccaggaaatggcaagaaatgaacaagaagggtccaaagtacagaaaattgatgttcatggaacagaaatggtctctcatcttgaaaagcacaccgaggaagtaaaccaagcatctcagtttcatcaatatgttcaagaaactgtcattgatacacctgaggatgaagagattccaaaggtttcgactaagttgttaaaagagcagtttgaaaagtctgcccaggaaaagatcctttattctgacaaagagatgacaaccccagccaagcagattaagaagctgctgctccaagacaaggaaatatgtatactttgtcaaaagacagtttatccaatggagtgcctagtggcagacaagcagaattttcataagtcctgcttccgatgccaccattgcaacagtaaactaagtttgggaaattatgcatcacttcatggacaaatatactgtaaacctcactttaaacaacttttcaaatccaaaggaaattatgatgaaggttttggacataagcagcataaagatagatggaactgcaaaaaccaaagcagatcagtggactttattcctaatgaagaaccaaatatgtgtaaaaatattgcagaaaacacccttgtacctggagatcgtaatgaacatttagatgctggtaacagtgaagggcaaaggaatgatttgagaaaattaggggaaaggggaaaattaaaagtcatttggcctccttccaaggagatccctaagaaaaccttaccctttgaggaagagctcaaaatgagtaaacctaagtggccacctgaaatgacaaccctgctatcccctgaatttaaaagtgaatctctgctagaagatgttagaactccagaaaataaaggacaaagacaagatcactttccatttttgcagccttatctacagtccacccatgtttgtcagaaagaggatgttataggaatcaaagaaatgaaaatgcctgaaggaagaaaagatgaaaagaaggaaggaaggaagaatgtgcaagataggccgagtgaagctgaagacacaaagagtaacaggaaaagtgctatggatcttaatgacaacaataatgtgattgtgcagagtgctgaaaaggagaaaaatgaaaaaactaaccaaactaatggtgcagaagttttacaggttactaacactgatgatgagatgatgccagaaaatcataaagaaaatttgaataagaataataataacaattatgtagcagtctcatatctgaataattgcaggcagaagacatctattttagaatttcttgatctattacccttgtcgagtgaagcaaatgacactgcaaatgaatatgaaattgagaagttagaaaatacatctagaatctcagagttacttggtatatttgaatctgaaaagacttattcgaggaatgtactagcaatggctctgaagaaacagactgacagagcagctgctggcagtcctgtgcagcctgctccaaaaccaagcctcagcagaggccttatggtaaaggggggaagttcaatcatctctcctgatacaaatctcttaaacattaaaggaagccattcaaagagcaaaaatttacactttttcttttctaacaccgtgaaaatcactgcattttccaagaaaaatgagaacattttcaattgtgatttaatagattctgtagatcaaattaaaaatatgccatgcttggatttaagggaatttggaaaggatgttaaaccttggcatgttgaaacaacagaagctgcccgcaataatgaaaacacaggttttgatgctctgagccatgaatgtacagctaagcctttgtttcccagagtggaggtgcagtcagaacaactcacggtggaagagcagattaaaagaaacaggtgctacagtgacactgagtaaaatatctatggccactgacagtccacacttaggcactgagagatattgatgttctgaaataagattttatgaatttggatacccttttgaggaacttgatgtaaacatggtgttcagaaatctcgtgtctatctcaatgggatatttcttgtattacaccttgtcatttttttcacaatttatttacatctacttttgtttgaactggaatgaagagatgaaacactatggatatgttttccattcaaatggcactttagcatattgttctgttttcctgtaaaacatcatgggtgtgatttttatactgctgctgcttgtcacaattattataacttctctgtaatttcctctgaaataaaattgaatcacctgaggtgcaaacc

SEQ ID NO: 34572 - DNA, 1690 bp, Homo sapiens
  source 1..1690: mol_type = unassigned DNA
cttttgaaattctaaattctgatgcagaacgtatcagtgaaactccctcccactgtctcttgtattagcatcaaggaagcgagaaaaaataagcaccctgagaatggagacagtgtttgaagagatggatgaagaaagcacaggaggagtttcatcttcgaaagaagaaatagtccttggccagagactccatctaagctttccttttagcattatcttctcaactgttctctactgtggtgaggttgcctttggtttatacatgtttgaaatttatcgaaaagctaatgacacattctggatgtcatttaccatcagctttattattgtgggggcaattttggatcaaattatcctgatgtttttcaacaaagacttgaggagaaataaggctgcattacttttttggcacattcttcttttaggacctattgtgaggtgtttgcacaccattagaaattaccacaaatggttgaaaaatcttaaacaggagaaggaagagactcaagttagcatcacaaagagaaacacgatgctggaaagggagattgcattctcaatccgggataatttcatgcagcagaaggctttcaagtacatgtcagtgattcaggcttttctcggttctgttccacaattaattttgcagatgtatatcagtctcactatacgagaatggcctttgaatagagcattgctgatgacattttccctgttatcagttacttatggggccattcgctgcaatatactggccatccagatcagcaatgatgatactaccattaagctaccgccgatagaattcttctgtgtcgtgatgtggcgttttttggaggttatctcacgtgtagtgactctggcatttttcattgcatctctgaaactgaagagcctacccgttttgttaatcatatattttgtatcattgttggcaccgtggctggagttttggaaaagtggagctcatcttcctggcaacaaagaaaataattccaatatggtgggtacagtactgatgcttttcttgatcacactgctatatgctgccatcaacttctcctgctggtcagcagtgaaactgcagttgtcagatgacaaaataattgacgggagacagaggtggggccatagaatcctacactacagctttcagtttttagaaaatgtgataatgatattggtatttaggttctttggagggaaaactttgctgaattgttgtgactcattaattgccgtgcagctcatcataagctacctattggccactggctttatgctcctcttctatcagtatttgtacccatggcagtcaggcaaagtgttgccaggacgtactgaaaatcagccagaagcaccgtactattatgtaaacatcgagaaaactgaaaagaataaaaataagcagctgaggaattactgtcactcctgcaatagggttggatatttttcaatcagaaaaagtatgacatgttcataaaatatacatatatactttcacagaacaatgagtaaagatgctgaatgtgacttgttaagaggctcttaaatttaaaaaatatacacagcaaaatcttggaagtggtttctaataaaattcatttatgttctcctgtgaacgtgccttagtaatttttgttttcttaactataattatacaattcattaaataaaacaaaataaaaaa

SEQ ID NO: 34573 - DNA, 2851 bp, Homo sapiens
  source 1..2851: mol_type = unassigned DNA
ctgagagcgcgcaggtgagcgggccagctgatagctacagcctagcaatagctaggatacctaggcactgaactgaatcccctcttctgccctccttcttctgcgcccgctcttctgccctggctcagctctccgctgacttgagaggacacactggtcaggactctttgtgaggagctgctgagtgtcggtgcccccgacagatcggctacaccctgcctgaggggctgcgaaaggagccgccacggaagccgctgttctcatgactcttcacgtccctggagttggactctggatggggcgctgggatgcttgcttttgtcttgttcaagtttcacagcaagtatgttgacgattggaatcggggccaatcaagagtcaagttcaaagtggtactcctgggctttccatcccagactccaagtcgaatctgagtctagaagagagcggtttcttgctctaactagtgaatctctgttcccaaactggacttgacagagctctcctcacctatacttggactgtagcggccatagggttctcttggggatgggtgggagggtgctatgaacacaagaccacaacattcagaaagaacctcgacaatggacagagtttatgaaattcctgaggagccaaatgtggatccggtttcatctctggaggaagatgtcatccgtggagccaacccccgatttacttttccatttagcatccttttctccacctttttgtactgtggggaggctgcatctgctttgtacatggttagaatctatcgaaagaatagtgaaacttactggatgacatacaccttttctttctttatgttttcatccattatggtccagttgaccctcatttttgtccacagagatctagccaaagataaaccgctatcattatttatgcatctaatcctcttgggacctgttatcagatgtttggaggccatgattaagtacctcacactgtggaagaaagaggagcaggaggagccctatgtcagcctcacccgaaagaagatgctaatagatggcgaggaggtgctgatagaatgggaggtgggccactccatccggaccctggctatgcaccgcaatgcctacaaacgtatgtcacagatccaagccttcctgggctcagtgccccagctgacctatcagctctatgtgagcctgatctctgcagaggttcccctgggtagagttgtgctaatggtattttccctggtatctgtcacctatggggccaccctttgcaatatgttggctatccagatcaagtacgatgactacaagattcgccttgggccactagaagtcctctgcatcaccatctggcggacattggagatcacttcccgcctcctgattctggtgctcttctcagccactttgaaattgaaggctgtgcccttcctagtgctcaacttcctgatcatcctctttgagccctggattaagttctggagaagtggtgcccagatgcccaataacattgagaaaaacttcagccgggtcggcactctggtggtcctgatttcagtcaccatcctctatgctggcatcaacttctcttgctggtcagctttgcagttgaggttggcagacagagatctcgtcgacaaagggcagaactggggacatatgggcctgcactatagtgtgaggttggtagagaatgtgatcatggtcttggtttttaagttctttggagtgaaagtgttactgaattactgtcattccttgattgccttgcagctcattattgcttatctgatttccattggcttcatgctccttttcttccagtacttgcatccattgcgctcactcttcacccataatgtagtagactacctccattgtgtctgctgtcaccagcaccctcggaccagggttgagaactcagagccaccctttgagactgaagcaaggcaaagtgttgtctgattctattttctgggtattttaggaagagttgggagttgccaagagtaaccatgaaattgaacgaaaggatgaggttcatgggtgagatacccatcagtacattttcttgacttttctgttaagcctatcagaagaaagagcaactcccaaataggttttattttcttaagagttaccactatgtttggaaacagggggtatcgactatatagttgaaagggtcagaaataccattcacacccttcttacccaagtcaattggaataacttgtcttcaaacactttaggctctctaaagtgaccttctagctctgctcatttgcttgatgcatttctgagctttcctgggctgagctgaaggcccagaatcccgctagaatatatcctgactgatcagaggatatgacagcttaccagctaagagtacctcccaggaaacagtctgactaatgtggaacctgcaactgtcagtgtggctggggtctttttaattccagtgagaagctctggctgagaagaaaatcaccactattaaaaaagctgctccccaagcagattagctctctgttaggattttactagtggccattcagcaaggacctctctttacagtggcacttcataggcacactctaaggagaaagtgcagagtagaattccttcagggcataagccaaaatgactctttttctcagggacctgcatgggcctccagcttgtctattggaattgttaagtgaagcctctcacttagtgcctcattagcagagatttcctccaacccagcttttctgtgctcttggtattttactacttgatgtggacctcagagaagctgaactgtaattgaaaatgtttccgatgtgtggaagaaatgaagactgctttgtgtctgc

SEQ ID NO: 34574 - DNA, 2848 bp, Homo sapiens
  source 1..2848: mol_type = unassigned DNA
ctgagagcgcgcaggtgagcgggccagctgatagctacagcctagcaatagctaggatacctaggcactgaactgaatcccctcttctgccctccttcttctgcgcccgctcttctgccctggctcagctctccgctgacttgagaggacacactggtcaggactctttgtgaggagctgctgagtgtcggtgcccccgacagatcggctacaccctgcctgaggggctgcgaaaggagccgccacggaagccgctgttctcatgactcttcacgtccctggagttggactctggatggggcgctgggatgcttgcttttgtcttgttcaagtttcacagcaagtatgttgacgattggaatcggggccaatcaagagtcaagttcaaagtggtactcctgggctttccatcccagactccaagtcgaatctgagtctagaagagagcggtttcttgctctaactagtgaatctctgttcccaaactggacttgacagagctctcctcacctatacttggactgtagcggccatagggttctcttggggatgggtgggagggtgctatgaacacaagaccacaacattcagaaagaacctcgacaatggacagagtttatgaaattcctgaggagccaaatgtggatccggtttcatctctggaggaagatgtcatccgtggagccaacccccgatttacttttccatttagcatccttttctccacctttttgtactgtggggaggctgcatctgctttgtacatggttagaatctatcgaaagaatagtgaaacttactggatgacatacaccttttctttctttatgttttcatccattatggtccagttgaccctcatttttgtccacagagatctagccaaagataaaccgctatcattatttatgcatctaatcctcttgggacctgttatcagatgtttggaggccatgattaagtacctcacactgtggaagaaagaggagcaggaggagccctatgtcagcctcacccgaaagaagatgctaatagatggcgaggaggtgctgatagaatgggaggtgggccactccatccggaccctggctatgcaccgcaatgcctacaaacgtatgtcacagatccaagccttcctgggctcagtgccccagctgacctatcagctctatgtgagcctgatctctgcagaggttcccctgggtagagttgtgctaatggtattttccctggtatctgtcacctatggggccaccctttgcaatatgttggctatccagatcaagtacgatgactacaagattcgccttgggccactagaagtcctctgcatcaccatctggcggacattggagatcacttcccgcctcctgattctggtgctcttctcagccactttgaaattgaaggctgtgcccttcctagtgctcaacttcctgatcatcctctttgagccctggattaagttctggagaagtggtgcccagatgcccaataacattgagaaaaacttcagccgggtcggcactctggtggtcctgatttcagtcaccatcctctatgctggcatcaacttctcttgctggtcagctttgcagttgaggttggcagacagagatctcgtcgacaaagggcagaactggggacatatgggcctgcactatagtgtgaggttggtagagaatgtgatcatggtcttggtttttaagttctttggagtgaaagtgttactgaattactgtcattccttgattgccttgcagctcattattgcttatctgatttccattggcttcatgctccttttcttccagtacttgcatccattgcgctcactcttcacccataatgtagtagactacctccattgtgtctgctgtcaccagcaccctcggaccagggttgagaactcagagccaccctttgagactgaagcaaggcaaagtgttgtctgattctattttctgggtattttaggaagagttgggagttgccaagagtaaccatgaaattgaacgaaaggatgaggttcatgggtgagatacccatcagtacattttcttgacttttctgttaagcctatcagaagaaagagcaactcccaaataggttttattttcttaagagttaccactatgtttggaaacagggggtatcgactatatagttgaaagggtcagaaataccattcacacccttcttacccaagtcaattggaataacttgtcttcaaacactttaggctctctaaagtgaccttctagctctgctcatttgcttgatgcatttctgagctttcctgggctgagctgaaggcccagaatcccgctagaatatatcctgactgatcagaggatatgacagcttaccagctaagagtacctcccaggaaacagtctgactaatgtggaacctgcaactgtcagtgtggctggggtctttttaattccagtgagaagctctggctgagaagaaaatcaccactattaaaaaagctgctccccaagcagattagctctctgttaggattttactagtggccattcagcaaggacctctctttacagtggcacttcataggcacactctaaggagaaagtgcagagtagaattccttcagggcataagccaaaatgactctttttctcagggacctgcatgggcctccagcttgtctattggaattgttaagtgaagcctctcacttagtgcctcattagcagagatttcctccaacccagcttttctgtgctcttggtattttactacttgatgtggacctcagagaagctgaactgtaattgaaaatgtttccgatgtgtggaagaaatgaagactgctttgtgtc

SEQ ID NO: 34575 - DNA, 5206 bp, Homo sapiens
  source 1..5206: mol_type = unassigned DNA
ccaggtcggccgcccccaccaggtccagttccagagcccaggccggtcggccgggcccgcgtgccctcggcgggctgcgcagagcgcgggagcggtttggggctgggcatgctgggagcccctcgggcaacggccgccgccgccacagccacacagccgccgccactgcgtccgtccccggtgagcgccgctgacgcgcggagatgaaattcccggcctcggtgctggcgtccgtgttcctgttcgtggccgagacaacggcggcgctcagcctgagcagcacctaccgctcgggcggggaccgcatgtggcaggcgctgacgttgcttttctcgctactgccttgcgcgctcgtgcagctcacgcttctcttcgtacaccgcgacctcagccgcgaccgcccgctcgtactgctgctgcacctgctgcaacttgggccccttttcaggtgttttgaagtcttctgcatctactttcagtcaggcaacaatgaagagccttatgtcagtatcaccaagaagaggcaaatgccaaaaaatggcctctcagaggagattgagaaggaggtgggccaggcagaaggcaaactaatcacccaccgatcagcgttcagccgggcgtcggtgatccaggctttcttgggctcagccccccagctgaccctacagctgtacataagtgtcatgcagcaggacgtcactgttggaagaagtctcctcatgaccatatccctgttgtccattgtgtatggagccttgcgctgcaacatcctagccatcaaaatcaagtacgatgagtatgaagtcaaagtgaagcctctggcctatgtctgtatcttcctgtggaggagctttgagattgccactcgagttgtagtcctggtcctctttacctccgtcctgaagacctgggtggtggttataatactcatcaacttcttcagtttcttcttgtacccctggatcctcttctggtgcagtggttccccattccctgagaacatagagaaggccctcagtagagtgggcaccaccattgtactatgctttctaactttactctatactggtatcaacatgttctgctggtctgctgtacagctgaaaattgacagccctgacctcatcagcaagtcccataattggtaccagctactggtgtattacatgataagattcatcgagaatgccatcctcctcctcctgtggtatcttttcaagactgacatctatatgtatgtgtgcgcacctctgttggtcctgcagctgctcattgggtactgcacagccattctcttcatgcttgtattctatcagttcttccacccttgcaaaaagctcttttcttccagtgtttctgaaggctttcagaggtggctcaggtgtttttgctgggcctgcaggcagcaaaaaccctgtgagccgataggaaaggaagatctacagtcatccagagatagagatgagacaccttctagcagtaaaacaagtcctgagcctggtcagttcttgaatgctgaagatctctgctctgcttaatgggacccaaggtctcagagcacaggcatattattttctgggtttgatactcgttattcatacaaataatgagccctacacagggaacaaggcaggaagttagctgttaactccttgtgagctgcttctctttatagagctcttgggtatgtagaactgtatgggaagaagccaggaaaacctctgagtgttgaaggggcaacccaaggcatcacagttcacaggtaaccatgttgtgttcttctaggcattactggccttttcactgacaagttacccctgaaatctgagttgtactggttagattcattaggttgaatgaggagaggggcttacctgttctctagttttccagactgctggtttgggtaacctgaagttttatgatccctgaacatagttttcacccaagagctgtcctggtgaccaaaaaagattactagggttttgccatcagcaacatcattcctgtcagagctttcagggagggctgttcaagtttggtttttgaatagacagaggtttcattttcatctcattagggcttttttgtacatagccaactgtagccaccctggcatgctgtctctaattgattcaagggcctagatttggagactttgttccttagcatccatggatgcagaaatgagtgataaatttggccatgaaagccctggaattttaggaaagttgtgattctttgatatgttgatgaaattctggatcaggaggggtgttaaaacatcaaaatgatggcgacttgtataagtagaattcttaccatcttactcctgcctccccattccttgcctgtcaggaccattttagaagagttaccttggttaacttaagggttttttagaaaaccccacagaaatctctcacccagttcaggtgtatagggaattttcattttcattatttcaaggaatagagttttcctcactaccacttgtaattagagattgacttcagaaactttttctaaattataaagacggaatgaccagaaaatttttgtctttcatggaatgcaatttgacttggcataattgtgagttaatttgataaagatctccagttgtatcctctgacaccctttaatgttctatataatttttcctttaatcggagaccctatttgtttcattaaagaggattgggtagcatatcctcaattatcttggaaaaatgcgtagatctagtgccattatttctaccattaaaatcttgaaagcgaaatacttgaaaagaggtgaccataaagatcacaccaatttagaatgaatattaaagtctgagaaatttacaaaagggactctatggactcgattttaccatatggaatagggatccacttctctgttaacctacaaaacgtatttatctggccattgcacttcggataattttcatttttaattcctcttggtgtcaaatttttaagtaatttcatgcacacaggagaaaatgcaatttgataatcagtttccactacattcggaggtcaagaaagcagtatatattctttcacaaggcatccatactgtttaatatttatagagttcatagaaatacatcaataagctcctaaattatagagcctcaattttggtttttctcatttgaaatgtttttgatttatcaatatttgtggtttaactttgtgggggtgtccaggcagtagatcattttttgtctatttttaaccaaataagaataacactcaagactatgttctccatcccaacacatcacttaccacttgcactattcttaataggcctaaaatagtgagcatatataatcaaaataatacttcatacaacatatacttccatgcactcttcatgtaatcacatatgtgcatagatacacaatcgtattacataaaacacccttgaaaatatatgactttgaataaaataaagctaccatgttaatacatcattttttgtttcttcctaattaacaaaagggctctataatgattaggagagctgtaaggccattctttagtcattccaagtgtatatttgtatcacaccagttacttgtgttcattgacaccaaatattttcaagctttttgtgagaaagagattcttgccttgaggctctgcagtggcaaatggtaggggcaatagcgctcccttttcacctgaaatgccttcagctcaggccttgggagtgaggtgtgggagtagccaccagcctcccactgactaggcatgttaggaattagacaaggatggagagactggttttttccagccttggtttggaagcttgtctcaaaaaccattacaaaatcttaaccttcaaatacattctaaatcactttaatttagaagataggtgagcaacttgagtgatcccaaaccaaactaacagtgctggtttgtccgacacccaaagcccacttcacacatttataaggacagagatttggtaactcatttgggtattttgtcagttttaacccttaatatacaggtatcccagctttgggcacatgtatgtccattcactttcaggaaggggtgtcagtactttctttctgtgtggtgaaaacataagccatggtgaactgataatttttgtttttaaattatttatattactgaattggcaaaattacagttcacactgcagagctaggttgtcctattggcataaaacaaaccagcaacttttctcatgtgtttggagttaaaatgtgtttttcagttataatttcaatttttaaatttcttggtgctttgtctaattaattacatcccataacttgtcaggatagttgctccaactgaattgctatcatttggctggatgggggtgaagtatgtcttcaaaatatattgaagtaagttcatcaaacatgtttagacttcctctcattgctggagacagcccagtgtagagattggcacttccctgtccagcactacaacttaattgctctatgcctcagtttccccataatacccttttccaacctacctcacaaggttatcagaaagatcaaattaaataatagatgtgaaaatgctttgaaaatgtttttaagtgctatgcatatttatagagttattatagttattcaaatccataagcaggttatttttatttttttactgtttgaaaagaaataagtagtgtcattcatatgagttcctgagtggatatgcgaatctttggtcttctcgacaggtgccctttctcttaccactagttgcttacaaaaatagcacccaaacacatggcacttggaagaaaaagacccactgaatctgagaaagtactttctggtggcaaatgaatttatcattttagtatagttttcgataaaggatatagcaacatcttttgataattgtgctttacaacttgaatgctgattcaaggcattatttggatgtgagtttaatcttttcagccttgtaaatgggaaaatatatattaaaattgattgtcaaatacagcatttctttggaaaccaccttaaaacattagtgctatggttatgagtgtatgtgccagtacttaccagtcaatgcattgtggatatgagctttcgttgactgcttctctgcagtcgttgatgctaataaatattgtcctgtttcttcatataataaattaatttttcaatttctccttgta

SEQ ID NO: 34576 - DNA, 2467 bp, Homo sapiens
  source 1..2467: mol_type = unassigned DNA
gacccggcgctagcccgcccgcccgcccgccggctctcgcgcctccttcgcgccggcccttccgcgggtgatcagctggtctgcgctcccctgacgtgggctggggcacgtcaccgccgaatggcagcctccagaaagccaccgcgagtaagggtgaatcaccaggattttcaactgagaaatttaagaataattgaacctaacgaggtgacacactcaggagacacaggtgtggaaacagacggcagaatgcctccaaaggtgacttcagagctgcttcggcagctgagacaagccatgaggaactctgagtatgtgaccgaaccgatccaggcctacatcatcccatcgggagatgctcatcagagtgagtatattgctccatgtgactgtcggcgggcttttgtctctggattcgatggctctgcgggcacagccatcatcacagaagagcatgcagccatgtggactgacgggcgctactttctccaggctgccaagcaaatggacagcaactggacacttatgaagatgggtctgaaggacacaccaactcaggaagactggctggtgagtgtgcttcctgaaggatccagggttggtgtggaccccttgatcattcctacagattattggaagaaaatggccaaagttctgagaagtgccggccatcacctcattcctgtcaaggagaacctcgttgacaaaatctggacagaccgtcctgagcgcccttgcaagcctctcctcacactgggcctggattacacaggcatctcctggaaggacaaggttgcagaccttcggttgaaaatggctgagaggaacgtcatgtggtttgtggtcactgccttggatgagattgcgtggctatttaatctccgaggatcagatgtggagcacaatccagtatttttctcctacgcaatcataggactagagacgatcatgctcttcattgatggtgaccgcatagacgcccccagtgtgaaggagcacctgcttcttgacttgggtctggaagccgaatacaggatccaggtgcatccctacaagtccatcctgagcgagctcaaggccctgtgtgctgacctctccccaagggagaaggtgtgggtcagtgacaaggccagctatgctgtgagcgagaccatccccaaggaccaccgctgctgtatgccttacacccccatctgcatcgccaaagctgtgaagaattcagctgagtcagaaggcatgaggcgggctcacattaaagatgctgttgctctctgtgaactctttaactggctggagaaagaggttcccaaaggtggtgtgacagagatctcagctgctgacaaagctgaggagtttcgcaggcaacaggcagactttgtggacctgagcttcccaacaatttccagtacgggacccaacggcgccatcattcactacgcggatggcaccacagatgtgacgcggacaatgcattttgggacccctacagcctacgagaaggaatgcttcacatatgtcctcaagggccacatagctgtgagtgcagccgttttcccgactggaaccaaaggtcaccttcttgactcctttgcccgttcagctttatgggattcaggcctagattacttgcacgggactggacatggtgttgggtcttttttgaatgtccatgagggtccttgcggcatcagttacaaaacattctctgatgagcccttggaggcaggcatgattgtcactgatgagcccgggtactatgaagatggggcttttggaattcgcattgagaatgttgtccttgtggttcctgtgaagaccaagtataattttaataaccggggaagcctgacctttgaacctctaacattggttccaattcagaccaaaatgatagatgtggattctcttacagacaaagagtgcgactggctcaacaattaccacctgacctgcagggatgtgattgggaaggaattgcagaaacagggccgccaggaagctctcgagtggctcatcagagagacgcaacccatctccaaacagcattaataaatacctccccggttttgtttttgtaaaatgctctggaggaaggaagaaacgtggcagatccctgacatctttcccctttcctttccttcttccctacctcccctttttactttagactttaagaagaacagaaaatcttcttatcctctttgatattttattgcaaacactcagtcttttatgattttttaattgttgagaacaagccaagaataaaattgctgcaccagaaggagggtccctccaaagttgaacacttggtgaaaggaagatgccccgacttctttggccagtgatggggaatcagtgagtgctccatgatggtcatgttccaggtgctagtacatcattcatgatcaccttaatgctcatgagactatatttatgatcagtgaataaaaatgtcagaactgtg

SEQ ID NO: 34577 - DNA, 2539 bp, Homo sapiens
  source 1..2539: mol_type = unassigned DNA
gacccggcgctagcccgcccgcccgcccgccggctctcgcgcctccttcgcgccggcccttccgcgggtgatcagctggtctgcgctcccctgacgtgggctggggcacgtcaccgccgaatggcagcctccagaaagccaccgcgagtaagggtgaatcaccaggattttcaactgagaaatttaagaataattgaacctaacgaggtgacacactcaggagacacaggtgtggaaacagacggcagaatgcctccaaaggtgacttcagagctgcttcggcagctgagacaagccatgaggaactctgagtatgtgaccgaaccgatccaggcctacatcatcccatcgggagatgctcatcagagtgagtatattgctccatgtgactgtcggcgggcttttgtctctggattcgatggctctgcgggcacagccatcatcacagaagagcatgcagccatgtggactgacgggcgctactttctccaggctgccaagcaaatggacagcaactggacacttatgaagatgggtctgaaggacacaccaactcaggaagactggctggtgagtgtgcttcctgaaggatccagggttggtgtggaccccttgatcattcctacagattattggaagaaaatggccaaagttctgagaagtgccggccatcacctcattcctgtcaaggagaacctcgttgacaaaatctggacagaccgtcctgagcgcccttgcaagcctctcctcacactgggcctggattacacaggcatctcctggaaggacaaggttgcagaccttcggttgaaaatggctgagaggaacgtcatgtggtttgtggtcactgccttggatgagattgcgtggctatttaatctccgaggatcagatgtggagcacaatccagtatttttctcctacgcaatcataggactagagacgatcatgctcttcattgatggtgaccgcatagacgcccccagtgtgaaggagcacctgcttcttgacttgggtctggaagccgaatacaggatccaggtgcatccctacaagtccatcctgagcgagctcaaggccctgtgtgctgacctctccccaagggagaaggtgtgggtcagtgacaaggccagctatgctgtgagcgagaccatccccaaggaccaccgctgctgtatgccttacacccccatctgcatcgccaaagctgtgaagaattcagctgagtcagaaggcatgaggcgggctcacattaaagatgctgttgctctctgtgaactctttaactggctggagaaagaggttcccaaaggtggtgtgacagagatctcagctgctgacaaagctgaggagtttcgcaggcaacaggcagactttgtggacctgagcttcccaacaatttccagtacgggacccaacggcgccatcattcactacgcgccagtccctgagacgaataggaccttgtccctggatgaggtgtaccttattgactcgggtgctcaatacaaggatggcaccacagatgtgacgcggacaatgcattttgggacccctacagcctacgagaaggaatgcttcacatatgtcctcaagggccacatagctgtgagtgcagccgttttcccgactggaaccaaaggtcaccttcttgactcctttgcccgttcagctttatgggattcaggcctagattacttgcacgggactggacatggtgttgggtcttttttgaatgtccatgagggtccttgcggcatcagttacaaaacattctctgatgagcccttggaggcaggcatgattgtcactgatgagcccgggtactatgaagatggggcttttggaattcgcattgagaatgttgtccttgtggttcctgtgaagaccaagtataattttaataaccggggaagcctgacctttgaacctctaacattggttccaattcagaccaaaatgatagatgtggattctcttacagacaaagagtgcgactggctcaacaattaccacctgacctgcagggatgtgattgggaaggaattgcagaaacagggccgccaggaagctctcgagtggctcatcagagagacgcaacccatctccaaacagcattaataaatacctccccggttttgtttttgtaaaatgctctggaggaaggaagaaacgtggcagatccctgacatctttcccctttcctttccttcttccctacctcccctttttactttagactttaagaagaacagaaaatcttcttatcctctttgatattttattgcaaacactcagtcttttatgattttttaattgttgagaacaagccaagaataaaattgctgcaccagaaggagggtccctccaaagttgaacacttggtgaaaggaagatgccccgacttctttggccagtgatggggaatcagtgagtgctccatgatggtcatgttccaggtgctagtacatcattcatgatcaccttaatgctcatgagactatatttatgatcagtgaataaaaatgtcagaactgtg

SEQ ID NO: 34578 - DNA, 2344 bp, Homo sapiens
  source 1..2344: mol_type = unassigned DNA
ctccttcgcgccggcccttccgcgggtgatcagctggtctgcgctcccctgacgtgggctggggcacgtcaccgccgaatggcagcctccagaaagccaccgcgagtaagacggcagaatgcctccaaaggtgacttcagagctgcttcggcagctgagacaagccatgaggaactctgagtatgtgaccgaaccgatccaggcctacatcatcccatcgggagatgctcatcaggcacagccatcatcacagaagagcatgcagccatgtggactgacgggcgctactttctccaggctgccaagcaaatggacagcaactggacacttatgaagatgggtctgaaggacacaccaactcaggaagactggctggtgagtgtgcttcctgaaggatccagggttggtgtggaccccttgatcattcctacagattattggaagaaaatggccaaagttctgagaagtgccggccatcacctcattcctgtcaaggagaacctcgttgacaaaatctggacagaccgtcctgagcgcccttgcaagcctctcctcacactgggcctggattacacaggcatctcctggaaggacaaggttgcagaccttcggttgaaaatggctgagaggaacgtcatgtggtttgtggtcactgccttggatgagattgcgtggctatttaatctccgaggatcagatgtggagcacaatccagtatttttctcctacgcaatcataggactagagacgatcatgctcttcattgatggtgaccgcatagacgcccccagtgtgaaggagcacctgcttcttgacttgggtctggaagccgaatacaggatccaggtgcatccctacaagtccatcctgagcgagctcaaggccctgtgtgctgacctctccccaagggagaaggtgtgggtcagtgacaaggccagctatgctgtgagcgagaccatccccaaggaccaccgctgctgtatgccttacacccccatctgcatcgccaaagctgtgaagaattcagctgagtcagaaggcatgaggcgggctcacattaaagatgctgttgctctctgtgaactctttaactggctggagaaagaggttcccaaaggtggtgtgacagagatctcagctgctgacaaagctgaggagtttcgcaggcaacaggcagactttgtggacctgagcttcccaacaatttccagtacgggacccaacggcgccatcattcactacgcgccagtccctgagacgaataggaccttgtccctggatgaggtgtaccttattgactcgggtgctcaatacaaggatggcaccacagatgtgacgcggacaatgcattttgggacccctacagcctacgagaaggaatgcttcacatatgtcctcaagggccacatagctgtgagtgcagccgttttcccgactggaaccaaaggtcaccttcttgactcctttgcccgttcagctttatgggattcaggcctagattacttgcacgggactggacatggtgttgggtcttttttgaatgtccatgagggtccttgcggcatcagttacaaaacattctctgatgagcccttggaggcaggcatgattgtcactgatgagcccgggtactatgaagatggggcttttggaattcgcattgagaatgttgtccttgtggttcctgtgaagaccaagtataattttaataaccggggaagcctgacctttgaacctctaacattggttccaattcagaccaaaatgatagatgtggattctcttacagacaaagagtgcgactggctcaacaattaccacctgacctgcagggatgtgattgggaaggaattgcagaaacagggccgccaggaagctctcgagtggctcatcagagagacgcaacccatctccaaacagcattaataaatacctccccggttttgtttttgtaaaatgctctggaggaaggaagaaacgtggcagatccctgacatctttcccctttcctttccttcttccctacctcccctttttactttagactttaagaagaacagaaaatcttcttatcctctttgatattttattgcaaacactcagtcttttatgattttttaattgttgagaacaagccaagaataaaattgctgcaccagaaggagggtccctccaaagttgaacacttggtgaaaggaagatgccccgacttctttggccagtgatggggaatcagtgagtgctccatgatggtcatgttccaggtgctagtacatcattcatgatcaccttaatgctcatgagactatatttatgatcagtgaataaaaatgtcagaactgtg

SEQ ID NO: 34579 - DNA, 1006 bp, Homo sapiens
  source 1..1006: mol_type = unassigned DNA
gcgggtgatcagctggtctgcgctcccctgacgtgggctggggcacgtcaccgccgaatggcagcctccagaaagccaccgcgagtaagacggcagaatgcctccaaaggtgacttcagagctgcttcggcagctgagacaagccatgaggaactctgagtatgtgaccgaaccgatccaggcctacatcatcccatcgggagatgctcatcagagtgagtatattgctccatgtgactgtcggcgggcttttgtctctggattcgatggctctgcgggcacagccatcatcacagaagagcatgcagccatgtggactgacgggcgctactttctccaggctgccaagcaaatggacagcaactggacacttatgaagatgggtctgaaggacacaccaactcaggaagactggctggtgagtgtgcttcctgaaggatccagggttggtgtggaccccttgatcattcctacagattattggaagaaaatggccaaagttctgagaagtgccggccatcacctcattcctgtcaaggagaacctcgttgacaaaatctggacagaccgtcctgagcgcccttgcaagcctctcctcacactgggcctggattacacaggcatctcctggaaggacaaggttgcagaccttcggttgaaaatggctgagaggaacgtcatgtggtttgtggtcactgccttggatgagattgcgtggctatttaatctccgaggatcagatgtggagcacaatccagtatttttctcctacgcaatcataggactagagacgatcatgctcttcattgatggtgaccgcatagacgcccccagtgtgaaggagcacctgcttcttgacttgggtctggaagccgaatacaggatccaggtgcatccctacaagtccatcctgagcgagctcaaggccctgtgtgctgacctctccccaagggagaaggtgtgggtcagtgacaaggccagctatgctgtgagcgagaccatcccc

SEQ ID NO: 34580 - DNA, 2539 bp, Homo sapiens; identical to SEQ ID NO: 34577
  source 1..2539: mol_type = unassigned DNA

SEQ ID NO: 34581 - DNA, 912 bp, Homo sapiens
  source 1..912: mol_type = unassigned DNA
cttgcacagtccgcctcgggcagcccaaagctcctctgcccaccctggctcccagagccctccaaaacaaaagaccagagaagcactctccacccagcagccagacgcctccttcttgacgccagcccccaccctctgtctgctcgagcccaggaaaggcctgaaggaagaggccggggaaagagccctccctctctcccttgtccctccatccacccagcgccggcatctggagaccctatggcccgggctcactggggctgctgcccctggctggtcctcctctgtgcttgtgcctggggccacacaaagccagtggaccttggagggcaggatgtgagaaactgttccaccaaccccccttaccttccagttactgtggtcaataccacaatgtcactcacagccctccgccagcagatgcagacccagaatctctcagcctacatcatcccaggcacagatgctcacatgaacgagtacatcggccaacatgacgagaggcgtgcgtggattacaggctttacagggtctgcaggaactgcagtggtgactatgaagaaagcagctgtctggaccgacagtcgctactggactcaggctgagcggcagatggactgcaactgggagctccataaggaagttggcaccactcctattgtcacctggctcctcaccgagattcctgctggagggcgtgtgggttttgaccccttcctcttgtccattggtatgctcttccttcagtccctgaatttgtccatgctaacgagggtgactcagcttccctaggatataaagaaatggaccttggtagaaggaggggcggtgggactataaagatagagcatttgaaattgtagttgcagaatgttttgcaatgaggatgtattcatggattgtgtaattaaa

SEQ ID NO: 34582 - DNA, 3270 bp, Homo sapiens
  source 1..3270: mol_type = unassigned DNA
ctcccagagccctccaaaacaaaagaccagagaagcactctccacccagcagccagacgcctccttcttgacgccagcccccaccctctgtctgctcgagcccaggaaaggcctgaaggaagaggccggggaaagagccctccctctctcccttgtccctccatccacccagcgccggcatctggagaccctatggcccgggctcactggggctgctgcccctggctggtcctcctctgtgcttgtgcctggggccacacaaagccagtggaccttggagggcaggatgtgagaaactgttccaccaaccccccttaccttccagttactgtggtcaataccacaatgtcactcacagccctccgccagcagatgcagacccagaatctctcagcctacatcatcccaggcacagatgctcacatgaacgagtacatcggccaacatgacgagaggcgtgcgtggattacaggctttacagggtctgcaggaactgcagtggtgactatgaagaaagcagctgtctggaccgacagtcgctactggactcaggctgagcggcagatggactgcaactgggagctccataaggaagttggcaccactcctattgtcacctggctcctcaccgagattcctgctggagggcgtgtgggttttgaccccttcctcttgtccattgacacctgggagagttatgatctggccctccaaggctctaacagacagctggtgtccatcacaaccaatcttgtggacctggtatggggatcagagaggccaccggttccaaatcaacccatttatgccctgcaggaggcattcacagggagcacttggcaggagaaagtatctggcgtccgaagccagatgcagaagcatcaaaaggtcccgactgccgtccttctgtcggcgcttgaggagacggcctggctcttcaaccttcgagccagtgacatcccctataaccccttcttctattcctacacgctgctcacagactcttctattaggttgtttgcaaacaagagtcgctttagctccgaaaccttgagctatctgaactccagttgcacaggccccatgtgtgtgcaaatcgaggattacagccaagttcgtgacagcatccaggcctactcattgggagatgtgaggatctggattgggaccagctataccatgtatgggatctatgaaatgatacccaaggagaaactcgtgacagacacctactccccagtgatgatgaccaaggcagtgaagaacagcaaggagcaggccctcctcaaggccagccacgtgcgggacgctgtggctgtgatccggtacttggtctggctggagaagaacgtgcccaaaggcacagtggatgagttctcgggggcagagatcgtggacaagttccgaggagaagaacagttctcctccggacccagttttgaaaccatctctgctagtggtctgaatgctgccctggcccactacagcccgaccaaggagctgaaccgcaagctgtcctcagatgagatgtacctgctggactctggggggcagtactgggacgggaccacagacatcaccagaacagtccactggggcaccccctctgccttccagaaggaggcatacacccgtgtgctgataggaaatattgacctgtccaggctcatctttcccgctgctacatcagggcgaatggtggaggcctttgcccgcagagccttgtgggatgctggtctcaattatggtcatgggacaggccacggcattggcaacttcctgtgtgtgcatgagtggccagtgggattccagtccaacaacatcgctatggccaagggcatgttcacttccattgaacctggttactataaggatggagaatttgggatccgtctcgaagatgtggctctcgtggtagaagcaaagaccaagtacccagggagctacctgacctttgaagtggtatcatttgtgccctatgaccggaacctcatcgatgtcagcctgctgtctcccgagcatctccagtacctgaatcgctactaccagaccatccgggagaaggtgggtccagagctgcagaggcgccagctactagaggagttcgagtggcttcaacagcacacagagcccctggccgccagggccccagacaccgcctcctgggcctctgtgttagtggtctccacccttgccatccttggctggagtgtctagaggctccagactctcctgttaaccctccatctagatggggggctcccttgcttagctcccctcaccctgcactgaacataccccaagagcccctgctggcccattgcctagaaacctttgcattcatcctccttctccaagacctatggagaaggtcccaggccccaggaacacagggcttcttggccccagatggcacctccctgcaccccggggttgtataccacaccctgggcccctaatcccaggccccgagataggaaagccagctagtctcttctcttctgtgatctcagtaggcctaacctataacctagcacagactgctacagctgctcccctcccgccaaacaaaaccccaagagagcaatgcccctaccacccaagggtgccatggtcccgggagagcccaaacctatcaccacctgttgggcatagccagagctgttcccacccagccagggcatgaaacatcaaccccccacatgtgaacccatcattcctaaaccctgggtaggctccatgccaagtaacagcagagggagttaagccataggaatttggctgtggagtaagagggaatgcggtgaggcactctggaatatgaccctaccagaggttggagaacaaacttgggcagccggaacccgtcactattctagacttccctggcattcgaggagccctttgaactttccaaagtgcagccacagctacaatgctgttaaatcctcccacattcttggatgccccttcaccttgtgtggacagtgtctggtttctccattttacagacaggaaaactgagcttcagacagggggtgggctttgcctaaggacacacaaatttggttgggagttgatggggccagatgagccagcattccagctctttcacccttcagcaacatgcagagtccctgagcccacctcccagccctctcctcattctctgaacccactgtggtgagaagaatttgctccggccaaattggccgttagccacctgggtccacatcctgctaagacgtttaaaacagcctaacaaagaca

SEQ ID NO: 34583 - DNA, 7988 bp, Homo sapiens
  source 1..7988: mol_type = unassigned DNA
ggtttcctggcgacgcggccctgcaggcggttgcgttccccgtcgttaccctctttctcttcccgacgcgtgagttaggccgtaatgccttggctgctctcagcccccaagctggttcccgctgtagcaaacgtccgcggcctctcaggatgtatgttgtgttcacagcgaaggtactcccttcagcctgtcccagaaaggaggattccaaaccgatacttaggccagcccagcccctttacacacccacacctcctcagaccaggggaggtaactccaggactatctcaggtggaatatgcacttcgcagacacaaactaatgtctctgatccagaaggaagctcaagggcagagtgggacagaccagacagtggttgtgctctccaaccctacatactacatgagcaacgatattccctatactttccaccaagacaacaatttcctgtacctatgtggattccaagagcctgatagcattcttgtccttcagagcctccctggcaaacaattaccatcacacaaagccatactttttgtgcctcggcgagatcccagtcgagaactttgggatggtccgcgatctggcactgatggagcaatagctctaactggagtagacgaagcctatacgctagaagaatttcaacatcttctaccaaaaatgaaagctgagacgaacatggtttggtatgactggatgaggccctcacatgcacagcttcactctgactatatgcagcccctgactgaggccaaagccaagagcaagaacaaggttcggggtgttcagcagctgatacagcgcctccggctgatcaagtctcctgcagaaattgaacgaatgcagattgctgggaagctgacatcacaggctttcatagaaaccatgttcaccagtaaagcccctgtggaagaagcctttctttatgctaagtttgaatttgaatgccgggctcgtggcgcagacattttagcctatccacctgtggtggctggtggtaatcggtcaaacactttgcactatgtgaaaaataatcaactcatcaaggatggggaaatggtgcttctggatggaggttgtgagtcttcctgctatgtgagtgacatcacacgtacgtggccagtcaatggcaggttcaccgcacctcaggcagaactctatgaagccgttctagagatccaaagagattgtttggccctctgcttccctgggacaagcttggagaacatctacagcatgatgctgaccctgataggacagaagcttaaagacttggggatcatgaagaacattaaggaaaataatgccttcaaggctgctcgaaaatactgtcctcatcatgttggccactacctcgggatggatgtccatgacactccagacatgccccgttccctccctctgcagcctgggatggtaatcacaattgagcccggcatttatattccagaggatgacaaagatgccccagagaagtttcggggtcttggtgtacgaattgaggatgatgtagtggtgactcaggactcacctctcatcctttctgcagactgtcccaaagagatgaatgacattgaacagatatgcagccaggcttcttgaccttcactgcggcccacatgcacctcaggttcaaaatgggtgtcttctggcagccctgcacgtgtgctttctgagtgtctctgtgtgtgcattaatatatgcattccatttgggagcatagcagctgtgtgaatgtatgtaattgtgtgtggggggttttttgttttaagtagttagaagtctgggaaaatgaatttttgaatagtatgttactgcagctttggtaacattaattctatagaattaatgatcagagcaagtttaatttttaaacataaaggtcttggttacacatgtccatgcattccagttaacacatttaaacatatagaaaattcacttcttctttcaagtccttccctttctatacttttgctgagatcaacccaatatcataagaagtttgtgtgatgcctgtatttttagctaattaccaaggtctctgcctatgcaaaaattcatctttcggtgattgtgggcggccaatacataccttctgtaactcctccctacctattctagatcctgcatatctactggagccatatgagccctcaggggcactggtgtcctgcagtcttactagtcagccacagtccaggttccagcaacactagctacctaccaaacaaaacacttctgagcttttcttgccatttggttgcctgggacctggaaagtgtttagattcttgataaagatggaaatggaagagaaagaaaattatatatgtatatactaaagatccagacatcagggctgggcacagcggttccgcctgtaatcccagcactttgggaggtccaggcaggtggatctcttgagaccaggaggtcaagaccagcctggccaacgtggtgaaacactgtctctactaaaaatacaaaaatgagctgggtgtgatgatacatgcctgtaatcctggctacttgggaggctgaggcatgagaattgcttgaacctgggaggtggaggttgcagtgagctgagctcatgcgactgcactccagcctgggtgactgagcaagactctgcctcaaaaaaacaaataaataaataaaatcctgacatcctgccatcttttctcttcaatttaaagttgatttcttaatgatgacttcaaaaattaataaaaagaaaagaaaaaaatgatttctggccgggcgtggtggctcaagcctgtaatcccagcactttgggaggccgaggtgggcggatcacgaggtcaggagattgagacctcctggctaacacggtgaaaccccgtctttactaaaaatacaaaaaaaattagctgggcgtggtggcggatgcctgtagtcccagctactcaggaggctgaggcaggagaatggcgtgaacccagaaggcagagcttgcagtgagccaagatcgcgccactgcactccagcctgggtgacagagcgagactccgtctcaaaaaaaaaaaaaaaaaagaaaaaaaaaagaaagatttctttcgcagatatccctgctccctctatagattcttaatgcactgaccctcacaggttacccttttagctgttgtgctgcgcaggagcagatcctctacttacgtaccctgtcagagtcacagtagtagcgcccagttttcagagaagtacccctgttatcattctgtgatttcctctagtgctaatagaaacaaaatatggaatctaccaagtacccgtaaatatcctatgattcttatctttctttgatactagcactgggagtgcagtggtaaagagtcatacttcttttttttttttttttttggagacagagtctcgctctgtcgcctgggctggatggagtgcagtggcgtaatctcagctcactacaacctccaccacctgggttcaggcaattctcctgcctcagcctcccaagtaactgggactacaggtgcacgctgccatgcccagctaattttttgtattttagtagagacagggtttcaccctgttgcccaggccggtctcaaactcctgagctccggcaatccgcccacctcagcctcccaaagtgctaggattacaggcatgagccactgcgcccggtgtaagagtcatatttttttaaacacaaacattggatacaattatacagcaactcagtttgcaagatgaacagggctagattaccacagatagcttatttaggagcgtctgtgatagagggaagctttaagaaccagtgtgttcacctcctttaaacctggatatgaggtcaagatgtataaaacatgccaattgttagaacacaaatttgagggtttcttaaaaaaacaatttgtattagggaagcacaagctaggggattaacaatctctgtaatgctggaagtttgcctatcttatcagggaaacccagggtacagagtgaaaagcagacaggcagtgacttcctcaagagacagataatgtgaaaacaaaagtgatacaaatcatatcctgacagtgctagcctaggaatgcctggctttgcgcaccttatctaagcagctctcagaatggaggctgcacagctggagtctccatcccccatacccaccttcccacctccctccaatttctcaatccagagctttttaaaaaaaggggagggaaataactccacagctctggctgctcacttcccaggctctgtgcccccaacagccctttccttggattgtgtttcctttgttcatttgtaatccaggaataaggaatttccttttcttcttgtatcattttcttttcttttctttttttttttttttttgagacggagtctcacactgtcaccggggctggtgtgcaatagcgagacctcagctccctgcaacctccatctcccaggttcaagcgattctcctgcctcagcctcccgaatagctaggaatacaggcgcctgccaccacacccggctatttttttgtattttaaatagagacgaggtttcactgtgttggccaggctggtctcgaactcctgacctcatgatctgcccgcctcggcctccctaagtgctgcgattacagacgtgagccaccgcacctcctgtatcattttctatggtctaaacttttctagctaaaagcctaggtagcttgtatgtatagcagcatacttggacatgaaacacacttctggttagattccagtcaagttctataggtgttattggtaggcagaaaggctgttgtagaattcttctggtgattttcagtccctgacccaggtatattgtcctttgagtcccagattaactaactatagcagctaagcatttgaatcagacttctcatagcaatgttatgggctgtctgatatattcaggatttgttgagcagataagctgtgtgtgatcttactcattctcagccatgccgcagacatacccatttccctttagtaattttttaatacagagaatgctattaactgttactggatatcaaataattttatttttctaatagtattttccaaatatttcttaaaattcttaaaatttaggttaaagtttgctggtctcttacatttaataaagctgggacttgaagacttaccatagttttcaactgcctttgcaagttcataaacttctaagggtaaaaagtgaataagataaattcagagttttaaggtaaaggctttatattagctttttttttttttaaaggttttttgtggggtttttttgttttttttttttttgagatggagtctcgctctgtcacccaggctggagtgcagtggcacgatcttggctcactgcaacctccatctcccgggttcaggcaattcttctgcctcagcctcctgagtagctgggactacaggcgcgtgccaccatgcccggctagtttattgtatttttagtagagatggggttttactgtgttagccaggatggtctcaatctcctgacctcataatctgcccacctcagcctcccaaagtgctgggattacaggcgtgagccactgcacccagcctttttaaagtttttaattgacatataattgtacgtatttacagggtaaataatgatgttttgatacatatataatgatcagatcagaacaattagcatatccatcacattgaacatttatcatttatttgtgttgagcctttagttcttttttttttttgagatagagtctcactctgtcacccaggctggagtacagtggtgtgatcttggctcactgcaacctccacccaccggcttcaaccaattctcctgcctcagcctccctagtaactgggattacaggcacctgccaccacacccaatttttgtatttttagtagagacggggtttcaccatcttggccaggccaggctggtcttgatctcctgaccttgtgatccacccacctcagcttcccaaactgctgggattacaggcatgagccacggcccccagccagagacagtcttgctttgtcgccaggctggagtgtagtggcgccatcttggctcactgcaacctccaactccctggttcaagcagttctcctgcctcagcctcccaagtagctgggattacaggcacgcaccaccatgcccagctaatttttgtatttttagtagagacagggtttcaccatgttggccaggatggtcttgatctcctgacctcgtgatctgcccactttggcctcccaaagtgctgggattacaggtgtgagccaccgtgcccagccgagcctttagttctaagtataataaataatatatataccaggcattcctattaaaaatcttaacttaaaaaaaattactcaaatgttactactggaatttttctccctgaattgaagatacatggttagatcattaacaataccacctaaatgaaggaaacatatctggatatccagtgtcacatacttttatgtatttatttcaggaattactattttgtcaccataattaggaaacagactgtgttctttatttgaaacacaacagtataaatactatagtaaagttgggtgcagtggatcacagctataatcccagcactttgggagaccaaggagggatggtcacttgagcccaggagtttgagaccagcctaggcaacatagagagaccttgtctcaacaaaaaaatttaaagttagccaggtgtggtggtttgcacctatagtcccagctactcaggaggctgaggtgggaggatcgcttgagcttaggaggtcaaggctgcagtgagccatgattgtgccacttcaccctgggcaacagagaaagaccctgtctcaataaaaaagaagagaaaaactggagtgagaactctcctcctctcataatcatagtatccacgttaggaaaatgcttctgagagtaacttaaagtactgtgtgtgcatcttccttcaaaaccttgcttttttctccgtttttgtaaggtgagaaagggaaaaaccttcaccgtagaaatactgtcttgagattaagatacaaataaaacatgttaaacctccatctaaagacattgcaacttattaaaacagaaaaatgtacctttgttatgtctttccaaatatccacacccacaccctgttcagctttgttaataatacagagatcagaaatgtgaagcacaaatgctgcttctccccctcctgttcccatgtcagagatggagaagaaagcacagtgagctgttcaccagtccagcggtgacctcggagtcctttgtaacagtgtttccaataacttctgccaataaaacagaatttgagttagaacctatctgctgtccctcaactagtgtctgatagctgagaatgtaattcgtttgtgtgtctattagaaaattaggcaggcaccacagacagtagcaacataaaggaacctgcttagaagaggtttttatggtgtgattgtgtttttttttttttaatttttgtttcctgaagtagaatccatagctcaaaacaagttttaagcctgagaaaatataatttgaggtgttttttatgctcctaatgaaaagatgaatgaatgcatcattaaaccttaacagtagagcagaatttcactgttacaaaccacatgggttctcctggttgtgctgctgttctctacctgtgtgtcactgagtttgagcatcattattgtttgaatcagaggacccactggaatcaaggcttcttggaattgcgcaagaatctgagaaaacttcaatctttaccagcatttcttaatgctttccatgacttttgtgcaattatataagttcagtttagacaaaatgctgttactttttaaggcattactaataactgaaaatagttacgtcattgcccatcaagggaaaagcacttgtaactgtcatttaaaaaaaataaaactataaaacaata

SEQ ID NO: 34584 - DNA, 929 bp, Homo sapiens
  source 1..929: mol_type = unassigned DNA
gctggcccggtttcctggcgacgcggccctgcaggcggttgcgttccccgtcgttaccctctttctcttcccgacgcgtgagttaggccgtaatgccttggctgctctcagcccccaagctggttcccgctgtagcaaacgtccgcggcctctcaggatgtatgttgtgttcacagcgaaggtactcccttcagcctgtcccagaaaggaggattccaaaccgatacttaggccagcccagcccctttacacacccacacctcctcagaccaggggaggtaactccaggactatctcaggtggaatatgcacttcgcagacacaaactaatgtctctgatccagaaggaagctcaagggcagagtgggacagaccagacagtggttgtgctctccaaccctacatactacatgagcaacgatattccctatactttccaccaagacaacaatttcctgtacctatgtggattccaagagcctgatagcattcttgtccttcagagcctccctggcaaacaattaccatcacacaaagccatactttttgtgcctcggcgagatcccagtcgagaactttgggatggtccgcgatctggcactgatggagcaatagctctaactggagtagacgaagcctatacgctagaagaatttcaacatcttctaccaaaaatgaaagctgagacgaacatggtttggtatgactggatgaggccctcacatgcacagcttcactctgactatatgcagcccctgactgaggccaaagccaagagcaagaacaaggttcggggtgttcagcagctgatacagcgcctccggctgatcaagtctcctgcagaaattgaacgaatgcagattgctgggaagctgacatcacagagacagggtttctcagtgttgtccaggctagtctcgaactcctga

SEQ ID NO: 34585 - DNA, 1042 bp, Homo sapiens
  source 1..1042: mol_type = unassigned DNA
ggtgcggctggcccggtttcctggcgacgcggccctgcaggcggttgcgttccccgtcgttaccctctttctcttcccgacgcgtgagttaggccgtaatgccttggctgctctcagcccccaagctggttcccgctgtagcaaacgtccgcggcctctcaggatgtatgttgtgttcacagcgaaggtactcccttcagcctgtcccagaaaggaggattccaaaccgatacttaggccagcccagcccctttacacacccacacctcctcagaccaggggaggtaactccaggactatctcaggtggaatatgcacttcgcagacacaaactaatgtctctgatccagaaggaagctcaagggcagagtgggacagaccagacagtggttgtgctctccaaccctacatactacatgagcaacgatattccctatactttccaccaagacaacaatttcctgtacctatgtggattccaagagcctgatagcattcttgtccttcagagcctccctggcaaacaattaccatcacacaaagccatactttttgtgcctcggcgagatcccagtcgagaactttgggatggtccgcgatctggcactgatggagcaatagctctaactggagtagacgaagcctatacgctagaagaatttcaacatcttctaccaaaaatgaaagctgagacgaacatggtttggtatgactggatgaggccctcacatgcacagcttcactctgactatatgcagcccctgactgaggccaaagccaagagcaagaacaaggttcggggtgttcagcagctgatacagcgcctccggctgatcaagtctcctgcagaaattgaacgaatgcagattgctgggaagctgacatcacagaaatccgtattattggcccggcacggtggctcacgcctgtattcccatcactttgggaggccaaggctttcatagaaaccatgttcaccagtaaagcccctgtggaagaagcctttctttatgctaagtttgaatttgaatgccgggctcgt

SEQ ID NO: 34586 - DNA, 2249 bp, Homo sapiens
  source 1..2249: mol_type = unassigned DNA
accagaccatcctgaatcctctggactgtttcccctgtatgtttccctggaagcttcaggcagtgcctcataagccaatggaatctgttgctaatagccacagcatatcccttgcataatatgacctctagattactgcgccttaattgcttcccagctcttctatgctttggtttagaaaaatgaagtactgacttacgggtgaagaaagtattcaaacagttgacatatttatttcagtcaagaaacagttcagagggagatacaaacaagtaacttagttacaatataatagttatgatgagaggaagtactggatgctaaacaattatatgagagacagctcaggctgggggtgtcaatgaaagcctcttggaggaagtagcctgatatgttaactttctgcatgccagtggatgtatgttgtgttcacagcgaaggtactcccttcagcctgtcccagaaaggaggattccaaaccgatacttaggccagcccagcccctttacacacccacacctcctcagaccaggggaggtaactccaggactatctcaggtggaatatgcacttcgcagacacaaactaatgtctctgatccagaaggaagctcaagggcagagtgggacagaccagacagtggttgtgctctccaaccctacatactacatgagcaacgatattccctatactttccaccaagacaacaatttcctgtacctatgtggattccaagagcctgatagcattcttgtccttcagagcctccctggcaaacaattaccatcacacaaagccatactttttgtgcctcggcgagatcccagtcgagaactttgggatggtccgcgatctggcactgatggagcaatagctctaactggagtagacgaagcctatacgctagaagaatttcaacatcttctaccaaaaatgaaagctgagacgaacatggtttggtatgactggatgaggccctcacatgcacagcttcactctgactatatgcagcccctgactgaggccaaagccaagagcaagaacaaggttcggggtgttcagcagctgatacagcgcctccggctgatcaagtctcctgcagaaattgaacgaatgcagattgctgggaagctgacatcacaggctttcatagaaaccatgttcaccagtaaagcccctgtggaagaagcctttctttatgctaagtttgaatttgaatgccgggctcgtggcgcagacattttagcctatccacctgtggtggctggtggtaatcggtcaaacactttgcactatgtgaaaaataatcaactcatcaaggatggggaaatggtgcttctggatggaggttgtgagtcttcctgctatgtgagtgacatcacacgtacgtggccagtcaatggcaggttcaccgcacctcaggcagaactctatgaagccgttctagagatccaaagagattgtttggccctctgcttccctgggacaagcttggagaacatctacagcatgatgctgaccctgataggacagaagcttaaagacttggggatcatgaagaacattaaggaaaataatgccttcaaggctgctcgaaaatactgtcctcatcatgttggccactacctcgggatggatgtccatgacactccagacatgccccgttccctccctctgcagcctgggatggtaatcacaattgagcccggcatttatattccagaggatgacaaagatgccccagagaagtttcggggtcttggtgtacgaattgaggatgatgtagtggtgactcaggactcacctctcatcctttctgcagactgtcccaaagagatgaatgacattgaacagatatgcagccaggcttcttgaccttcactgcggcccacatgcacctcagtggaatgcagtagccctctgggcctgggatattgtggttgataactgtgccatctgcaggaaccacattatggatctttagacgggatctcgctttgttgcccaggctggtctcgaactggcttcaagtgatcctcccactttggccttccaaaatgttgcgattataggcgtgagccactgtggctggcctgaaattttctagtatccacattcataaagtaaaaagaaaataaaaaggcatagaatgtcaagctaaccaggcgtccgctacttcagaagagtgtactgtcgcatggggagtctgtaaccatgcttttcacttccactgcatctctcgctggctc

SEQ ID NO: 34587 - DNA, 5681 bp, Homo sapiens
  source 1..5681: mol_type = unassigned DNA
agtttgggtcttgctggcgcgaggtagtcagaggacgtggccgcggggcttgctgggacttgaggttagacgtcccggccgtcggttgccgcctacactgtctgccgtcgcgtcgcagttactaaggcgtggggaagatagcggcaggcaccgcagtggagcggctccgagatccccggggggctcgcaggcgcgcatccctcctgactgggacgtcgcctccgcagacccctcggaggctgaagcgacgccggaggcaggcaaagaaacaagtgaagaaacaaaaaaaaaaggaagttaaggggccattcccaaagtcaaagatcaaggagatggccttctcaggaatctacaagctggatgatgggaagccttacctgaacaactgcttcccagccagaaatctgcttcgcgtgccggaggaaggccaaggacactggttagtggttcagaaaggtaacctcaagaagaagcccaagggtttggttggagcacaagctgaacgtcgggaaagcctgaaggcgacttcttttgagttcaaggggaagaaagagtctcggcgggaaaatcaggtggaccttcctggacatatcctggaccaggcttttctgctgaagcaccactgtgtgaggaagccatcagatctgtgcaccattaatgccaaggaaaatgacttcaagcattttcattctgtgatttatatcaatgcctcagaaaacctgctgcctctagaggcatttcacacgtttccagccctaaaggaactggatctcgcatttaatggcatcaaaactatctacgtgaaatatggagactttaagttattagaattcttggacctttccttcaacagcctgactgtggaggccatctgtgatttggggattctgccacacctccgtgtcctgctcctcacaggcaatggccttacctccctgccgcccaatttggccgtcgcagaacaggaggcatctgtaacatcgctgacaagcaagaggtacatcctgaggttcccagcgctggagacactgatgctggatgacaacagactctccaaccccagttgctttgccagcctggctgggctcaggagactgaagaagttaagcttggatgaaaacaggattatcaggatcccatacctacagcaagttcagctctatgacgagtcagtagactggaatggaggcaggggaagtccccataaagagccccaattcatgctgcagtccaagccaaggatgcttgaggactcagatgagcaactggattatactgtactgcccatgaaaaaggatgttgaccggacagaggttgtgttttcatcttaccctggattttcaacctcagagacaaccaagatatgttcacttcctcccatattcgagatccttcctgtgaagtcactgaaggccaggaaccagacgctggccccacccttcccagagctgagataccttagcctggcctacaacaagatcgcaaaagaggatgctgtcctaccagtagctctcttcccatctctctgcgagttcgtctttcataacaaccctctggtggcccatacacgaggggtccctccactgctgaagagcttcctccaggagcgactgggaatccacttaattcgaaggaagatagtaaagcctaagcatcatgttttgatgtctcggaaggaatcatggaaggtgaaaagcgaaatcccaaaggtgccgaagcagcctctggtgctccatcacccgcgcatgacgacaaccaagtctccctcaaaggatatgctagagccagaggcagagctggctgaagatctgcccactaccaaaagcacttctgtggagtcagagatgcccactgagaacctggaaggccattccccgtcttgccggaccttcgtgccactgcctcccatctgctccaactccactgtgcatagtgaagagaccctgtcccacctgagtgacacaactgtccgcctcagcccagagcgcccatcagatgaggactccaagagcacagagtccatcttcctgacccaggtgagtgaactgccttcctccgtcatccataaggatgatttagagttaaaggagaaagaccaaaagaaaccaccaacggcacccagagaggtgaaagggactcggaggaaactcccaactgccttccttcccagcaagtaccacggctatgaagaactgctgacagccaagcctgatccagccttcattgagccaaagggaatccagaagaatgcacaagccctgcaacaaatgctgaagcacccactcctgtgccactcctccaagcccaagctggacactcttcagaaaccctatgttcacaaagagaaacgggcccagagaatcccgattccacccccaaagaagactagagcccaacttctggatgacatcttcattcgcttgcgggatccccggaacattacagaggctccactaggtgctgtcctgcaccagtggacagaacggcggctggtgaaccacaagcagtacctggaggccaagaggctgttgaaggagttccaggcacgttaccggcagctggtgagtggctctctgcgcacagtgttcgggactaccccgctccccatggcctgcccagcgctgagtgagagccagcccaagttcggccacttcctcgagttcatggatgagttctgccaggagcccacagccagtgactcacaaggctagagctgtgcatgggggctgtgtgcaccacccggcctgtgccccagctctccccgagggctctgtgccctggaccgcacctcaaggttgaccagccggccacaggcctcagagctcagctgggccccacttgctggccacaaggtggcatccccttgtcaggatctcccctccttggcccaggcatgacctggtgcctggcccagcggcaataaagagtgggtgcacagggcaatagactgggtgccacatgcattctttcttggaacccaggccacagcagcattgtcacacttccctctaaaaatggttttccagttcagatgcaacagggatacatttgttctctgttgtatgagaaactgacaccaaggggatcttaacaaattcctgaacaatggctccaaaaaagggtatttttaaaaaccagatcttgtgagtacagccctaatgtgcagggacagtgtcatcctgtatattcgttctttactcagactctttcttggttccttcattaggagcatgaatggttgaatgtgaacatgacagtaaattggagcaaactgtaaactggacataacttatgccaaaagacgtagttgtacaccatggaaaccccatccctgctcctaatctctactgccattctgaatgccaaagcaagacatccaacatggggcatctcccagagcacatacagcaccaaaaatccacacacagcctaagcttaacccatgtttttgtctgagattgttcaccagagacaagactctgactataaacagaacatccactttcatgagtttcctttactgtattctcaacttgggccttgcttcaagcaggcaaacatacattgaagaatgcactttggtactgtttaaataacaacacatcagcccacttgattccatgccatgtccttgctgacagaaacatccccaacagggcatgccctggtccaagtcctctgtctttgtcaaaatgctcttctgatgagttggagaggaggcagccagcagtggcagtccacaaggatccaggtaccttctccaatcctaaagcagacagcaggttgaataaaaccaatacacaacctattttctaggcaggaggggaaaaggcccttaggacaataatatttgtacaaagagttgagagtaaacaaacagtgtatcaggttcaaaaaaaaaaaaactattcgttggcatttaaatttttttcccttgcatagtatctattctctcactaggacttttaagtgctctgctggaggctcagcgttggtaataccatgtttgatgcaaacttgaacccaatgctctcattggtggcacagctttggagggtggtggccccaagaaggggcaatctgcctgctgctatattaatctggaaccagggccaacagctactcttgaactatggtatttgaagagcgagttcattgcctgttttaccttaaatgacaggaaaggaagatgaacaaaccttgctttgccttggcttcaaactagttcttgatttaagacaccagaaagggagagagggagtctgcttagagtttgaggttgcctctcacaagatgacagttaaaagttgccaccttacttaaaaggcattaaggaggcatttactcacaaaggagagagagtaaatttttttcttaagaggaaaaaaatactgataatacatagaacaatctgcacatccagtcttggcactttttccaatttgactgatctctaaactggtgacccttgcatatatcttagtctcttttctacaatcttcttcagaaagctacagcagctaacaatcatgtataaagatgcatttcctagatcatcttcagaagaaaatctcttcagcactttccctagaatctgtctcctgaccaccccgccccagacctgctttctcttttgagaattcataaccaggtatgtttagataccagttcaaaagaccactctatgggttgatgaggaaaaggctgcctgaggacaatttaagaccataatgagtttccaatttttaaagaaaatttggctagctggcttttaattcttaattaaaatcattaaatttaattaaaattattccaatcaaaatatatcactttccaagattccacattcatattacttacttatactatggagactttctctacctgagcatgtattcaggggctataggtacatttaactctaactaactgaaaaaaatcaggaagaaaaaactattaaaataaaataacctcctaaatcatttgggggtatccccatcattggtgcgtgtgtctgcgtgtgtcaaactttaatgattatttattcagaccctggaaaaccacactataaaatagggcactggatcacaagttcgtttggttaaaaaaaaaaaaaaaaaaaagtgggggcggggggcagagaagaagtttaacttggatgatttccatgcccattccagctgtaacattctatgactgtgacccagcctttgttctcttttctcactctcctactagacatttcaatgaaaagttaggcaggaaaaaggaaaggaatcccaagttgctgccagctctgatgagagatcaggttgggggagagattaggtggttactgaattgaggtgtgggcctcccctgaccatgtcagtgatccacaacccacctcacttcttggggcttaagctaaaagcagcttctgaagagatgttaatgtcctgtaatcactagaggagaaaattcattctccttccataacattacttagtaaaggaaaagcggtggtgcaatcaaattcacaaataccaatggggtctctaaaatgtagaatgcagcttgctgggtgctggtcagttttctaaatgggaccagaaatggctttcctaagaccataaatgaactctccagccacacatacattcaaatgcattccattagacattgagctcctcaagagcagg

SEQ ID NO: 34588 - DNA, 4958 bp, Homo sapiens
  source 1..4958: mol_type = unassigned DNA
agtttgggtcttgctggcgcgaggtagtcagaggacgtggccgcggggcttgctgggacttgaggttagacgtcccggccgtcggttgccgcctacactgtctgccgtcgcgtcgcagttactaaggcgtggggaagatagcggcaggcaccgcagtggagcggctccgagatccccggggggctcgcaggcgcgcatccctcctgactgggacgtcgcctccgcagacccctcggaggctgaagcgacgccggaggcaggcaaagaaacaagtgaagaaacaaaaaaaaaaggaagttaaggggccattcccaaagtcaaagatcaaggagatggccttctcaggaatctacaagctggatgatgggaagccttacctgaacaactgcttcccagccagaaatctgcttcgcgtgccggaggaaggccaaggacactggttagtggttcagaaaggtaacctcaagaagaagcccaagggtttggttggagcacaagctgaacgtcgggaaagcctgaaggcgacttcttttgagttcaaggggaagaaagagtctcggcgggaaaatcaggtggaccttcctggacatatcctggaccaggcttttctgctgaagcaccactgtgtgaggaagccatcagatctgtgcaccattaatgccaaggaaaatgacttcaagcattttcattctgtgatttatatcaatgcctcagaaaacctgctgcctctagaggcatttcacacgtttccagccctaaaggaactggatctcgcatttaatggcatcaaaactatctacgtgaaatatggagactttaagttattagaattcttggacctttccttcaacagcctgactgtggaggccatctgtgatttggggattctgccacacctccgtgtcctgctcctcacaggcaatggccttacctccctgccgcccaatttggccgtcgcagaacaggaggcatctgtaacatcgctgacaagcaagaggtacatcctgaggttcccagcgctggagacactgatgctggatgacaacagactctccaaccccagttgctttgccagcctggctgggctcaggagactgaagaagttaagcttggatgaaaacaggattatcaggatcccatacctacagcaagttcagctctatgacgagtcagtagactggaatggaggcaggggaagtccccataaagagccccaattcatgctgcagtccaagccaaggatgcttgaggactcagatgagcaactggattatactgtactgcccatgaaaaaggatgttgaccggacaacaaccaagatatgttcacttcctcccatattcgagatccttcctgtgaagtcactgaaggccaggaaccagacgctggccccacccttcccagagctgagataccttagcctggcctacaacaagatcgcaaaagaggatgctgtcctaccagtagctctcttcccatctctctgcgagttcgtctttcataacaaccctctggtggcccatacacgaggggtccctccactgctgaagagcttcctccaggagcgactgggaatccacttaattcgaaggaagatagtaaagcctaagcatcatgttttgatgtctcggaaggaatcatggaaggtgaaaagcgaaatcccaaaggtgccgaagcagcctctggtgctccatcacccgcgcatgacgacaaccaagtctccctcaaaggatatgctagagccagaggcagagctggctgaagatctgcccactaccaaaagcacttctgtggagtcagagatgcccactgagaacctggaaggccattccccgtcttgccggaccttcgtgccactgcctcccatctgctccaactccactgtgcatagtgaagagaccctgtcccacctgagtgacacaactgtccgcctcagcccagagcgcccatcagatgaggactccaagagcacagagtccatcttcctgacccaggtgagtgaactgccttcctccgtcatccataaggatgatttagagttaaaggagaaagaccaaaagaaaccaccaacggcacccagagaggtgaaagggactcggaggaaactcccaactgccttccttcccagcaagtaccacggctatgaagaactgctgacagccaagcctgatccagccttcattgagccaaagggaatccagaagaatgcacaagccctgcaacaaatgctgaagcacccactcctgtgccactcctccaagcccaagctggacactcttcagaaaccctatgttcacaaagagaaacgggcccagagaatcccgattccacccccaaagaagactagagcccaacttctggatgacatcttcattcgcttgcgggatccccggaacattacagaggctccactaggtgctgtcctgcaccagtggacagaacggcggctggtgaaccacaagcagtacctggaggccaagaggctgttgaaggagttccaggcacgttaccggcagctggtgagtggctctctgcgcacagtgttcgggactaccccgctccccatggcctgcccagcgctgagtgagagccagcccaagttcggccacttcctcgagttcatggatgagttctgccaggagcccacagccagtgactcacaaggctagagctgtgcatgggggctgtgtgcaccacccggcctgtgccccagctctccccgagggctctgtgccctggaccgcacctcaaggttgaccagccggccacaggcctcagagctcagctgggccccacttgctggccacaaggtggcatccccttgtcaggatctcccctccttggcccaggcatgacctggtgcctggcccagcggcaataaagagtgggtgcacagggcaatagactgggtgccacatgcattctttcttggaacccaggccacagcagcattgtcacacttccctctaaaaatggttttccagttcagatgcaacagggatacatttgttctctgttgtatgagaaactgacaccaaggggatcttaacaaattcctgaacaatggctccaaaaaagggtatttttaaaaaccagatcttgtgagtacagccctaatgtgcagggacagtgtcatcctgtatattcgttctttactcagactctttcttggttccttcattaggagcatgaatggttgaatgtgaacatgacagtaaattggagcaaactgtaaactggacataacttatgccaaaagacgtagttgtacaccatggaaaccccatccctgctcctaatctctactgccattctgaatgccaaagcaagacatccaacatggggcatctcccagagcacatacagcaccaaaaatccacacacagcctaagcttaacccatgtttttgtctgagattgttcaccagagacaagactctgactataaacagaacatccactttcatgagtttcctttactgtattctcaacttgggccttgcttcaagcaggcaaacatacattgaagaatgcactttggtactgtttaaataacaacacatcagcccacttgattccatgccatgtccttgctgacagaaacatccccaacagggcatgccctggtccaagtcctctgtctttgtcaaaatgctcttctgatgagttggagaggaggcagccagcagtggcagtccacaaggatccaggtaccttctccaatcctaaagcagacagcaggttgaataaaaccaatacacaacctattttctaggcaggaggggaaaaggcccttaggacaataatatttgtacaaagagttgagagtaaacaaacagtgtatcaggttcaaaaaaaaaaaaactattcgttggcatttaaatttttttcccttgcatagtatctattctctcactaggacttttaagtgctctgctggaggctcagcgttggtaataccatgtttgatgcaaacttgaacccaatgctctcattggtggcacagctttggagggtggtggccccaagaaggggcaatctgcctgctgctatattaatctggaaccagggccaacagctactcttgaactatggtatttgaagagcgagttcattgcctgttttaccttaaatgacaggaaaggaagatgaacaaaccttgctttgccttggcttcaaactagttcttgatttaagacaccagaaagggagagagggagtctgcttagagtttgaggttgcctctcacaagatgacagttaaaagttgccaccttacttaaaaggcattaaggaggcatttactcacaaaggagagagagtaaatttttttcttaagaggaaaaaaatactgataatacatagaacaatctgcacatccagtcttggcactttttccaatttgactgatctctaaactggtgacccttgcatatatcttagtctcttttctacaatcttcttcagaaagctacagcagctaacaatcatgtataaagatgcatttcctagatcatcttcagaagaaaatctcttcagcactttccctagaatctgtctcctgaccaccccgccccagacctgctttctcttttgagaattcataaccaggtatgtttagataccagttcaaaagaccactctatgggttgatgaggaaaaggctgcctgaggacaatttaagaccataatgagtttccaatttttaaagaaaatttggctagctggcttttaattcttaattaaaatcattaaatttaattaaaattattccaatcaaaatatatcactttccaagattccacattcatattacttacttatactatggagactttctctacctgagcatgtattcaggggctataggtacatttaactctaactaactgaaaaaaatcaggaagaaaaaactattaaaataaaataacctcctaaatcatttgggggtatccccatc

SEQ ID NO: 34589 - DNA, 4832 bp, Homo sapiens
  source 1..4832: mol_type = unassigned DNA
agtttgggtcttgctggcgcgaggtagtcagaggacgtggccgcggggcttgctgggacttgaggttagacgtcccggccgtcggttgccgcctacactgtctgccgtcgcgtcgcagttactaaggcgtggggaagatagcggcaggcaccgcagtggagcggctccgagatccccggggggctcgcaggcgcgcatccctcctgactgggacgtcgcctccgcagacccctcggaggctgaagcgacgccggaggcaggcaaagaaacaagtgaagaaacaaaaaaaaaaggaagttaaggggccattcccaaagtcaaagatcaaggagatggccttctcaggaatctacaagctggatgatgggaagccttacctgaacaactgcttcccagccagaaatctgcttcgcgtgccggaggaaggccaaggacactggttagtggttcagaaaggtaacctcaagaagaagcccaagggtttggttggagcacaagctgaacgtcgggaaagcctgaaggcgacttcttttgagttcaaggggaagaaagagtctcggcgggaaaatcaggtggaccttcctggacatatcctggaccaggcttttctgctgaagcaccactgtgtgaggaagccatcagatctgtgcaccattaatgccaaggaaaatgacttcaagcattttcattctgtgatttatatcaatgcctcagaaaacctgctgcctctagaggcatttcacacgtttccagccctaaaggaactggatctcgcatttaatggcatcaaaactatctacgtgaaatatggagactttaagttattagaattcttggacctttccttcaacagcctgactgtggaggccatctgtgatttggggattctgccacacctccgtgtcctgctcctcacaggcaatggccttacctccctgccgcccaatttggccgtcgcagaacaggaggcatctgtaacatcgctgacaagcaagaggtacatcctgaggttcccagcgctggagacactgatgctggatgacaacagactctccaaccccagttgctttgccagcctggctgggctcaggagactgaagaagttaagcttggatgaaaacaggattatcaggatcccatacctacagcaagttcagctctatgacgagtcagtagactggaatggaggcaggggaagtccccataaagagccccaattcatgctgcagtccaagccaaggatgcttgaggactcagatgagcaactggattatactgtactgcccatgaaaaaggatgttgaccggacaatcgcaaaagaggatgctgtcctaccagtagctctcttcccatctctctgcgagttcgtctttcataacaaccctctggtggcccatacacgaggggtccctccactgctgaagagcttcctccaggagcgactgggaatccacttaattcgaaggaagatagtaaagcctaagcatcatgttttgatgtctcggaaggaatcatggaaggtgaaaagcgaaatcccaaaggtgccgaagcagcctctggtgctccatcacccgcgcatgacgacaaccaagtctccctcaaaggatatgctagagccagaggcagagctggctgaagatctgcccactaccaaaagcacttctgtggagtcagagatgcccactgagaacctggaaggccattccccgtcttgccggaccttcgtgccactgcctcccatctgctccaactccactgtgcatagtgaagagaccctgtcccacctgagtgacacaactgtccgcctcagcccagagcgcccatcagatgaggactccaagagcacagagtccatcttcctgacccaggtgagtgaactgccttcctccgtcatccataaggatgatttagagttaaaggagaaagaccaaaagaaaccaccaacggcacccagagaggtgaaagggactcggaggaaactcccaactgccttccttcccagcaagtaccacggctatgaagaactgctgacagccaagcctgatccagccttcattgagccaaagggaatccagaagaatgcacaagccctgcaacaaatgctgaagcacccactcctgtgccactcctccaagcccaagctggacactcttcagaaaccctatgttcacaaagagaaacgggcccagagaatcccgattccacccccaaagaagactagagcccaacttctggatgacatcttcattcgcttgcgggatccccggaacattacagaggctccactaggtgctgtcctgcaccagtggacagaacggcggctggtgaaccacaagcagtacctggaggccaagaggctgttgaaggagttccaggcacgttaccggcagctggtgagtggctctctgcgcacagtgttcgggactaccccgctccccatggcctgcccagcgctgagtgagagccagcccaagttcggccacttcctcgagttcatggatgagttctgccaggagcccacagccagtgactcacaaggctagagctgtgcatgggggctgtgtgcaccacccggcctgtgccccagctctccccgagggctctgtgccctggaccgcacctcaaggttgaccagccggccacaggcctcagagctcagctgggccccacttgctggccacaaggtggcatccccttgtcaggatctcccctccttggcccaggcatgacctggtgcctggcccagcggcaataaagagtgggtgcacagggcaatagactgggtgccacatgcattctttcttggaacccaggccacagcagcattgtcacacttccctctaaaaatggttttccagttcagatgcaacagggatacatttgttctctgttgtatgagaaactgacaccaaggggatcttaacaaattcctgaacaatggctccaaaaaagggtatttttaaaaaccagatcttgtgagtacagccctaatgtgcagggacagtgtcatcctgtatattcgttctttactcagactctttcttggttccttcattaggagcatgaatggttgaatgtgaacatgacagtaaattggagcaaactgtaaactggacataacttatgccaaaagacgtagttgtacaccatggaaaccccatccctgctcctaatctctactgccattctgaatgccaaagcaagacatccaacatggggcatctcccagagcacatacagcaccaaaaatccacacacagcctaagcttaacccatgtttttgtctgagattgttcaccagagacaagactctgactataaacagaacatccactttcatgagtttcctttactgtattctcaacttgggccttgcttcaagcaggcaaacatacattgaagaatgcactttggtactgtttaaataacaacacatcagcccacttgattccatgccatgtccttgctgacagaaacatccccaacagggcatgccctggtccaagtcctctgtctttgtcaaaatgctcttctgatgagttggagaggaggcagccagcagtggcagtccacaaggatccaggtaccttctccaatcctaaagcagacagcaggttgaataaaaccaatacacaacctattttctaggcaggaggggaaaaggcccttaggacaataatatttgtacaaagagttgagagtaaacaaacagtgtatcaggttcaaaaaaaaaaaaactattcgttggcatttaaatttttttcccttgcatagtatctattctctcactaggacttttaagtgctctgctggaggctcagcgttggtaataccatgtttgatgcaaacttgaacccaatgctctcattggtggcacagctttggagggtggtggccccaagaaggggcaatctgcctgctgctatattaatctggaaccagggccaacagctactcttgaactatggtatttgaagagcgagttcattgcctgttttaccttaaatgacaggaaaggaagatgaacaaaccttgctttgccttggcttcaaactagttcttgatttaagacaccagaaagggagagagggagtctgcttagagtttgaggttgcctctcacaagatgacagttaaaagttgccaccttacttaaaaggcattaaggaggcatttactcacaaaggagagagagtaaatttttttcttaagaggaaaaaaatactgataatacatagaacaatctgcacatccagtcttggcactttttccaatttgactgatctctaaactggtgacccttgcatatatcttagtctcttttctacaatcttcttcagaaagctacagcagctaacaatcatgtataaagatgcatttcctagatcatcttcagaagaaaatctcttcagcactttccctagaatctgtctcctgaccaccccgccccagacctgctttctcttttgagaattcataaccaggtatgtttagataccagttcaaaagaccactctatgggttgatgaggaaaaggctgcctgaggacaatttaagaccataatgagtttccaatttttaaagaaaatttggctagctggcttttaattcttaattaaaatcattaaatttaattaaaattattccaatcaaaatatatcactttccaagattccacattcatattacttacttatactatggagactttctctacctgagcatgtattcaggggctataggtacatttaactctaactaactgaaaaaaatcaggaagaaaaaactattaaaataaaataacctcctaaatcatttgggggtatccccatc

SEQ ID NO: 34590 - DNA, 986 bp, Homo sapiens
  source 1..986: mol_type = unassigned DNA
cgagatccccggggggctcgcaggcgcgcatccctcctgactgggacgtcgcctccgcagacccctcggaggctgaagcgacgccggaggcagggagatggccttctcaggaatctacaagctggatgatgggaagccttacctgaacaactgcttcccagccagaaatctgcttcgcgtgccggaggaaggccaaggacactggttagtggttcagaaaggtaacctcaagaagaagcccaagggtttggttggagcacaagctgaacgtcgggaaagcctgaaggcgacttcttttgagttcaaggggaagaaagagtctcggcgggaaaatcaggtggaccttcctggacatatcctggaccaggcttttctgctgaagcaccactgtgtgaggaagccatcagatctgtgcaccattaatgtgagtggcctgaagttctccaaggccaaggaaaatgacttcaagcattttcattctgtgatttatatcaatgcctcagaaaacctgctgcctctagaggcatttcacacgtttccagccctaaaggaactggatctcgcatttaatggcatcaaaactatctacgtgaaatatggagactttaagttattagaattcttggacctttccttcaacagcctgactgtggaggccatctgtgatttggggattctgccacacctccgtgtcctgctcctcacaggcaatggccttacctccctgccgcccaatttggccgtcgcagaacaggaggcatctgtaacatcgctgacaagcaagaggtacatcctgaggttcccagcgctggagacactgatgctggatgacaacagactctccaaccccagttgctttgccagcctggctgggctcaggagactgaagaagttaagcttggatgaaaacaggattatcaggatcccatacctacagcaagttcagctctatgacgagtcagtagactggaatggaggcaggggaa

SEQ ID NO: 34591 - DNA, 2505 bp, Homo sapiens
  source 1..2505: mol_type = unassigned DNA
gtcccggccgtcggttgccgcctacactgtctgccgtcgcgtcgcagttactaaggcgtggggaagatagcggcaggcaccgcagtggagcggctccgagatccccggggggctcgcaggcgcgcatccctcctgactgggacgtcgcctccgcagacccctcggaggctgaagcgacgccggaggcaggcaaagaaacaagtgaagaaacaaaaaaaaaaggaagttaaggggccattcccaaagtcaaagatcaaggagatggccttctcaggaatctacaagctggatgatgggaagccttacctgaacaactgcttcccagccagaaatctgcttcgcgtgccggaggaaggccaaggacactggttagtggttcagaaaggtaacctcaagaagaagcccaagggtttggttggagcacaagctgaacgtcgggaaagcctgaaggcgacttcttttgagttcaaggggaagaaagagtctcggcgggaaaatcaggtggaccttcctggacatatcctggaccaggcttttctgctgaagcaccactgtgtgaggaagccatcagatctgtgcaccattaatgccaaggaaaatgacttcaagcattttcattctgtgatttatatcaatgcctcagaaaacctgctgcctctagaggcatttcacacgtttccagccctaaaggaactggatctcgcatttaatggcatcaaaactatctacgtgaaatatggagactttaagttattagaattcttggacctttccttcaacagcctgactgtggaggccatctgtgatttggggattctgccacacctccgtgtcctgctcctcacaggcaatggccttacctccctgccgcccaatttggccgtcgcagaacaggaggcatctgtaacatcgctgacaagcaagaggtacatcctgaggttcccagcgctggagacactgatgctggatgacaacagactctccaaccccagttgctttgccagcctggctgggctcaggagactgaagaagttaagcttggatgaaaacaggattatcaggatcccatacctacagcaagttcagctctatgacgagtcagtagactggaatggaggcaggggaagtccccataaagagccccaattcatgctgcagtccaagccaaggatgcttgaggactcagatgagcaactggattatactgtactgcccatgaaaaaggatgttgaccggacaggggtccctccactgctgaagagcttcctccaggagcgactgggaatccacttaattcgaaggaagatagtaaagcctaagcatcatgttttgatgtctcggaaggaatcatggaaggtgaaaagcgaaatcccaaaggtgccgaagcagcctctggtgctccatcacccgcgcatgacgacaaccaagtctccctcaaaggatatgctagagccagaggcagagctggctgaagatctgcccactaccaaaagcacttctgtggagtcagagatgcccactgagaacctggaaggccattccccgtcttgccggaccttcgtgccactgcctcccatctgctccaactccactgtgcatagtgaagagaccctgtcccacctgagtgacacaactgtccgcctcagcccagagcgcccatcagatgaggactccaagagcacagagtccatcttcctgacccaggtgagtgaactgccttcctccgtcatccataaggatgatttagagttaaaggagaaagaccaaaagaaaccaccaacggcacccagagaggtgaaagggactcggaggaaactcccaactgccttccttcccagcaagtaccacggctatgaagaactgctgacagccaagcctgatccagccttcattgagccaaagggaatccagaagaatgcacaagccctgcaacaaatgctgaagcacccactcctgtgccactcctccaagcccaagctggacactcttcagaaaccctatgttcacaaagagaaacgggtgctgtcctgcaccagtggacagaacggcggctggtgaaccacaagcagtacctggaggccaagaggctgttgaaggagttccaggcacgttaccggcagctggtgagtggctctctgcgcacagtgttcgggactaccccgctccccatggcctgcccagcgctgagtgagagccagcccaagttcggccacttcctcgagttcatggatgagttctgccaggagcccacagccagtgactcacaaggctagagctgtgcatgggggctgtgtgcaccacccggcctgtgccccagctctccccgagggctctgtgccctggaccgcacctcaaggttgaccagccggccacaggcctcagagctcagctgggccccacttgctggccacaaggtggcatccccttgtcaggatctcccctccttggcccaggcatgacctggtgcctggcccagcggcaataaagagtgggtgcacagggcaa

SEQ ID NO: 34592 - DNA, 4695 bp, Homo sapiens
  source 1..4695: mol_type = unassigned DNA
ggccgcggggcttgctgggacttgaggttagacgtcccggccgtcggttgccgcctacactgtctgccgtcgcgtcgcagttactaaggcgtggggaagatagcggcaggcaccgcagtggagcggctccgagatccccggggggctcgcaggcgcgcatccctcctgactgggacgtcgcctccgcagacccctcggaggctgaagcgacgccggaggcaggccaaggacactggttagtggttcagaaaggtaacctcaagaagaagcccaagggtttggttggagcacaagctgaacgtcgggaaagcctgaaggcgacttcttttgagttcaaggggaagaaagagtctcggcgggaaaatcaggtggaccttcctggacatatcctggaccaggcttttctgctgaagcaccactgtgtgaggaagccatcagatctgtgcaccattaatgtgagtggcctgaagttctccaaggccaaggaaaatgacttcaagcattttcattctgtgatttatatcaatgcctcagaaaacctgctgcctctagaggcatttcacacgtttccagccctaaaggaactggatctcgcatttaatggcatcaaaactatctacgtgaaatatggagactttaagttattagaattcttggacctttccttcaacagcctgactgtggaggccatctgtgatttggggattctgccacacctccgtgtcctgctcctcacaggcaatggccttacctccctgccgcccaatttggccgtcgcagaacaggaggcatctgtaacatcgctgacaagcaagaggtacatcctgaggttcccagcgctggagacactgatgctggatgacaacagactctccaaccccagttgctttgccagcctggctgggctcaggagactgaagaagttaagcttggatgaaaacaggattatcaggatcccatacctacagcaagttcagctctatgacgagtcagtagactggaatggaggcaggggaagtccccataaagagccccaattcatgctgcagtccaagccaaggatgcttgaggactcagatgagcaactggattatactgtactgcccatgaaaaaggatgttgaccggacagaggttgtgttttcatcttaccctggattttcaacctcagagatcgcaaaagaggatgctgtcctaccagtagctctcttcccatctctctgcgagttcgtctttcataacaaccctctggtggcccatacacgaggggtccctccactgctgaagagcttcctccaggagcgactgggaatccacttaattcgaaggaagatagtaaagcctaagcatcatgttttgatgtctcggaaggaatcatggaaggtgaaaagcgaaatcccaaaggtgccgaagcagcctctggtgctccatcacccgcgcatgacgacaaccaagtctccctcaaaggatatgctagagccagaggcagagctggctgaagatctgcccactaccaaaagcacttctgtggagtcagagatgcccactgagaacctggaaggccattccccgtcttgccggaccttcgtgccactgcctcccatctgctccaactccactgtgcatagtgaagagaccctgtcccacctgagtgacacaactgtccgcctcagcccagagcgcccatcagatgaggactccaagagcacagagtccatcttcctgacccaggtgagtgaactgccttcctccgtcatccataaggatgatttagagttaaaggagaaagaccaaaagaaaccaccaacggcacccagagaggtgaaagggactcggaggaaactcccaactgccttccttcccagcaagtaccacggctatgaagaactgctgacagccaagcctgatccagccttcattgagccaaagggaatccagaagaatgcacaagccctgcaacaaatgctgaagcacccactcctgtgccactcctccaagcccaagctggacactcttcagaaaccctatgttcacaaagagaaacgggcccagagaatcccgattccacccccaaagaagactagagcccaacttctggatgacatcttcattcgcttgcgggatccccggaacattacagaggctccactaggtgctgtcctgcaccagtggacagaacggcggctggtgaaccacaagcagtacctggaggccaagaggctgttgaaggagttccaggcacgttaccggcagctggtgagtggctctctgcgcacagtgttcgggactaccccgctccccatggcctgcccagcgctgagtgagagccagcccaagttcggccacttcctcgagttcatggatgagttctgccaggagcccacagccagtgactcacaaggctagagctgtgcatgggggctgtgtgcaccacccggcctgtgccccagctctccccgagggctctgtgccctggaccgcacctcaaggttgaccagccggccacaggcctcagagctcagctgggccccacttgctggccacaaggtggcatccccttgtcaggatctcccctccttggcccaggcatgacctggtgcctggcccagcggcaataaagagtgggtgcacagggcaatagactgggtgccacatgcattctttcttggaacccaggccacagcagcattgtcacacttccctctaaaaatggttttccagttcagatgcaacagggatacatttgttctctgttgtatgagaaactgacaccaaggggatcttaacaaattcctgaacaatggctccaaaaaagggtatttttaaaaaccagatcttgtgagtacagccctaatgtgcagggacagtgtcatcctgtatattcgttctttactcagactctttcttggttccttcattaggagcatgaatggttgaatgtgaacatgacagtaaattggagcaaactgtaaactggacataacttatgccaaaagacgtagttgtacaccatggaaaccccatccctgctcctaatctctactgccattctgaatgccaaagcaagacatccaacatggggcatctcccagagcacatacagcaccaaaaatccacacacagcctaagcttaacccatgtttttgtctgagattgttcaccagagacaagactctgactataaacagaacatccactttcatgagtttcctttactgtattctcaacttgggccttgcttcaagcaggcaaacatacattgaagaatgcactttggtactgtttaaataacaacacatcagcccacttgattccatgccatgtccttgctgacagaaacatccccaacagggcatgccctggtccaagtcctctgtctttgtcaaaatgctcttctgatgagttggagaggaggcagccagcagtggcagtccacaaggatccaggtaccttctccaatcctaaagcagacagcaggttgaataaaaccaatacacaacctattttctaggcaggaggggaaaaggcccttaggacaataatatttgtacaaagagttgagagtaaacaaacagtgtatcaggttcaaaaaaaaaaaaactattcgttggcatttaaatttttttcccttgcatagtatctattctctcactaggacttttaagtgctctgctggaggctcagcgttggtaataccatgtttgatgcaaacttgaacccaatgctctcattggtggcacagctttggagggtggtggccccaagaaggggcaatctgcctgctgctatattaatctggaaccagggccaacagctactcttgaactatggtatttgaagagcgagttcattgcctgttttaccttaaatgacaggaaaggaagatgaacaaaccttgctttgccttggcttcaaactagttcttgatttaagacaccagaaagggagagagggagtctgcttagagtttgaggttgcctctcacaagatgacagttaaaagttgccaccttacttaaaaggcattaaggaggcatttactcacaaaggagagagagtaaatttttttcttaagaggaaaaaaatactgataatacatagaacaatctgcacatccagtcttggcactttttccaatttgactgatctctaaactggtgacccttgcatatatcttagtctcttttctacaatcttcttcagaaagctacagcagctaacaatcatgtataaagatgcatttcctagatcatcttcagaagaaaatctcttcagcactttccctagaatctgtctcctgaccaccccgccccagacctgctttctcttttgagaattcataaccaggtatgtttagataccagttcaaaagaccactctatgggttgatgaggaaaaggctgcctgaggacaatttaagaccataatgagtttccaatttttaaagaaaatttggctagctggcttttaattcttaattaaaatcattaaatttaattaaaattattccaatcaaaatatatcactttccaagattccacattcatattacttacttatactatggagactttctctacctgagcatgtattcaggggctataggtacatttaactctaactaactgaaaaaaatcaggaagaaaaaactattaaaataaaataacctcctaaatcatttgggggtatccccatca

SEQ ID NO: 34593 - DNA, 1747 bp, Homo sapiens
  source 1..1747: mol_type = unassigned DNA
cggggcggacaggcctgggcggagcgggaggcggaggcgccgcgtaggcccgggaggccgggccggccgggctgcgagcgcctgccccatgcgccgccgcctctccgcacgatgttcccctcgcggaggaaagcggcgcagctgccctgggaggacggcaggtccgggttgctctccggcggcctccctcggaagtgttccgtcttccacctgttcgtggcctgcctctcgctgggcttcttctccctactctggctgcagctcagctgctctggggacgtggcccgggcagtcaggggacaagggcaggagacctcgggccctccccgtgcctgccccccagagccgccccctgagcactgggaagaagacgcatcctggggcccccaccgcctggcagtgctggtgcccttccgcgaacgcttcgaggagctcctggtcttcgtgccccacatgcgccgcttcctgagcaggaagaagatccggcaccacatctacgtgctcaaccaggtggaccacttcaggttcaaccgggcagcgctcatcaacgtgggcttcctggagagcagcaacagcacggactacattgccatgcacgacgttgacctgctccctctcaacgaggagctggactatggctttcctgaggctgggcccttccacgtggcctccccggagctccaccctctctaccactacaagacctatgtcggcggcatcctgctgctctccaagcagcactaccggctgtgcaatgggatgtccaaccgcttctggggctggggccgcgaggacgacgagttctaccggcgcattaagggagctgggctccagcttttccgcccctcgggaatcacaactgggtacaagacatttcgccacctgcatgacccagcctggcggaagagggaccagaagcgcatcgcagctcaaaaacaggagcagttcaaggtggacagggagggaggcctgaacactgtgaagtaccatgtggcttcccgcactgccctgtctgtgggcggggccccctgcactgtcctcaacatcatgttggactgtgacaagaccgccacaccctggtgcacattcagctgagctggatggacagtgaggaagcctgtacctacaggccatattgctcaggctcaggacaaggcctcaggtcgtgggcccagctctgacaggatgtggagtggccaggaccaagacagcaagctacgcaattgcagccacccggccgccaaggcaggcttgggctgggccaggacacgtggggtgcctgggacgctgcttgccatgcacagtgatcagagagaggctggggtgtgtcctgtccgggaccccccctgccttcctgctcaccctactctgacctccttcacgtgcccaggcctgtgggtagtggggagggctgaacaggacaacctctcatcacccccacttttgttccttcctgctgggctgcctcgtgcagagacacagtgtaggggccatgcagctggcgtaggtggcagttgggcctggtgagggttaggacttcagaaaccagagcacaagccccacagagggggaacagccagcaccgctctagctggttgttgccatgccggaatgtgggcctagtgttgccagatcttctgatttttcgaaagaaactagaatgctggattcttaagtgatatcttctgattttttaaatgatagcacctaaatgaaactttcaaaaagtatggcaggccagacaaaa

SEQ ID NO: 34594 - DNA, 2257 bp, Homo sapiens
  source 1..2257: mol_type = unassigned DNA
agtagagatggggtgttaccatatttgccaggctggtcttgagctcctgacctcgtgatgcacctgcctcggcctcccaaagtgctgggattacaggcgtgagccaccacgcctggccaggagatagaatttataagacctgatagctaatcgctgactcttaagattgtgaagtggattcctttgcagattactttggggagaaggtagggggagtacagaggaagcttctcccttcatggattcctcagctcctgtctcagcatactcaggaacttccagaggagcggcaaaggaatctggtgaattctgtttctttgtatttgctaaccaaaaggctgtctcctggcatcaccccagtgtctgtgatgttcagctgtttttccagtttctgaaatcagtgcctgtgctgtacccagccctcatccttgccctgagcagctctgaccaggactcagtcacagaaagtaagagagcattgaggagccggggcagctctgtgaactgggagtggttcagagggcttcccgagagcgggtggcatgggttgggtctagagaggcaagcaggattcggatgcatggtagtggcatgagcagaaacattaaagttgcttctgtactaattcccaggtgcttggggtagacgagttatgtgcagcctcctcgtggggaggccagagaacgggtctgtcacagggccagccctgccccgccctcctgaccctgtcccgcgcttgctccaggtccgggttgctctccggcggcctccctcggaagtgttccgtcttccacctgttcgtggcctgcctctcgctgggcttcttctccctactctggctgcagctcagctgctctggggacgtggcccgggcagtcaggggacaagggcaggagacctcgggccctccccgtgcctgccccccagagccgccccctgagcactgggaagaagacgcatcctggggcccccaccgcctggcagtgctggtgcccttccgcgaacgcttcgaggagctcctggtcttcgtgccccacatgcgccgcttcctgagcaggaagaagatccggcaccacatctacgtgctcaaccaggtggaccacttcaggttcaaccgggcagcgctcatcaacgtgggcttcctggagagcagcaacagcacggactacattgccatgcacgacgttgacctgctccctctcaacgaggagctggactatggctttcctgaggctgggcccttccacgtggcctccccggagctccaccctctctaccactacaagacctatgtcggcggcatcctgctgctctccaagcagcactaccggctgtgcaatgggatgtccaaccgcttctggggctggggccgcgaggacgacgagttctaccggcgcattaagggagctgggctccagcttttccgcccctcgggaatcacaactgggtacaagacatttcgccacctgcatgacccagcctggcggaagagggaccagaagcgcatcgcagctcaaaaacaggagcagttcaaggtggacagggagggaggcctgaacactgtgaagtaccatgtggcttcccgcactgccctgtctgtgggcggggccccctgcactgtcctcaacatcatgttggactgtgacaagaccgccacaccctggtgcacattcagctgagctggatggacagtgaggaagcctgtacctacaggccatattgctcaggctcaggacaaggcctcaggtcgtgggcccagctctgacaggatgtggagtggccaggaccaagacagcaagctacgcaattgcagccacccggccgccaaggcaggcttgggctgggccaggacacgtggggtgcctgggacgctgcttgccatgcacagtgatcagagagaggctggggtgtgtcctgtccgggaccccccctgccttcctgctcaccctactctgacctccttcacgtgcccaggcctgtgggtagtggggagggctgaacaggacaacctctcatcacccccacttttgttccttcctgctgggctgcctcgtgcagagacacagtgtaggggccatgcagctggcgtaggtggcagttgggcctggtgagggttaggacttcagaaaccagagcacaagccccacagagggggaacagccagcaccgctctagctggttgttgccatgccggaatgtgggcctagtgttgccagatcttctgatttttcgaaagaaactagaatgctggattctt

SEQ ID NO: 34595 - DNA, 4263 bp, Homo sapiens
  source 1..4263: mol_type = unassigned DNA
gcggccgcgggagctgcggggagcgcgggggcggcccggagcgtgccggggtccccgcgcctcgctcgccggccgcgctccgaagatggtggcggcgccgtgcgcccggaggctggcccggcgctcgcactcggcgctgctcgcggcgctcacggtgctgctgctgcagacgctggtcgtgtggaatttcagcagcctcgactccggggccggggagcgccgcgggggcgcagcggtcggcggcggggagcagccgcccccggccccggccccgcgccgggagcgccgggacctgcccgccgagccggctgcagcccgaggaggaggaggaggcggcggcggaggaggaggaggacgggggccccaggcgcgggcgcggggaggcggccccggagaaccgcggggacagcagccggccagccggggggcactgcccgcccgggctctggatccacacccaagtccgctcatcaccctggagactcaggatggctacttttctcatcggccgaaagagaaagtgcgaacagacagcaacaacgagaactctgtccccaaagactttgagaatgtcgacaacagcaacttcgcacccaggactcaaaagcagaagcaccagcctgagttggcgaagaagccaccgagtagacagaaggagcttttgaaaaggaagctggaacagcaggagaaaggaaaaggacatacattccctgggaaaggccccggtgaggtgctgcctcccggggacagagccgcagccaacagcagccacgggaaggatgtgtccagaccgcctcatgccaggaaaactgggggcagctcccccgagaccaagtatgaccagccccctaagtgtgacatctcaggcaaggaggccatctctgccctgtcccgtgctaagtccaagcactgccgccaggagattggggagacttactgccgccacaagttagggctgctgatgcctgagaaggtgactcggttctgccccctcgagggtaaagccaacaagaacgtgcagtgggacgaggactccgtggagtacatgccagccaacccggtcagaatcgcctttgtcctggtggtccacggccgtgcctctcggcagttgcagcgcatgttcaaggccatctaccacaaagaccacttctactacatccacgtggacaagcgctctaattacctgcatcggcaagtgctccaggtctccaggcagtacagcaatgtccgcgtcaccccctggagaatggccaccatctggggaggagccagcctcctgtccacctacctgcagagcatgcgggacctcctggagatgaccgactggccctgggacttcttcatcaacctgagtgcggccgactaccccatcaggacaaatgaccagttggtggcgtttctctcccgataccgagatatgaatttcttgaagtcacacggccgggacaatgcaaggttcattcggaagcagggcctggatcggctcttcctggagtgcgacgctcacatgtggcgcctgggagatcggcggatcccagagggcattgccgtggatggcggttcggactggttcctgctgaaccggaggtttgtagaatatgtgaccttctccacagacgatctggtgaccaagatgaaacagttctactcctacaccctgcttcctgctgagtccttcttccatacggtcctggagaacagcccccactgcgacaccatggtggacaacaacctgcgcatcaccaactggaatcgcaagctgggctgcaagtgccagtacaagcacatcgtggactggtgcggctgctcccccaatgacttcaagccgcaggacttccaccgcttccagcagacagcccggcctaccttctttgcccgcaagtttgaagccgtggtgaatcaggaaatcattgggcagctggactattacctgtacgggaactaccctgcaggtaccccgggcctgcgctcctactgggagaatgtctacgatgagcctgacggcatccacagcctgagcgacgtgacactcaccttgtaccactcctttgcccgcctgggtcttcgacgggccgagacgtccctgcacacggatggggagaacagctgccgatactacccaatgggccacccagcatctgtgcacctctacttccttgctgaccgcttccagggctttctgatcaagcatcatgctaccaatctggctgtgagcaaactagagactctggagacctgggtgatgccgaaaaaagtcttcaagatcgcaagcccacccagtgactttgggaggcttcagttttccgaggtcggcactgactgggatgccaaggagaggctattccgcaactttgggggtcttctggggcccatggatgagccggtgggtatgcagaagtgggggaagggacctaatgtgaccgtgaccgtcatttgggtggatcccgtcaatgtcatcgcagccacctacgacatcctcattgagtccactgccgaattcacacactacaagccccctttgaacttgcccctgaggcctggggtctggacagtgaaaattctccaccactgggtgccagttgcagagaccaaattcctcgttgcgcctctgaccttctcgaacaggcagcccatcaaacctgaggaggcactgaagctgcacaatgggcccctccgcaatgcctacatggagcagagcttccagagcctaaaccccgtcctcagcctgcccatcaaccccgcccaggtggaacaggcacggaggaacgcagcctccacgggcacagcgctggagggatggctggactcgttggtgggcgggatgtggactgccatggacatctgtgccacgggccccacagcctgcccggtcatgcagacctgcagccagacggcctggagctccttcagccctgaccccaagtcggagctgggggcagtcaaacctgatggccggctcaggtagcactgggcacgaggagtgggccacagcaggatctcaacgggaaagcagccagaggggttgtggggcctgaaccccggcctcccaccctgggggaggccctctgtgaatgggtctctcctggccatagaatgatggaaagggaaggtcagcaggtcaaagcaggatcagccaacaacctgcctttggcaagctgcgggtgggatggctcagtccctgcactgtgactgtctcacctcttctggttgatcctcaagtcctacaggttccttgtcttccccttccagtgacccacccctgaccccagacgtgtgattttcagacttttctttcgagcagcagaacttcgtttacggagcacagtcataagtggaggttcagggtgctgacgaaatccaagctgctctggttgaagctgacaagtgcgaggttccctcccaaagctcagccctctgggcggtccccttgcccagggtatctcctacggtacctcttcagaacccaagggctctgcaaatgccagtttgacaagcactgcccagaccaaccatgggttcaaactccagccctgccctttggttcatttttctgcttctcttggctgggggactctggtgccagccttgaaagtcatggtcgtgggccctttcccatggaggctgcagccttaggagagctctgagcctctcagcagccctccttgggttgaactattctccttagtaactaggtaagtgggaaagccttttgatgtggcatggccaaggtccagccacaagtgcaactgccacctgtccaggggtctgggcctccttccctcaaggctgccacacaaagtagcagaaataggatgatgtttgtgagcaccagactcaagaccatgaccttctttgatccttgaaaatgggaactttgacagccatgaccatgaaactcacaaggcaacgcgatgaaactcacaaagcaatgcttggagcaaaactcctgagctagacagcacagcagcacccatcccctgccagagcccttccgttctgaggtcagacacacaaaaccttcgtcaattgcacaccggtgctgttgggagtgaccaaaccacatgaaccagacttttcccgtccaggaaatagcatttcagatttggtttttaatttcatgcccttcggccacaggctcaacgggacatgcaacataaaaatgggaaggttatttaaacaacaaaaaacagtatgatttaagtgttgagttaccagaaacccaaaaggtttccttgccacgagccccctggagtgtcatccctg

SEQ ID NO: 34596 - DNA, 3507 bp, Homo sapiens
  source 1..3507: mol_type = unassigned DNA
gcggccgggttgcagggctgggcgcgcgccccgcgtcccgggcaggaagatggtggcgagcgcgcgagtgcagaagctggtgcggcgctacaagctggcgattgccacggcgctggccatcctgctgctgcagggcctggtagtgtggagcttcagcggcctggaggaggacgaggcgggcgagaaaggaaggcagaggaagccacggccactggaccctggcgagggttccaaggacacagacagttcagcagggcgacggggcagcacaggcagaaggcatgggcgctggcggggccgtgctgagagcccaggagtgcccgtggccaaggtggtacgggcagtaaccagccggcagagagccagccggcgggtcccacctgccccacccccggaagccccaggccgccagaacctgagtggggcagcagctggggaggcgctggtaggggcagctggcttcccaccacacggagatacagggagcgtggagggcgccccccagcccacggacaatggcttcacccccaagtgcgagatcgtgggcaaggacgcactgtctgcactggcccgggccagcaccaagcagtgccagcaggagatcgccaatgtggtgtgcctgcaccaggctgggagcctcatgcccaaggctgtgccccggcactgtcagctgactgggaagatgagccccggcatccagtgggatgagagccaagcccagcagcccatggatggccccccggtgcgaatcgcctacatgctggtggttcacggccgcgccatccgccagctgaagcgtctcctcaaggccgtttatcacgagcagcacttcttttacatccatgtggacaagcgttccgactacctgcaccgggaggtggtggagctggcccagggctatgataacgtgcgggtgacgccctggcgcatggttaccatctggggcggggccagcctcctgaggatgtacctgcggagcatgcgggacctgctagaggtgcctggctgggcctgggacttcttcatcaacctcagtgccactgactatccaaccaggaccaatgaggagctggtggcattcctatccaagaaccgggacaagaatttcctcaagtcacatggccgggacaactccaggttcatcaagaaacagggcctggaccggctcttccatgagtgcgactcacacatgtggcgcctgggcgagcggcagatcccagcaggcattgtggtggatggcggttctgactggttcgtgctgacacgcagctttgtggagtatgtggtgtacacagatgacccgcttgtggcccagctgcgccagttctacacatacacactgctcccagccgagtccttcttccacacggtgctggagaacagcctggcctgtgagaccctcgtggacaacaacctgcgggtcaccaactggaaccgcaagctgggctgcaagtgccagtacaagcacattgtggactggtgtggctgctcccccaacgacttcaagccacaggacttcctccggctgcagcaagtctccagacccaccttcttcgcccggaagttcgagtcgactgtgaaccaggaggtgctggaaatcctggacttccacctgtatggcagctacccccccggcacgccagccctcaaggcctactgggagaacacctacgacgcggctgatggccccagtgggctcagtgatgtcatgctcactgcttacacagccttcgcccgcctcagcctgcaccatgccgccactgctgcacccccaatgggcaccccactctgcaggtttgagcccaggggcttgccgtccagcgtgcacctgtatttctatgacgaccatttccagggctacctggtgacgcaggcggtgcagccctcagcccaggggccggcagagacgcttgagatgtggctgatgccccaagggtcgctgaagctgttggggcgcagtgaccaggccagccggctccagagtctggaggttggcactgattgggaccccaaagagcgtcttttccggaactttggggggttactggggccgctggacgagcctgtggccgtgcagcgctgggcccggggccccaacctcacagccacagtggtctggatcgacccaacctatgtggtggccacatcttatgacatcacagtagatacggagactgaggtcacgcaatacaagcccccactgagccggcccctgcggccagggccctggactgttcgactccttcagttctgggaaccgctgggtgagacccgcttccttgtgctgcccttgaccttcaaccgcaaactacctctcaggaaagatgatgccagctggctgcacgcagggccaccccacaacgagtacatggagcagagtttccagggcctgagtagcatcctgaacctgcctcagccggagctcgcggaggaggctgcccagcggcacacacagctcacaggccctgcgctcgaggcctggacagacagggaactgagcagcttctggtccgtggctggactgtgtgccataggcccctctccctgcccctccctggagccctgcagactgaccagctggagctctctgtcccccgaccccaaatcagagctggggcctgtcaaagcagacgggcgactcaggtagcagggccccagccagtacccgtggaggacccgggaaattgcaccttacagacagtggaggggtgtcccctcccacaggcaagaaccagaggcccaggctgcacacccatttcagccatcaagaacccacacagacggcagggaaggtggacacagtatgaactactgctgatgtctctgttggggatcagagggctggcgggaacgcgagaagggcaccagcagcattccacacccagctcttcctcaccttcctgtctagtttgaatttcttttttttctttttttttttttttttttaatttaaaaaggaaaatgggtggttgggagagaaactagaacagaagatgtgcaatagggctcagagcagccccaggaagtgggccatgtctgtggggagcaggggcttgctgagcccacctgctattgttctgcacgaggctgggcctgcctcactctccagggcctcatgccccattctgggcctgtggtgctcgtggctgaggctccacagggctgcaagtgccctgccaggctctaaggcccgaagaacaggtgatatcgggggcgctgcagagctgggctctagcaggacagttcttttgtagccaggggaccctagaagtggggtggggcggctccagggctttccagcataccctgcccctggatgggaaaggcagggtcagggcccactgagacccatgcagagtttccaggtgtgcactggaagtgaggtcacatgagcagcgtgggaagaagactctgtcaagactctcagaagaacctggagtaattgtgcctgaagctcagcgtgaagtctgaaatatgcaacagaagaaatatatctctatctctcta

SEQ ID NO: 34597 - DNA, 2107 bp, Homo sapiens
  source 1..2107: mol_type = unassigned DNA
aggaagatggtggcgagcgcgcgagtgcagaagctggtgcggcgctacaagctggcgattgccacggcgctggccatcctgctgctgcagggcctggtagtgtggagcttcagcggcctggaggaggacgaggcgggcgagaaaggaaggcagaggaagccacggccactggaccctggcgagggttccaaggacacagacagttcagcagggcgacggggcagcacaggcagaaggcatgggcgctggcggggccgtgctgagagcccaggagtgcccgtggccaaggtggtacgggcagtaaccagccggcagagagccagccggcgggtcccacctgccccacccccggaagccccaggccgccagaacctgagtggggcagcagctggggaggcgctggtaggggcagctggcttcccaccacacggagatacagggagcgtggagggcgccccccagcccacggacaatggcttcacccccaagtgcgagatcgtgggcaaggacgcactgtctgcactggcccgggccagcaccaagcagtgccagcaggagatcgccaatgtggtgtgcctgcaccaggctgggagcctcatgcccaaggctgtgccccggcactgtcagctgactgggaagatgagccccggcatccagtgggatgagagccaagcccagcagcccatggatggccccccggtgcgaatcgcctacatgctggtggttcacggccgcgccatccgccagctgaagcgtctcctcaaggccgtttatcacgagcagcacttcttttacatccatgtggacaagcgttccgactacctgcaccgggaggtggtggagctggcccagggctatgataacgtgcgggtgacgccctggcgcatggttaccatctggggcggggccagcctcctgaggatgtacctgcggagcatgcgggacctgctagaggtgcctggctgggcctgggacttcttcatcaacctcagtgccactgactatccaaccaggaccaatgaggagctggtggcattcctatccaagaaccgggacaagaatttcctcaagtcacatggccgggacaactccaggttcatcaagaaacagggcctggaccggctcttccatgagtgcgactcacacatgtggcgcctgggcgagcggcagatcccagcaggcattgtggtggatggcggttctgactggttcgtgctgacacgcagctttgtggagtatgtggtgtacacagatgacccgcttgtggcccagctgcgccagttctacacatacacactgctcccagccgagtccttcttccacacggtgctggagaacagcctggcctgtgagaccctcgtggacaacaacctgcgggtcaccaactggaaccgcaagctgggctgcaagtgccagtacaagcacattgtggactggtgtggctgctcccccaacgacttcaagccacaggacttcctccggctgcagcaagtctccagacccaccttcttcgcccggaagttcgagtcgactgtgaaccaggaggtgctggaaatcctggacttccacctgtatggcagctacccccccggcacgccagccctcaaggcctactgggagaacacctacgacgcggctgatggccccagtgggctcagtgatgtcatgctcactgcttacacagccttcgcccgcctcagcctgcaccatgccgccactgctgcacccccaatgggcaccccactctgcaggtttgagcccaggggcttgccgtccagcgtgcacctgtatttctatgacgaccatttccagggctacctggtgacgcaggcggtgcagccctcagcccaggggccggcagagacgcttgagatgtggctgatgccccaagggtcgctgaagctgttggggcgcagtgaccaggccagccggctccagagtctggagaacaggggtctctccatgttgcccaggctggtctcaaactcctggcctcaagcagtcctcccgctccaacctcccaaagcgttgggatgacaggcatcagccactactcctggcctcaaagtaccattaaaaaaaaaaaaaaatcttaggtaacacatgc

SEQ ID NO: 34598 - DNA, 3664 bp, Homo sapiens
  source 1..3664: mol_type = unassigned DNA
ccctgcgtctctgggcgctggagcgcggcgactatcacgccgcgtggcggacggacggactgacggacgcgcagccttacccgaaaggccatggcggagcacgcccctcgccgctgctgcctgggctgggacttcagcacgcagcaggtaaaggttgttgctgttgatgcagagttgaatgtcttctatgaggaaagtgtgcattttgacagagatcttccagaatttgggactcagggtggtgttcatgtgcacaaggatgggctgacggtcacttctccagtactaatgtgggtccaggcactggatatcatcttggagaagatgaaggcttcgggcttcgacttctctcaagtcctagccttgtccggggcgggccagcaacacggaagtatatactggaaggctggagcccagcaggcactgacaagcttatcaccagacctccggctacaccagcagctgcaggactgtttctccatcagcgactgcccggtgtggatggactccagcaccacagcccagtgccgccagctggaggctgctgtgggtggtgctcaggctctcagctgcctcacggggtcccgtgcctatgagcgttttacagggaaccaaattgcaaaaatttaccagcagaaccccgaggcctactcacatacggagagaatttctttggtcagtagctttgctgcttccctgttccttggctcttactcccctattgactacagtgatggttctggaatgaatttgttgcagatacaggataaagtctggtcccaggcttgccttggtgcctgtgcacctcatttagaggagaagcttagcccaccagtaccatcatgctcagttgtgggagccatttcttcctactacgtccagcgctacggatttcctccaggatgcaaagtggtggccttcactggggacaacccagcgtcgctggcaggcatgagactggaggaaggtgacattgcggtcagcctgggcaccagtgacaccctgtttctctggctccaagagcccatgcctgccctggaaggccacatcttctgcaacccggttgactcccagcactacatggcactcctgtgctttaaaaatggctccctcatgagagagaagatccgcaacgagtctgtatcccgttcctggagcgatttctctaaggcactgcagtccacagagatgggcaacggtggaaacctgggtttttattttgatgtaatggagatcacccctgaaattattggacgtcataggtttaacacagaaaaccacaaggttgcagcattccctggggatgtggaggttcgagcactaattgaaggacaattcatggccaagaggattcacgcagaaggcctgggctatcgagtcatgtccaagacaaagattttggccacaggaggagcatctcacaatagagaaatcttacaggtgcttgcagatgtgtttgatgccccggtgtatgttatagacactgccaactcggcctgtgtgggttctgcataccgagcttttcatggtcttgcaggtggaacagatgtgcccttttcagaggttgtgaagttagctccaaatcccagactagctgctaccccaagcccgggagcttctcaggtctacgaggcccttctcccccagtatgccaaactcgagcagagaatcttgtctcagacccgggggcctccggagtgaacaggcatccctgttgcccctgcctgcccagatttactgaccccatttgtcgacatggccccagacaggagggatccacttctctgttctgaacagctcttcctgcccctactgactccttggagtgtccaggaccatcttaaagccgccctcagcacatctgcatgaagatagataggcactcctgtccctgtgcccgtgtgccccagggcaggaaagcatctctcttttcctgtcttttatcccaggaggcaggacaacactgagactgggatatgtccaataaaaactatgacttttccccttgcagaggcagaattaaagctaatctagggactcaaatcagcagaatgggggagacaaagcccggtctcaccccctaacctcatcctatctctttctccaaccctgactgcccactcctccacaaaccgtgacccatagccgcccccaccccataccttgatctaccatccatcctcttccccaatccaaaccccacagtctcttctctcccacaccctgccctccttgtttcagctgtctgaggtgcctcgcagggcctctcttacttgccccatgctcaccctttccatgctgtccccattctctcctttcaccatctctcctctccccctccttcatctctcctccctccccaaactcacttggcataattcacaacctcccacccaaacaatgggcctggtggacgtgcttcctgtgccctccctttagctatgcccacagatcactgagagggaccatctcccaagtggtgcagtttagaacttctctccctttttctccctcattccctctctcttcttgcagtccacttgctgaagaagttgtgtcatttctctggaagaatttccaaaattctggatttcttttttattttggagtatttcatcagctgaaaagtgattctcactttgagttttcttcctatatttgtatagtgagttcctttttccttcctctttatccctcctgttttactttatacctctctattccttgctcaaattattgcaaaagcctctatagaaagtcctctgtgatctgactcctgcagactcttccagatttttctgcccaaggcctttactgagctcaggactccagctaaatcaaaatacgcatgttctcacccagagtgacaaaatcctgcagataggtttaagacctagtggctcagagcagtagctactgggaagttaaaaggaaggggcttagaaaatgaatgggaccaaaggcatcacttctgatggagatgaagccatcttgaaagtgagtggtgtcctttggaggcatggtggatgaaaggcgcaaaggaagcaagaggttaaagataatggcccattagatacaacagcaagcccaagattccgaagaagacagacaactccccctagtaccacctagacattactttttaaagacattttacattattgtccagcagaaaaaggctgtcttggaccatgaaacagtaaactgtaactaaacacttcaacatgaatttgaaaataaataattgtggatataaaagaacaccagagatcagaaattcaaaaactcagaataaaaatgaaaaagctacaagcatatatgagaagagaactgactgaacttgggaaataatttgaacaaaaagataaatcttcacagatatgaatactaaattatatcttaatgaaaatagatatggtcacaagtacattaaggcacgtagaaggtaggagtaagaaaagctaagagaagcaaaacaaacaaagcaatattaaaggaagagccaaaaagacccagaaataaaatgacagataaagaagattgtcaaagaaaagatgatacaggtaagattggaactcatgaagacaaaagataagacagtggcatagagttaatatttaaaattcaaatattaaaactcaaataaaccccaaagaacttttgg

SEQ ID NO: 34599 - DNA, 1737 bp, Homo sapiens
  source 1..1737: mol_type = unassigned DNA
ttacccgaaaggccatggcggagcacgcccctcgccgctgctgcctgggctgggacttcagcacgcagcaggtaaaggttgttgctgttgatgcagagttgaatgtcttctatgaggaaagtgtgcattttgacagagatcttccagaatttggcaacacggaagtatatactggaaggctggagcccagcaggcactgacaagcttatcaccagacctccggctacaccagcagctgcaggactgtttctccatcagcgactgcccggtgtggatggactccagcaccacagcccagtgccgccagctggaggctgctgtgggtggtgctcaggctctcagctgcctcacggggtcccgtgcctatgagcgttttacagggaaccaaattgcaaaaatttaccagcagaaccccgaggcctactcacatacggagagaatttctttggtcagtagctttgctgcttccctgttccttggctcttactcccctattgactacagtgatggttctggaatgaatttgttgcagatacaggataaagtctggtcccaggcttgccttggtgcctgtgcacctcatttagaggagaagcttagcccaccagtaccatcatgctcagttgtgggagccatttcttcctactacgtccagcgctacggatttcctccaggatgcaaagtggtggccttcactggggacaacccagcgtcgctggcaggcatgagactggaggaaggtgacattgcggtcagcctgggcaccagtgacaccctgtttctctggctccaagagcccatgcctgccctggaaggccacatcttctgcaacccggttgactcccagcactacatggcactcctgtgctttaaaaatggctccctcatgagagagaagatccgcaacgagtctgtatcccgttcctggagcgatttctctaaggcactgcagtccacagagatgggcaacggtggaaacctgggtttttattttgatgtaatggagatcacccctgaaattattggacgtcataggtttaacacagaaaaccacaaggttgcagcattccctggggatgtggaggttcgagcactaattgaaggacaattcatggccaagaggattcacgcagaaggcctgggctatcgagtcatgtccaagacaaagattttggccacaggaggagcatctcacaatagagaaatcttacaggtgcttgcagatgtgtttgatgccccggtgtatgttatagacactgccaactcggcctgtgtgggttctgcataccgagcttttcatggtcttgcaggtggaacagatgtgcccttttcagaggttgtgaagttagctccaaatcccagactagctgctaccccaagcccgggagcttctcaggtctacgaggcccttctcccccagtatgccaaactcgagcagagaatcttgtctcagacccgggggcctccggagtgaacaggcatccctgttgcccctgcctgcccagatttactgaccccatttgtcgacatggccccagacaggagggatccacttctctgttctgaacagctcttcctgcccctactgactccttggagtgtccaggaccatcttaaagccgccctcagcacatctgcatgaagatagataggcactcctgtccctgtgcccgtgtgccccagggcaggaaagcatctctcttttcctgtcttttatcccaggaggcaggacaacac

SEQ ID NO: 34600 - DNA, 6506 bp, Homo sapiens
  source 1..6506: mol_type = unassigned DNA
gcggggcggaacgcgccgggcgggctccaccgcgccgtgtgcttccgcaggttgcgggggtcgctggggccttgtggcggggcagctccgcggggcttcgcccgctctctcacctcgccgtgctctctcgcggcggccggcggggcccgcgctgcagccggagacccggagaaaggtgaagaactgaatgtcatcatgtctggaatcaagcgaaccatcaaagaaaccgaccctgattacgaggatgtatctgtggcccttccaaataagcggcataaagcaattgagaattcagctcgagatgctgctgtgcagaagattgagactattatcaaagaacagtttgctcttgaaatgaagaataaggaacatgaaattgaagtcattgaccagcgactgattgaagcaagaaggatgatggataaactgcgtgcctgcattgtagcaaactactatgcttctgcaggtcttctaaaagtttctgagggatcaaagacatgtgatacaatggtttttaatcatcctgctatcaagaaatttttggaatcaccatctaggtcatcatctcctgccaatcagagagcagaaacaccatcagccaatcattcagaaagtgattctttatctcagcacaatgacttcttatctgacaaagataataacagcaatatggatatagaggaaagactctcaaacaacatggagcagagaccaagccgaaatactggaagggatacttctagaattactggctcccataaaacagaacagcggaatgctgatctcacagatgagacttcacgactttttgtaaagaaaacaatagtagtgggcaatgtgtccaagtatatacctccggataagagggaagaaaatgaccagtcaactcataagtggatggtatatgtccgagggtcccgtagagaacccagcattaatcattttgtcaagaaggtttggttcttccttcatcctagctataaaccaaatgaccttgtggaagttagagagcctccttttcacctgaccagaagaggctggggtgagtttcccgtcagagttcaagttcattttaaggacagccagaacaagcggatagatatcatacataatctgaagctggatagaacttatactggcttgcagactcttggagcagagacggtagtggatgttgaactccatcgccattctctcggagaagactgtatctatcctcagtcctcggagtctgacatctctgatgcccctccatctttgcctttgaccattccagccccagtgaaagcttcttcaccaataaagcagtcacatgagccagtacccgatacctctgtggagaaaggattcccagctagcactgaagctgaacgacacactccgttttatgctttgccatcttcattggaaagaacacccaccaaaatgactacatcccagaaagttaccttttgttcccatggcaattcagctttccagccaatagcatcaagctgcaaaattgttccacaaagtcaggttcctaatcctgagtcacctggaaaatccttccagcccatcaccatgagctgcaagattgtgtcaggttccccaatatcaactccaagcccatcaccattgcctcgaaccccgacttccactccagtccacgtgaagcaaggcactgccggctctgttattaataatccttatgttatcatggacaagcagccggggcaggtgattggagccaccactcccagtacaggaagtcctacaaacaagatctccacggcttctcaggtctcccaaggaacaggttcccctgttcctaaaattcatggaagtagttttgtaacatctactgtcaagcaggaggattctttgtttgcatctatgccacctctttgcccaattgggagtcaccctaaggttcaaagccccaaacctataacaggaggacttggagctttcacaaaagtgatcatcaaacaggaacctggtgaagcccctcacgtgcccgcaacaggagctgccagccagtcaccactcccgcagtatgtgactgtgaaagggggtcacatgatagctgtgtcccctcaaaaacaggtcataactcctggagaagggattgcccagtcagcaaaggttcagccctccaaggttgtcggggtaccagttgggtctgctttaccttcaacagtgaagcaggctgtggcgatcagtggtggccagatcctggtagccaaggccagctcttctgtctccaaagcagttgggccaaagcaagttgtaacccaaggagttgccaaagcaattgtgagtggaggtggaggaaccattgttgctcagccagtgcagaccttaaccaaggcccaggttactgccgctggtcctcagaagagtggatcccagggttcagtaatggcaacgttgcagctaccagccactaatttggccaacttggcaaatttgcctcctggcactaaactctacctaactacaaacagcaagaacccttcaggaaaaggaaaactgctgctgatccctcaaggagccatcctgcgagctacgaacaatgctaatctccagtctggctcagctgccagtggtgggagtggtgccggaggaggaggaggaggaggaggaggaggcggcagtggcagcggtggaggcggcagcacaggaggaggaggaggaacagcaggaggaggaactcaaagtactgctggccctggagggatatctcagcacctgacttacacatcttacatcctcaagcaaactccccagggcacatttttagttggccagccatcaccccagacttctggaaaacaactcaccactgggtcagtggtccaaggaacactgggagtcagcacatcttctgcacaaggacaacaaacgctaaaagtcatctctggacagaaaaccacattgtttacacaggcagcccatggaggacaggcatctctaatgaaaatatccgatagcaccttgaagactgtgccagccacctcacagctctcgaagcctggaaccacaatgctgagagtagcaggaggggttatcacaactgccacttcccctgccgtggccctctcagcaaacggtcctgcacaacagtctgaaggaatggctcccgtgtcttcatctacggtcagttctgtaacgaaaacttctgggcagcagcaagtgtgtgtgagccaggccaccgtgggaacctgcaaggctgccacccccaccgtcgtcagcgccacgtccctcgtgcctacaccaaaccccatctctgggaaagccacagtatccggactgttaaagattcactccagtcagtccagtccgcagcaggccgtcctgacgattcccagccagctcaaaccactcagcgtaaacacatctggaggggtgcagacgatcctgatgcctgtgaataaagtggttcagtcattttctaccagcaagccacctgccattctgcctgtagctgccccaactccagttgtccccagctctgctccagcagctgttgcaaaagtgaagactgaaccagaaacacctggaccgagttgcctctctcaggagggtcagacagcagtgaaaacagaagaaagttctgagctgggaaactatgtcattaagatagaccatttagaaactatccagcaactcctaactgcagtagtaaagaagattccattaatcactgcaaaaagtgaagatgccagctgcttttctgcaaagtctgtggagcagtactatggctggaacattggaaaaaggagagccgctgagtggcaaagagcaatgacaatgcgaaaagtcttacaagaaatcctggagaagaatccgagatttcaccacctgactcccctcaaaaccaagcacatcgctcactggtgccgctgtcatggctacaccccaccggaccctgagagcctgaggaatgacggggactccatcgaggacgtgctgacccagatcgacagcgagcccgagtgcccatcatcattctcctctgctgacaacctctgccgcaaactggaggacctgcaacagttccagaaaagggaacccgagaatgaggaggaggtggacatcctcagcctctccgagccagtgaagataaacatcaagaaggagcaggaagagaaacaagaggaagtcaagttctacctgccaccaaccccagggtctgaatttattggggatgtcacacagaagattgggatcaccctgcagcccgtggcactccacaggaacgtgtatgcgtccgtggtggaggacatgatcctgaaggctacagaacagctggtgaatgatatcctgagacaggctttggcagttggataccagacagcttctcacaacaggattcccaaagaaattacagtgagtaatattcaccaggccatttgcaacattccttttctggacttcctcacaaacaaacacatgggaatattgaatgaggaccagtgagcggagtgaggtgccctggagaagcaggctttgaaggcacagcgaagctgtaactgaggaccctgctgctcgggaaggaggtggtttccagtgtgactcggcatgtcatggctacccaacctttgccgctgcctgttcccacgtgtcaccagcacgctgcactccagatgaaatcctcctaggacaggagtttgtttcctgagtgtggagtgaggctgtcagtggatccgtgctttgtcggccagcgtttctgcagtctttgtaaaggccccacgagagcgggccaggccgtgtgcctcaggcccttctccctgggtgtgcttaagggggctccttgggcccgcctccccaggaggtagaaaatgagtggcaggctagagatttcacccattttgtgggctggagttaccagtagctccagcagttaccctgaagagagattgggcttcagccttcagcaggtggttctctcccatgcctggccttggtgtggaggggctgtactctgagcccaagtgagtcagctataggaagaggccatacctagagccaagaaccatgaaggcctgagagacggcagactgagcagaattccttttttgagcacgagagcattactagaaccattgtcaaagcagtggcaagggacggagaggtcccaacaggagtcaggaagaggtttgattataaccaagaaaactcactatgctaggaatagactgtgtgcaccagtcccagacacttggcagaagtgtagcagcgttacacatgtgtgcgaagcagatcgcaggttccacgccatctgcatggcctgcaggagcttctgctgctgaccccatgctgagtggccagtggggagcggcgcccggcaggctcttctggggtcgtctgtcctatccgtggattgtatatactcttctctgttaaggagtttttcccaagaagaaaagtatttaaaagaaataccagtgagtgccttaaagttggagaagtaactgcccatgcccagaaataaggatgccagtgcccagaagcagtgagattagtctgtgtccacaagcagaggccccctcgatgggagggagtggcaggcaggagaaggtggcgctgccaggtgcccgggtctattggaggcgccccatctcagacttcctaacacagcctgtgtggaaggcagaacaaagaatgcatgcccagtcagaaatctgttctattctgctccaggaaaatcggaaacctgtgagtcagagtcagagaaacttacccaagcaacgtaattcctgttttcatgggtcctgtagatgtttgagtcaggaaggtaaggcggggagtgactgaataaactctgccttttaaattgagcatctgggccgggcatggtggctcacgcctgtaatcccagcactctgggaggtcgaggtgggtgggtcacctgaggttgggagttcgagaccagcccgaccaacatggtgaaaccccgtctctactaaaaatacagaaaattagctgggcatggtggtgtgtgcctgtaattccagctactcgggaggctgaggcaggaagaatcacttgaacccaggaggcggaggttgcagtgtgccaagatcataccactgcactccagccctggtgacagaggagaccccgtctcaaaaattgattgatcaattcagcatctgagggctgcaagtacagaaggaatctattctcagcagggcatagggcacgcactggcttaacagtttagtatataaggctcaaatagtctatacctgaactgctataagcaaggtcgatagggaagtggatagattgcttcagcaaagtgaactgtgagatctccaggacagagggagaaagatctgatccaaatgagaacagattggttattgcaggtatcacagcctaaagaaattatctttttgcaaaagaaatattaaatgatttagcagtctccacgtgtgttaatgtttcaaacgtgtatcataatgtgtataattgtgtaacaaaattgtctacaataaatcttttggtatttgtgg

SEQ ID NO: 34601 - DNA, 6506 bp, Homo sapiens; identical to SEQ ID NO: 34600
  source 1..6506: mol_type = unassigned DNA

SEQ ID NO: 34602 - DNA, 1434 bp, Homo sapiens
  source 1..1434: mol_type = unassigned DNA
cgcgagcccgttgcgcctgcgcgcggtgcggccgtcgcccctcttttcgcggcgttctccacctgcgcgggcctgaatggccttcaggagcacagtcggcctgaggagttgacggttactcaccgccgtgagcccaagtaactcgccctccttcggctagaaaccctccgcctgggcccgcgcgacaggagcgcggtctctgaggggagcggcgaccccgccagccccggtctctttccctggcggcggcggcttcttccgtgggacaatatgttcaagagaatggccgaatttgggcctgactccggcgggagagtaaagggtgttactatcgttaaaccaatagtttacggtaatgttgctcggtattttggaaagaaaagagaagaagatgggcacactcatcagtggacagtatatgtgaaaccatatagaaatgaggatatgtcagcatatgtgaagaaaatccagtttaaattacatgaaagctatggcaatcctttaagagttgttactaaacctccatatgaaattactgaaacaggatggggtgaattcgaaataatcatcaaaatatttttcattgaccctaatgaaagacctgtaaccctgtatcatttgctaaagctgtttcaatcagacaccaatgcaatgctggggaaaaagacagtggtttcagagttctatgatgaaatgatatttcaagacccaacagcaatgatgcaacaattattgacaacatctcgtcagctaacattaggagcctataagcatgaaacagaatttgcagagcttgaagtgaaaaccagagaaaaattagaagctgctaagaaaaaaacaagctttgagattgcagagcttaaggagagattaaaagcaagtcgtgaaactataaattgtttaaaaaatgaaatcagaaaacttgaagaagatgaccaagcaaaagacatataaacagttctcatgagaacttggtagtaagctaaactgaaaataaggtgggcttcactggagaaatggacttactgcaaatgctgtgatgtttcttagaggaacttcatatacagctgttgaccatgaatttcttagcaataggaatttgtactatttaagcaatctttaatggaaaatatgtgtgtaagaatggatgctatataggtattttaccaacccattttaagaaaattctatgatattaagcacagtttttaaaaatgtttattgtagtatatgtatagcttattacccttttgacaggcatcaaaatttcattataaagtattacttgtacaaattttgtacttctttagtggctagaattagtgaagaaacttaatgtgtatatttaatttcttcaagttcttacctgcccccatccttttttgtatatgatgtgtccagtaagtattcaataaatgtagtttacagatccta

SEQ ID NO: 34603 - DNA, 1576 bp, Homo sapiens
  source 1..1576: mol_type = unassigned DNA
cccccgtccacgtccccagcttccggaagttgcttttgtccaaacatccgggcttctcctttttgtgttccggccgatcccacctctcctcgaccctggacgtctaccttccggaggcccacatcttgcccactccgcgcgcggggctagcgcgggtttcagcgacgggagccctcaagggacatggcaactacagcggcgccggcgggcggcgcccgaaatggagctggcccggaatggggagggttcgaagaaaacatccagggcggaggctcagctgtgattgacatggagaacatggatgatacctcaggctctagcttcgaggatatgggtgagctgcatcagcgcctgcgcgaggaagaagtagacgctgatgcagctgatgcagctgctgctgaagaggaggatggagagttcctgggcatgaagggctttaagggacagctgagccggcaggtggcagatcagatgtggcaggctgggaaaagacaagcctccagggccttcagcttgtacgccaacatcgacatcctcagaccctactttgatgtggagcctgctcaggtgcgaagcaggctcctggagtccatgatccctatcaagatggtcaacttcccccagaaaattgcaggtgaactctatggacctctcatgctggtcttcactctggttgctatcctactccatgggatgaagacgtctgacactattatccgggagggcaccctgatgggcacagccattggcacctgcttcggctactggctgggagtctcatccttcatttacttccttgcctacctgtgcaacgcccagatcaccatgctgcagatgttggcactgctgggctatggcctctttgggcattgcattgtcctgttcatcacctataatatccacctccacgccctcttctacctcttctggctgttggtgggtggactgtccacactgcgcatggtagcagtgttggtgtctcggaccgtgggccccacacagcggctgctcctctgtggcaccctggctgccctacacatgctcttcctgctctatctgcattttgcctaccacaaagtggtagaggggatcctggacacactggagggccccaacatcccgcccatccagagggtccccagagacatccctgccatgctccctgctgctcggcttcccaccaccgtcctcaacgccacagccaaagctgttgcggtgaccctgcagtcacactgaccccacctgaaattcttggccagtcctctttcccgcagctgcagagaggaggaagactattaaaggacagtcctgatgacatgtttcgtagatggggtttgcagctgccactgagctgtagctgcgtaagtacctccttgatgcctgtcggcacttctgaaaggcacaaggccaagaactcctggccaggactgcaaggctctgcagccaatgcagaaaatgggtcagctcctttgagaacccctccccacctaccccttccttcctctttatctctcccacattgtcttgctaaatatagacttggtaattaaaatgttgattgaagtctggaactgca

SEQ ID NO: 34604 - DNA, 3147 bp, Homo sapiens
  source 1..3147: mol_type = unassigned DNA
ggaagccgttctttggccctgtgacacgtagcaacggggctggttcagggtctgaaacagagtttgggggttgtttgggattagtgaagctactgcctttgccgccagcgcagcctcagagtttgattatttgcaatgtcaggctttgaaaacttaaacacggatttctaccagacaagttacagcatcgatgatcagtcacagcagtcctatgattatggaggaagtggaggaccctatagcaaacagtatgctggctatgactattcgcagcaaggcagatttgtccctccagacatgatgcagccacaacagccatacaccgggcagatttaccagccaactcaggcatatactccagcttcacctcagcctttctatggaaacaactttgaggatgagccacctttattagaagagttaggtatcaattttgaccacatctggcaaaaaacactaacagtattacatccgttaaaagtagcagatggcagcatcatgaatgaaactgatttggcaggtccaatggttttttgccttgcttttggagccacattgctactggctggcaaaatccagtttggctatgtatacgggatcagtgcaattggatgtctaggaatgttttgtttattaaacttaatgagtatgacaggtgtttcatttggttgtgtggcaagtgtccttggatattgtcttctgcccatgatcctactttccagctttgcagtgatattttctttgcaaggaatggtaggaatcattctcactgctgggattattggatggtgtagtttttctgcttccaaaatatttatttctgcattagccatggaaggacagcaacttttagtagcatatccttgcgctttgttatatggagtctttgccctgatttccgtcttttgaaaatttatctgggatgtggacatcagtgggccagatgtacaaaaaggaccttgaactcttaaattggaccagcaaactgctgcagcgcaactctcatgcagatttacatttgactgttggagcaatgaaagtaaacgtgtatctcttgttcatttttatagaacttttgcatactatattggatttacctgcggtgtgactagctttaaatgtttgtgtttatacagataagaaatgctatttctttctggttcctgcagccattgaaaaacctttttccttgcaaattataatgtttttgatagatttttatcaactgtgggaaaccaaacacaaagctgataacctttcttaaaaacgacccagtcacagtaaagaagacacaagacggccgggcgtggtagctcacgcctgtaatcccagcactttgggaggccgaggcgggcggatcacaagggcaggagatcgagaccatcctggttaacacggtgaaaccccgactctactaaaactacaaaaaaaattagctgggcgtggtggcgggcgcctgtagtcccagctactcaggaggctgaggcaggagaagtgtgaacccaggaggcggagcttgcagtgagccgagatcacaccactgcactccatccagcctgggtgacagggtgagactctgtctcaaaaaaaaaaaaaaaaggagacacaagacttactgcaaaaatatttttccaaggatttaggaaagaaaaattgccttgtattctcaagtcaggtaactcaaagcaaaaaagtgatccaaatgtagagtatgagtttgcactccaaaaatttgacattactgtaaattatctcatggaatttttgctaaaattcagagatacgggaagttcacaatctaccttattgtagacatgaaatgcgaacacttacttacatattaatgttaactcaaccttagggacctggaatggttgcattaatgctataatcgttggatcgccacatttcccaaaaataataaaaaaatcactaaccttttttaaggaaaatatttaaagttttacaaaattcaatattgcaattatcaatgtaaagtacatttgaatgcttattaaaactttcccaattaattttaactgtgttattgaatttacttttactaaactactgttctctttgtctcttttttaactaggctctgattttgacccctaatttaagctttaagaatagaaatcagctaatatagaatcagacaaaaaggggattaaatgagcagtttgagttacattattttattgtattaaatttatttgatttatattgtcatgttctcttgccagagagaatctgtaggaaaatactgtatcttgtatactgatcattggctttttctagaaaaactgtctctgattctggacaaagctcagttatagttacgagaaagatatggtacagggaggaaaatactgccttttttttttttttaaagagattttcagactaaatagaaatgtcaaaatgatgtatcaatggttcttttttagaacaagttttcaaagcataaaaagaggttgagagaaataacatatttattgattcacataagtatgtttttcttcattaatcgtctggagaaacccacttgtcattaatttgttttgggctaggttttcaaacttaccaaattgctttaaaaaagcaatttggaaggtaatttgataggctttccaacttaaccaaattttttattgtaattcttggatagtatttttgtctttttcaattcatttgtctttttcagtatagtttttgttaaggcaaatgtcttcccttaatatccaaatattgctaataaacggtagaagatgctttggaaattaaaattatctcgctgttggttagacttaacactgttaatcttcagccaaatatcacatatggatcaaattattttcttttttgttgtttaccctatcctcaacaacatttttagtttaaattattgtagagattttttttgtggtggttattttttattttgctccaaaataataaggtgcaaagctattttatgcttaactgttgctctgtcaaaacagctatgcagtggagttgcatttgatgttctagagtttgattacatgcagagttgtatatagccaaaacttctcttatcaaactctgttatgtaggcatatttatatatacattaaagactgttgtactgtgtctcaaaaagta

SEQ ID NO: 34605 - DNA, 926 bp, Homo sapiens
  source 1..926: mol_type = unassigned DNA
gttctttggccctgtgacacgtagcaacggggctggttcagggtctgaaacagagtttgggggttgtttgggattagtgaagctactgcctttgccgccagcgcagcctcagagtttgattatttgcaatgtcaggctttgaaaacttaaacacggatttctaccagacaagttacagcatcgatgatcagtcacagcagtcctatgattatggaggaagtggaggaccctatagcaaacagtatgctggctatgactattcgcagcaaggcagatttgtccctccagacatgatgcagccacaacagccatacaccgggcagatttaccagccaactcaggcatatactccagcttcacctcagcctttctatggaaacaactttgaggatgagccacctttattagaagagttaggtatcaattttgaccacatctggcaaaaaacactaacagtattacatccgttaaaagtagcagatggcagcatcatgaatgaaactgatttggcaggtccaatggttttttgccttgcttttggagccacattgctactggctggcaaaatccagtttggctatgtatacgggatcagtgcaattggatgtctaggaatgttttgtttattaaacttaatgagtatgacaggtgtttcatttggttgtgtggcaagtgtccttggatattgtcttctgcccatgatcctactttccagctttgcagtgatattttctttgcaaggaatggtaggaatcattctcactgctgggattattggatggtgtagtttttctgcttccaaaatatttatttctgcattagccatggaaggacagcaacttttagtagcacttcagccaaatatcacatatggatcaaattattttcttttttgttgtttaccctatcctcaacaacatttttag

SEQ ID NO: 34606 - DNA, 2255 bp, Homo sapiens
  source 1..2255: mol_type = unassigned DNA
agcaacggggctggttcagggtctgaaacagagtttgggggttgtttgggattagtgaagctactgcctttgccgccagcgcagcctcagagtttggtgagtgacccaggcccgtggcacagtgttcagcttctctccacacccgtgcaaatgggcttgttgccgtctttcggcgccgcgccctggtcctttcgctcagaccctcgctctcattcaagcccttgccctgacgcggtcccctgcacctcaggcgcgaccttccagattctgcactttttcctggcaggccgcaggccttattttgcaaggaagcagtcgccttgtcagctgtaaagcccagtcctaagattatttgcaatgtcaggctttgaaaacttaaacacggatttctaccagacaagttacagcatcgatgatcagtcacagcagtcctatgattatggaggaagtggaggaccctatagcaaacagtatgctggctatgactattcgcagcaaggcagatttgtccctccagacatgatgcagccacaacagccatacaccgggcagatttaccagccaactcaggcatatactccagcttcacctcagcctttctatggaaacaactttgaggatgagccacctttattagaagagttaggtatcaattttgaccacatctggcaaaaaacactaacagtattacatccgttaaaagtagcagatggcagcatcatgaatgaaactgatttggcaggtccaatggttttttgccttgcttttggagccacattgctactggctggcaaaatccagtttggctatgtatacgggatcagtgcaattggatgtctaggaatgttttgtttattaaacttaatgagtatgacaggtgtttcatttggttgtgtggcaagtgtccttggatattgtcttctgcccatgatcctactttccagctttgcagtgatattttctttgcaaggaatggtaggaatcattctcactgctgggattattggatggtgtagtttttctgcttccaaaatatttatttctgcattagccatggaaggacagcaacttttagtagcatatccttgcgctttgttatatggagtctttgccctgatttccgtcttttgaaaatttatctgggatgtggacatcagtgggccagatgtacaaaaaggaccttgaactcttaaattggaccagcaaactgctgcagcgcaactctcatgcagatttacatttgactgttggagcaatgaaagtaaacgtgtatctcttgttcatttttatagaacttttgcatactatattggatttacctgcggtgtgactagctttaaatgtttgtgtttatacagataagaaatgctatttctttctggttcctgcagccattgaaaaacctttttccttgcaaattataatgtttttgatagatttttatcaactgtgggaaaccaaacacaaagctgataacctttcttaaaaacgacccagtcacagtaaagaagacacaagacggccgggcgtggtagctcacgcctgtaatcccagcactttgggaggccgaggcgggcggatcacaagggcaggagatcgagaccatcctggttaacacggtgaaaccccgactctactaaaactacaaaaaaaattagctgggcgtggtggcgggcgcctgtagtcccagctactcaggaggctgaggcaggagaagtgtgaacccaggaggcggagcttgcagtgagccgagatcacaccactgcactccatccagcctgggtgacagggtgagactctgtctcaaaaaaaaaaaaaaaaggagacacaagacttactgcaaaaatatttttccaaggatttaggaaagaaaaattgccttgtattctcaagtcaggtaactcaaagcaaaaaagtgatccaaatgtagagtatgagtttgcactccaaaaatttgacattactgtaaattatctcatggaatttttgctaaaattcagagatacgggaagttcacaatctaccttattgtagacatgaaatgcgaacacttacttacatattaatgttaactcaaccttagggacctggaatggttgcattaatgctataatcgttggatcgccacatttcccaaaaataataaaaaaatcactaaccttttttaaggaaaatatttaaagttttacaaaattcaatattgcaattatcaatgtaaagtacatttgaatgcttattaaaactttcccaattaa

SEQ ID NO: 34607 - DNA, 2135 bp, Homo sapiens
  source 1..2135: mol_type = unassigned DNA
agcaacggggctggttcagggtctgaaacagagtttgggggttgtttgggattagtgaagctactgcctttgccgccagcgcagcctcagagtttggtgagtgacccaggcccgtggcacagtgttcagcttctctccacacccgtgcaaatgggcttgttgccgtctttcggcgccgcgccctggtcctttcgctcagaccctcgctctcattcaagcccttgccctgacgcggtcccctgcacctcaggcgcgaccttccagattctgcactttttcctggcaggccgcaggccttattttgcaaggaagcagtcgccttgtcagctgtaaagcccagtcctaagacagtatgctggctatgactattcgcagcaaggcagatttgtccctccagacatgatgcagccacaacagccatacaccgggcagatttaccagccaactcaggcatatactccagcttcacctcagcctttctatggaaacaactttgaggatgagccacctttattagaagagttaggtatcaattttgaccacatctggcaaaaaacactaacagtattacatccgttaaaagtagcagatggcagcatcatgaatgaaactgatttggcaggtccaatggttttttgccttgcttttggagccacattgctactggctggcaaaatccagtttggctatgtatacgggatcagtgcaattggatgtctaggaatgttttgtttattaaacttaatgagtatgacaggtgtttcatttggttgtgtggcaagtgtccttggatattgtcttctgcccatgatcctactttccagctttgcagtgatattttctttgcaaggaatggtaggaatcattctcactgctgggattattggatggtgtagtttttctgcttccaaaatatttatttctgcattagccatggaaggacagcaacttttagtagcatatccttgcgctttgttatatggagtctttgccctgatttccgtcttttgaaaatttatctgggatgtggacatcagtgggccagatgtacaaaaaggaccttgaactcttaaattggaccagcaaactgctgcagcgcaactctcatgcagatttacatttgactgttggagcaatgaaagtaaacgtgtatctcttgttcatttttatagaacttttgcatactatattggatttacctgcggtgtgactagctttaaatgtttgtgtttatacagataagaaatgctatttctttctggttcctgcagccattgaaaaacctttttccttgcaaattataatgtttttgatagatttttatcaactgtgggaaaccaaacacaaagctgataacctttcttaaaaacgacccagtcacagtaaagaagacacaagacggccgggcgtggtagctcacgcctgtaatcccagcactttgggaggccgaggcgggcggatcacaagggcaggagatcgagaccatcctggttaacacggtgaaaccccgactctactaaaactacaaaaaaaattagctgggcgtggtggcgggcgcctgtagtcccagctactcaggaggctgaggcaggagaagtgtgaacccaggaggcggagcttgcagtgagccgagatcacaccactgcactccatccagcctgggtgacagggtgagactctgtctcaaaaaaaaaaaaaaaaggagacacaagacttactgcaaaaatatttttccaaggatttaggaaagaaaaattgccttgtattctcaagtcaggtaactcaaagcaaaaaagtgatccaaatgtagagtatgagtttgcactccaaaaatttgacattactgtaaattatctcatggaatttttgctaaaattcagagatacgggaagttcacaatctaccttattgtagacatgaaatgcgaacacttacttacatattaatgttaactcaaccttagggacctggaatggttgcattaatgctataatcgttggatcgccacatttcccaaaaataataaaaaaatcactaaccttttttaaggaaaatatttaaagttttacaaaattcaatattgcaattatcaatgtaaagtacatttgaatgcttattaaaactttcccaattaa

SEQ ID NO: 34608 - DNA, 684 bp, Homo sapiens
  source 1..684: mol_type = unassigned DNA
cacgtagcaacggggctggttcagggtctgaaacagagtttgggggttgtttgggattagtgaagctactgcctttgccgccagcgcagcctcagagtttgacagtatgctggctatgactattcgcagcaaggcagatttgtccctccagacatgatgcagccacaacagccatacaccgggcagatttaccagccaactcaggcatatactccagcttcacctcagcctttctatggaaacaactttgaggatgagccacctttattagaagagttaggtatcaattttgaccacatctggcaaaaaacactaacagtattacatccgttaaaagtagcagatggcagcatcatgaatgaaactgatttggcaggtccaatggttttttgccttgcttttggagccacattgctactggctggcaaaatccagtttggctatgtatacgggatcagtgcaattggatgtctaggaatgttttgtttattaaacttaatgagtatgacaggtgtttcatttggttgtgtggcaagtgtccttggatattgtcttctgcccatgatcctactttccagctttgcagtgatattttctttgcaaggaatggtaggaatcattctcactgctgggattattggatggtgtagtttttctgcttccaaaatatttatttctgcatta

SEQ ID NO: 34609 - DNA, 653 bp, Homo sapiens
  source 1..653: mol_type = unassigned DNA
ctcccgcccaccggtgcccaacctgctaacacgcctgcgcgagcgggcgtgccccggaagccgttctttggccctgtgacacgtagcaacggggctggttcagggtctgaaacagagtttgggggttgtttgggattagtgaagctactgcctttgccgccagcgcagcctcagagtttgattatttgcaatgtcaggctttgaaaacttaaacacggatttctaccagacaagttacagcatcgatgatcagtcacagcagtcctatgattatggaggaagtggaggaccctatagcaatatgctggctatgactattcgcagcaaggcagatttgtccctccagacatgatgcagccacaacagccatacaccgggcagatttaccagccaactcaggcatatactccagcttcacctcagcctttctatggaaacaactttgaggatgagccacctttattagaagagttaggtatcaattttgaccacatctggcaaaaaacactaacagtattacatccgttaaaagtagcagatggcagcatcatgaatgaaactgatttggcaggtccaatggttttttgccttgcttttggagccacattgctactggctggcaaaatccagtttggctatgtatacgggatcag

SEQ ID NO: 34610 - DNA, 557 bp, Homo sapiens
  source 1..557: mol_type = unassigned DNA
gttctttggccctgtgacacgtagcaacggggctggttcagggtctgaaacagagtttgggggttgtttgggattagtgaagctactgcctttgccgccagcgcagcctcagagtttgattatttgcaatgtcaggctttgaaaacttaaacacggatttctaccagacaagttacagcatcgatgatcagtcacagcagtcctatgattatggaggaagtggaggaccctatagcaaacagtatgctggctatgactattcgcagcaaggcagatttgtccctccagacatgatgcagccacaacagccatacaccgggcagatttaccagccaactcaggcatatactccagcttcacctcagcctttctatggaaacaactttgaggatgagccacctttattagaagagttaggtatcaattttgaccacatctggcaaaaaacactaacagtattacatccgttaaaagtagcagatggcagcatcatgaatgaaactgatttggcacaatggttttttgccttgcttttggagccacattgctactggtaa

SEQ ID NO: 34611 - DNA, 1124 bp, Homo sapiens
  source 1..1124: mol_type = unassigned DNA
gaagagccaatggcaggcgcgggggatgacgccacggacatggtggccgagaccggcggggtgggggacgtgtcgcgcggccgggtggcctcggtcggtaccctgggcgcggagcagctgcctcattagtattcgtacccacgaggcggcgcagcgggccctcggggacagcgagcgtcgcggccatggcttatcactcgggctacggagcccacggctccaagcacagggcccgggcagccccggatccccctcccctcttcgatgacacaagcggtggttattccagccagcccgggggatacccagccacaggagcagacgtggccttcagtgtcaaccacttgcttggggacccaatggccaatgtggctatggcctatggcagctccatcgcatcccatgggaaggacatggtgcacaaggagctgcaccgttttgtgtctgtgagcaaactcaagtatttttttgctgtggacacagcctacgtggccaagaagctagggctgctggtcttcccctacacacaccagaactgggaagtgcagtacagtcgtgatgctcctctgcccccccggcaagacctcaacgcccctgacctctatatccccacgatggccttcattacttacgtgctcctggctgggatggcactgggcattcagaaaaggttctccccggaggtgctgggcctgtgtgcaagcacagcgctggtgtgggtggtgatggaggtgctggccctgctcctgggcctctacctggccaccgtgcgcagtgacctgagcacctttcacctgctggcctacagtggctacaaatacgtgggaatgatcctcagtgtgctcacggggctgctgttcggcagcgatggctactacgtggcgctggcctggacctcatcggcgctcatgtacttcattgtgcgctctttgcggacagcagccctgggccccgacagcatggggggccccgtcccccggcagcgtctccagctctacctgactctgggagctgcagccttccagcccctcatcatatactggctgactttccacctggtccggtgaccccctggccccagatggcactgagtttttcattcattgaagatttgatttccttga

SEQ ID NO: 34612 - DNA, 4329 bp, Homo sapiens
  source 1..4329: mol_type = unassigned DNA
ctccaaggctgttaacggcgtctgggccgggctacggctccaaaacaaagggcaggcggcccgcggggcggcggcgggaggatgcctcgcgccctgcctaggcgttaacggcctcagcgcgtcccgggccgcgccgggaacgcctgagagccgagcccgcgctgaccggggcccgggccggatgggcgctgcgggccggggcgcggaccgcggagcggccgttacgtttttctctcgtcccagctgtgtggacagtgccacacgccctcctggacaacgacggctcttgcgtgcattttccagtgttgcttttgtcagagaggccagcagagccacggttcttccagaaccagccctgagctgagtgaggagtgcccaggagagatggtgaaaatgacaaagtccaaaactttccaagcgtatctgccgaactgtcaccgaacgtacagctgtatccactgcagagcacacctggccaatcatgacgagctcatctccaagtcctttcaggggagccagggacgcgcctacctcttcaattccgtggtgaacgtgggctgcggccctgcagaggagagggtccttctcaccgggctgcatgcggttgccgacatctactgcgagaactgcaagaccacgctcgggtggaaatacgagcatgcctttgagagcagtcagaaatataaggaaggaaaattcatcattgagcttgctcatatgatcaaagacaatggctgggagtaatgtgcgaactttcccttctcctttgaatgctgttttgtgaaagaaactgtgaatgtaatggaaacgtaggagcatctggtgacagcctttcttgccctctgacctcaaaggctagctgcgcatagctcttgacactctcggccatctctgtgggtaaggtgtccctcggatctgtcctcttcgtgtacacagttgtttctgaaaattttcaatgagctttttctaacttctcaagttctagagaaagaattaaccaactgatgacttacctgcctagttaatatcttcctttcacctttgtcttcaatatagttgggctctgcttttttaaggttcagttgaaaaccaaactggggccgggtgcggtggctcacgcctgtaatcccagcactttgggaggccaagatgggtggatcacctgaggtcaggagttctagatcagcctggccaacatggtgaaaccccatctctactaaaaatacgaaaattagccgggcatggtggcgagtgcctgtaatcttagctactcaggaggctaaggcaggagaatcacttgaacctgggacacggaggttgcagtgagctaagatcatgccatcgcactccagcctgggggacaaaagtgagacatcgtctcaaaaaaaaaaaaaaaagctgggtatggtggcgcatgcctttaatcccagctactcgggaggctgaggcacgagaatcacttgaacccaggaggcggaggttgcagtgagccaagatcgcgccactgcactccagcctggcaatagggcgagactccgtctcaatttaaaacaagagagaaccagactgagtctctgaagaccacagggacagggtctctttagatagcaagtctcaccattcccttttttagagaaaaggtattgtagcccaccctccaccccgctgtttttcttaaatttgcagaacttcaaattggctattcctcttgcaaatgaacccttaaagtacagtgttatttaagaatcttccagaggcagtcaacagacttatacactaagggcatttttggtttttagcttgttcaaaaacagaggccagcacagatgacattttagatacactctaaattgagaatggtgtctagtggaacatgtttatttaagccagtagattccttatctagaaagcaggtgagctagcccttagagaaggctgtcccggggcccgcagaggtgcccttactgaggtgacagcctcacagggtctggtaccaggggttgtgccctcagcagtgacagcagcttaggtgtcaggcagttgctgagtggctggtccatgtctatagagtaacacactggaccgaggaaaagtcagatttcattttctaccctggatgtacttgaagaaaaagaattatttttgcatatgaaagaggccagaacccacaggaaaaacttcaaaacttgacatttgccagaatgtttaaaatttgttcagaaaaggttaaagcaacaagtttagcctttgtgcatgaagacgcctggcctgctagacgcgttgcccgtccctgcgtggtgctgtcccatgtcacttgaactgatagaggggcctgtgcaatctcctaaggcctgtgtttctgccatatattttattataaattacaatccactcatccacctgccctccaccaggagtgggcaccccataagggtttaggccactttgcagaggatggaggtcaaaaaccactcccagataagtttggttttcaacatttagtaacttgtctcagggcagagggcaggcagggggaccgaggggcagcagataggagagcactgagcccggatagttctcagcctggcaagtggctctgaagctgccttcagacaaggctagtctaggggcaagagtgcgagctggctgacaataagaacgtggccacctgcccagcttcacacctcccccgacttcagcccttcctaaacccagacctgcggtccaggcaggcactgggctgtgcccactcgagctcactgcccacacacagcatgcctttgggtgccatctctttgcccaagcctggaagccttggcaggtgggaaatgccgctgccctggtgggcatggcactgagatgcatccactcagcaggagtgacagaggcagaagttcctttaaagcacatcttccacttaggaaaggaaggaaatctttgtactgtcttggaagcctccacatccggctatggccctgcaagctgctttatccctgcgctagtctcccccgagggtttaggctggcccagcacatcctgtcctcctgagctcgcgtgcagccacccagagcgcaggggtcactgcacgctgcagggctcttgctgccatggtctcaagcctgaagaggctccgcccacaagctggcccatgaagttagcaatgcctgtggcttcagtcaattgtcttgagactgtgaagaggctgaaagacaccttcccgggtggaagaaggagttcactgaaaacttatcttaaactgacccttccctttgagtgagtcttcattcctctcccatgtgggaacccagcctccgatgccccggggactaggggaaacagttggaggttcgtgccgtccccagcctgccacgggtgcgaggacagccaagtcctgagtgactcaagatgcttcacttacatggaagaaacttctaaaactctaccgagtggtttttgtatatactaaagttctatttagagcttttctgttttgggcaagttcgctgctccttctatttgggcactttggtttttgtactgtcttttgtgacggcattgattgaacattttttactagtagtcttatgacttttgtatttttttttttttttgtaatttataccaacaacacttttatcactttttttttgttgggcttctgcaaaatacaagctcatttttaaaccaaatgaacagaccatgagctggcttcaggggaagtgctattcacaggaccatatccaccaccctcttaaattcctaaacaatatcatctaggacttctatttaagttatttaaaataaatcttccttgagagccttgggaggtgatgtcagggttataaatggcacagtgcatttgctgtaggaatgtggtttggcattgttttatacacacagtattttttataccttaatgcttattcttgatggcatctgtcagatattagaattgaaaataagaatcttcccaaaatcctttaatttacctgatgccctcatcaggtcgttaaaaattcaaatggttttaatagctaaaaaactacaaattaagctctaaaacaaacaaactacagaaatgtaaaccttcatttgccaaaggtccttggtggcctgtcccctgccctgggagcagatggccctgaagcccttccctcactgtgcaggccaccgggtgaggctggacggtcacccatggtggcttcactgcaaggagcaggactgccgagctcaagcacggggccttcagcttcccctgtcctctggccacaccgccagcccttggtccttatctgtgtgaggtttacaaataaagcttctgatgtcaaa

SEQ ID NO: 34613 - DNA, 5232 bp, Homo sapiens
  source 1..5232: mol_type = unassigned DNA
gccgcggcggtggcggagactgtggctttaagagcgtgccgggagcccgagccccagccgggccgcgcttcgccgctgcgcaccccagcggagccaagccccacgctggccggacagggccgcctgtcgccgggctgctgagaactagccctagacctctgcgtgagggttcttctgccgaagacatcaccagtgtgtggagcctgccacacccacccgctgccaaaccacggcctttacctgtgtcttccggtgtttcccgtgcgacccatcctgtgggagtgcctcgtgggctgccccagagttcaccccacactcagcagcaccaatggtgaagatgacaagatcgaagactttccaggcatatctgccctcctgccaccggacctacagctgcattcactgcagagctcacttggccaatcatgatgaactaatttccaagtcattccaaggaagtcaaggacgagcatacctctttaactcagtagttaatgtgggctgtgggcctgcagaagagcgagtgttgctaacaggactgcatgcagtcgcagacatttactgtgaaaactgcaaaaccactctgggctggaaatacgaacatgcttttgaaagcagccagaaatataaagaaggcaaatacatcattgaactagcacacatgatcaaggacaatggctgggactgattggacagcatctacccaacccagtgtccacgtgaacgccattcaaccgaacattcttcccaagcgtgagagagtgactgacacttggttccatccatttaggggccttgccatccggggcatcctcccaccctgacgccatctttctggtgaccggcctctaaatcgctgtctctctgtctctttgctttgtatctgtttgtgagttgatcctggcttctctctctgttctagttttggctgaaaacaaaacaacaaaaggaacagatccttgaccgcatggcggcagcccaccttggtaagggccccagggcccatgcgagagctgcctgatggcctcttgtcaggagagcagtggcacgggggcgtgaggaagagggaaaggggaaactctaagggtcctggcgcggggaaggggtggaagggtggaggtaggaacaaaattgcgccgctcctggagacctgataacttaggcttgaaataattgacttgtctaaaaggacaaagagaaaaaaaaaatacctcatgactgcattctctctgactagaagcttctgttcctgacaccaaatgtgccaggttagcaaatgagcacaagatgtggccctgattctagttggtggggcaagggcctggttctcctgggctgagtgggggagtgtcctggcagcagcgagtgacctgggcagtggccaggtgggtgcgatgactctgatgcctcactcagtctctgggcaatcatcatctttgcctctagccaccgtagataaggtgtgaagggactgctgtttgcaatgggcttaccatccaaatatcccaaaggctttgaccagcaaccaagtaaaatcagtaattgaggagagcagggcacaaaggggctgcagtttgggagctcctgaagaaatggctcagatattgagtcagagaaataaaaagtaggatcagttagcaattctaactgcccttccttctgacccctcataagaggagtgtggtgagggaggggactgggtaggggtcatcccaggaggaggggtttacattggaaccagttcaggttcggtgcatctttcctcttcggttttacagtggcttccgtgggatcgtcaatttcttgttcttagagtttcgggtgtttttctccagtcttgttactgtagactgtagaaagcacgggccccaggctctgagcttagtaataacctggctggtagattcctcatgcccctaattgtcccacttaggcctgaatgtcttgcatggagagaaatctcctgtcagtgtggtccagcagcagggaggagttctgcccaaattccgatatcaccccttcccccatccaagcatccttcgattagggaagtggagagcacatccctgtaaggcccataagagaaagaggagtttgttacatttaatcaacactgtgaagtctgttctacagcaattcagccattacacagtatatgactgaaactcatttaactgggttaatttcatttcttagactgaatatattattgttaagatacgtgtgcgtgttaggtaattctcagcatctcctccaagtaggccgaccttctcggaaaattcaccctaaaagtctcacaaaagaatgagttcatggggagattctgtaaagtgatgaactgagatgaaagcagccaacagcccaggagcttttcagaatagcgtctgcagcagaaccagtttccattcagagcgcgtccttggtggaaatgcttttttgtgtgtctccacgcgctgatggtggaatgggagccccaagacgtgtgggcttagaaatcaacttttgttccccaaggcttcttgtccagatctttccagtgctttcatagccctgggagatcaagttgttctccccactttactgcaaggtagactgaagttcagaagaaatactgaatttctgctcccagaagaatagtttctctggctcacaggcccaagttctcaatgaaatcgttttttaactttcacattcctaagctggcttcccggcacagaagccatggatttcccctctctcccttccccctcctcaaggaaatagtcttcctttatggattttcattggactctttcctcagcgattgtcctggctgtttattgatagtccttcccataagaaaatggggttaaacatggggtaggtattttgtctttcaaactacaaatggaatgtggtgacataaactagacatggggtgccctcaagtttccaaggggaccaatgtgccactgttcttccttggggatgaggcctttgactgttggatggatcagagcaggctccagtcagaccctggttctgaatgttttttttttcggtgactatccagtgagccttcagtgggtgcaaggcgccatacttgctgtgagagagctgagtagagtgttggtttttccataactacagggggaaaaaaagtcattaggctttccctttgtgtcagtgaaaccaaaagtgcttcttacaacgttcgctctgttcatgggttgtctatctaacattgagcagcattggagaggccacagctgagctatggagatgctaaattaactcatggcctcagtcagttcattctttaatttcctcaccaaattattgacttagagcataaccaaagacctcattcattcaccccaggtgggttggggtaattggagtttgttggtgaagtttgggggcggggtgttgggagtagagacagggtaaggggacgtgagaaaggaaaaggcatgaagttctatacctcagccagcagctgccttcgtttggaactgaagtccagccagcagactctctagctccatctcccctgtgccaccctaggtcatatgaccttggccaccttggagtagacccagacccctcgggacccgggacattagtctcaggctgctgatggattgatttgacatgaaccaaacacagccaaactcgatacccacaagctgtcagctgaacctgactgagtgttcttcctgagttcacgaggataggctagagtgcatttttactggtggatcagtgtgtgcgaaagagatgaccctttataaagagattttcaagtggatatatataaaagaaacagttgcttgtaaaatatacttttgtaaataatatttaattttttaaataatatatttggtgctgttttctcagatcccctgagagcactttttattttccttttaaattctatggtttcctttgcatttcttgaagtatattttaagggaaacagtgatcaccaatacatgttttcagttttttttttttttaaggtctctatcactttaatctggatcaaggctttgaagcaatgcctctctgcattttttccccagtggaacagactctgcagtacattaatcaggttgagaattgaaatattttcttgcatcagtattggctagaaaagaaaataaataaaaccaagttaatttagtagtaacaacttacagtgattcttcctgttggaagaatttccaacaaatcagaatcacgtttttagttgtgcgtgtgcgcgcacacgtgtgtaaaaagcactttcgattgtgcctcctgttttctcgagtggggacactttaactacagtttacacctcgggcgcataaagtttttcttctctttctctctggttgtttctgtttctgagtggaccaacagcagaacccacgaggatttgttttgagtatggagctgttgcgggtttgctcctttttcttgctttgcgtgctcagtttttacagactgtaaaggagatgtgttgtttgtgaagatggagcagagtcaaatctgtgcttctaactgagatgagagtgtattaatcacgtatcgcagggctccagctgttttagaagccacatcatgttaaacattaactggtttggattaaaagaacattaatattataatacacatatcttagtggtaaacagctttttttttttaaggtcagattgcctcaggtttagaaagaggctgagaaatcaaatcttgaacacaatcaacttacatattttaaaggaatctgcctcaaatgagaaaatatgctagttatctagatagaggaaagagatatttacttttttaaaaattaaaatagttatgaaatctggcagaaaaggtaaagcctagaagaaactatgaaagctattctcatgttaccaaattctatctgcgcatatgtttttgtataacatttcggtgacagtgggagtcggttccctttcccaacctgcagagactatcttccaatacagaatctgtctatttatgcttgtgtttacaaactgtatttgttgggtttgggtttttgttttctttggtggcatttttcaggtcactttgcttctataacaaaggtaattgttttcaaataatttgtcttcaccttttcctgtatttgtacatagtgattcagtattagagaaaagtgcattgtttctgtcatatttccaatctgtgttggtgctcatttgagaaaataaaagttttcaaatattaactctt

SEQ ID NO: 34614 - DNA, 940 bp, Homo sapiens
  source 1..940: mol_type = unassigned DNA
ggtgtaaacaagtccaggcgcctgcgaacccgggcccgggggggacggcgcccgccaggagcgccccccactcccaggccagcccaccccggcggaccgggccccgcgcgcccaggcgaggcactgggctccctctgctccccgtgggccgctccccgcgtggggccactgcccccggcccccgccatggtgcggatttcaaagcccaagacgtttcaggcctacttggatgattgtcaccggaggtatagctgtgcccactgccgcgctcacctggccaaccacgacgacctcatctccaagtccttccagggcagtcaggggcgtgcctacctcttcaactcagtggtgaacgtgggctgcgggccagccgaggagcgggtgctgctgaccggcctccatgctgtcgccgacatccactgcgagaactgcaagaccactttgggctggaaatatgaacaggcctttgagagcagccagaagtacaaagaggggaagtacatcattgaactcaaccacatgatcaaagacaacggctgggactgacccccgctcccccgacgcatgtggctccagcccggcctggccgccagggagcgccactggcttcccgccacccgaagggagctctggaccctcagagcccctgcagaggacggatctagctcctgtatatatattttattgcatgcactgtgaccttggggggagaacagaagggggacgacgcccccgcacctcctgcgatctggctggcttggatctcgtttttaacccgttcctgccccacctgccctatagttatggcctgtgttctgctctcctggtcccagtgcaccgtctgctctgtgaactcctcccaccaggcccttcttaccccacgcgtgtctgtccccctcgttctgtagcgtttgtacataataaaacaatggagtggaga

SEQ ID NO: 34615 - DNA, 1588 bp, Homo sapiens
  source 1..1588: mol_type = unassigned DNA
ggcgcctgcgaacccgggcccgggggggacggcgcccgccaggagcgccccccactcccaggccagcccaccccggcggaccgggccccgcgcgcccaggcgaggtgaggcccgcgccgtcagggctgcgtgtcgccccgcgcccctgcccagcccgcgaggactgccccctcccccggcgcccgcccccacccccgcgccccaggtgagccccggagtccaggtaaggctccgcgttgcaggtaagagcccctgagcgtagaggaggccttggcgcccgcaggtgagagcccctcccctcctaggtgaccctcaaccttcacggcgaggcctcctacctcctccaggtgggggaccctctccccgatgaaccccctaaaccaccagtgaaccccactgctctccagatgaggtcgcaaggaccaaccagtgcctacccgcccatgctcccccgaaactgggaactgacagcccagcccctccaaagccccttcctccagcttcagctgccaggtcagcaagggtgaggccggaagcaggcgggtgactcaccctgggcacctccgagcctcagtttccccatggatgcaacctgaggcctcctcactgagtcaaaaccgagacgcctctggtccccggagaggctgctggctctggggaaaggagagagcagcccagtgtgacagagcgagtccccacggctctgggagtgcctcgcatgtgtgtggcccaggtcctgacagcccacctactccctccccggcaggcactgggctccctctgctccccgtgggccgctccccgcgtggggccactgcccccggcccccgccatggtgcggatttcaaagcccaagacgtttcaggcctacttggatgattgtcaccggaggtatagctgtgcccactgccgcgctcacctggccaaccacgacgacctcatctccaagtccttccagggcagtcaggggcgtgcctacctcttcaactcagtggtgaacgtgggctgcgggccagccgaggagcgggtgctgctgaccggcctccatgctgtcgccgacatccactgcgagaactgcaagaccactttgggctggaaatatgaacaggcctttgagagcagccagaagtacaaagaggggaagtacatcattgaactcaaccacatgatcaaagacaacggctgggactgacccccgctcccccgacgcatgtggctccagcccggcctggccgccagggagcgccactggcttcccgccacccgaagggagctctggaccctcagagcccctgcagaggacggatctagctcctgtatatatattttattgcatgcactgtgaccttggggggagaacagaagggggacgacgcccccgcacctcctgcgatctggctggcttggatctcgtttttaacccgttcctgccccacctgccctatagttatggcctgtgttctgctctcctggtcccagtgcaccgtctgctctgtgaactcctcccaccaggcccttcttaccccacgcgtgtctgtccccctcgttctgtagcgtttgtacataataaaacaatggagtggagaca

SEQ ID NO: 34616 - DNA, 1721 bp, Homo sapiens
  source 1..1721: mol_type = unassigned DNA
agtgttatgatgcagttccacaacacacagccacattcacccacagaccgaggtacagaacgagagacaacctctgcccccccagcagctggccagctttgcagccccagtcttgagcccccaactaccctccccccacccacccccatccccttcccaattgaaggagcggaaagagaagagagaagagtgagcagagagattgagagattgagagagagagagagagatagacggagatctctggagcagacctcaaggtgacttctatttctatctggttctcgtctgggggggccctggccgggcagccccccaacacttctcctgccctgaaacacggctctagccaacctgctccgctgcttcacctgcgaccgtctctgcgggggctgcacggcgccagcccctccagcccaccagggcattgtcctccagcccgtcatgcccagctgtgaccccggtccgggccctgcctgcctccccaccaagactttccgcagctatctgccccgctgtcaccgcacttacagctgtgtccactgccgtgcacacctggccaaacacgatgagcttatttccaagtccttccaagggagccatggccgagcctacctgtttaactccgtggtcaacgtgggttgcgggccagctgaacagcgcctcttgctcacggggctccactcggtagctgacattttctgtgagagctgcaaaaccacactgggctggaaatatgagcaagcttttgagacgagccagaagtacaaggaagggaaatacatcattgaaatgtcacacatggtgaaggacaacggctgggactgaggggctcaggcagggtgtgcccttcctccgcatgcccctccctccccacggccctgccaagcagtctataccagcatgagtactgccccacccctgggggaaacctggctccaaccaacccctcccctgcctccaccatatccactaccaggcaccctttagaacaggggtctgggggtaccccaggggtgttaaggctcaggagtgggcagcagtcagggagagacagaactgggggaaagggatggttgtgggtctttctgttcccaagatcctgaacatggaagcgatggcagggcatagactcaggcagagaggattgtgggaggaatccgtttttgctccacctctttttgagtgaacagaggacaaaccttgggtcacagggcaagtagatcatggaccacagaacagcagatgagaaaagacttgggttggagtgaaattctggtctcagacaccaggagaccagagtctctgaggatgaagtttcctacccctatttgtagggaaaaggacttgagtgcagggaaaactcaaatcccaggccctgggaaatagtaaaataatcaaagggttttccatttcactccacttgttagtttatcttggcactgaagaggcactttcgagtatctaacttttgccattgggtggggtggggacagctgctcgcggaacagcccctagtcggctgcttccagagtaagcagtctttatgggctttctctgaggcccagtcactgctcctgggacccagtcccctggaggggaggtggaaaatcagtgctacggggccagtctttcccgtggctgccaccagcgaatgaaacttttgtatgatacataaagtgcttgagtctatttttaataaaaagggaaaaagcaacttg

SEQ ID NO: 34617 - DNA, 4000 bp, Homo sapiens
  source 1..4000: mol_type = unassigned DNA
agtgttatgatgcagttccacaacacacagccacattcacccacagaccgaggagcggaaagagaagagagaagagtgagcagagagattgagagattgagagagagagagagagatagacggagatctctggagcagacctcaaggtgagggggcagcccttctccaaatgaatttttttctctttgcaaatttcctcctcctgctgcgtgttgctttctcccctttgcaaaagcattattcatccaccctttgtcctcccttccccctccccgctgcctccgctcctctctctcggttcctccatccctctccaagctctgacgattcccgcacttatttcccggcaactttggctgcagcatcaggcatcactgtttattgttttgctgctggtgcagacccccaaagcctgccctgggagctggcggtgctgctaattatttggaccataccatactgagaataccagcctggggggtgccaaaacctcagagcagatgagaaaatccattgtgagcaggtgtccccccccttttcttttcccccctgagaagcacgagattcgcacctggttcctccagcctccgcctcggcgcctctgctgtcagctgtcagttgcccccgccagccctccctctcccctttctcctacggtccagccccgtctcacttcaggggaacatctctccccagcactcggcttgcctttgttttttctccagtcatttgcccaacttgcttctccctgtgatccgagatgggtgaaaaaatgacccctactcccctttgtgattctctggccttctgtgcagcctttccttggcttgactgggaattaggggagagggagggaggcgtgacggccggaggctggagaaggagctcaggattggggacccaagctgccccattctccatgccccttgaagaaggtgtttcaaggtggtgcatgtcagaggggaactcgctggcaaagttgaaggcaaacctgtgaagcagagactgaaaggtggtctcttggcaaggagggcccgtttcctgcagccggagcccaatgtcaccctgaactcagcccaaggtgtcttcctgggacccagcccggaggagaggacctgaaactgaagatagtctctatggaggttttgcggagagactgcctggcggccttcagagagagtggaacagctgggtgcctgtggccactgcggaggacaggacgaggagagcctgtatgccctggctaaccagagccaacactgcctcttctctgcttagtgctctagcattgccagagtgcccagctggcatctctgaaccagacttaggctaaccacccacagtgggctgggaagccctatgaaggagaaagcagcagctcacctgcttatcggagccaacaggggccacctcccttcttatcctctgcctccagcaccttcagccactcggaggctggcgcgtgggcagaaggcaatcttcctctattcctaatcagaacccagcaattacttcatcttcagtcacccacagagtcactgctgtttgtccctgcccctgggagaaggtagaaagaaacattttctgccttgtgccccaaagcacagctgttaaaaataagagtcccccttctgctgttcgttgtggccgttgctctcaccctaccacacagccctgcccagcccaggaatcaggctcctctgacatgctacccatttcccattggctccagctgtcagattgcctgaagaaaatgtattttctgcctaagtctttaaccaagggctaaggcaacagttagtaaagactaggagagagaaagaccaaggggcccacaggctgggaagacaggcaggtgcttattctgggccagaatgagtgaaccaaggtgcgagaatgggcggccacacgtgagggctttggtactgttggaaacatctataaagttctagtgaagagtcccagagcacaggaccctgacctcaggagagaaccgaatcagggtttgtatacctgcctgcatgctctccctcccctcaccttacacctcctgcccccctccccaaaatgtataaaggaccaattgtattgcaaacaaagaccatgtaaaagaaagaccttcaggcatccccaactcttaaaaggctctgatcccctgagacacagtgcctgtgcgatgcagagcctcacgaagaactgaaaaccaaggagagggcacttgcagatgacgttgctcccatggcagcgtctgtgcccgtgggcttctctctgtggaaaatggtggaggctgcttctgccccaggagggagaaacaccgactccctggctttggcgccagaagcctggatcggctgccaggtttgccagagcagaatggggatccaggggacagggcgacaatgcaactggatgctgtgggggggtcgatggtgatggggaaagtagaggtatgggtgagctgattcccttttcctccattccctcaggaggggtcctcctgaggtcgcagctcccctgatgtcctttcccctcttcccaggtgacttctatttctatctggttctcgtctgggggggccctggccgggcagccccccaacacttctcctgccctgaaacacggctctagccaacctgctccgctgcttcacctgcgaccgtctctgcgggggctgcacggcgccagcccctccagcccaccagggcattgtcctccagcccgtcatgcccagctgtgaccccggtccgggccctgcctgcctccccaccaagactttccgcagctatctgccccgctgtcaccgcacttacagctgtgtccactgccgtgcacacctggccaaacacgatgagcttatttccaagtccttccaagggagccatggccgagcctacctgtttaactccgtggtcaacgtgggttgcgggccagctgaacagcgcctcttgctcacggggctccactcggtagctgacattttctgtgagagctgcaaaaccacactgggctggaaatatgagcaagcttttgagacgagccagaagtacaaggaagggaaatacatcattgaaatgtcacacatggtgaaggacaacggctgggactgaggggctcaggcagggtgtgcccttcctccgcatgcccctccctccccacggccctgccaagcagtctataccagcatgagtactgccccacccctgggggaaacctggctccaaccaacccctcccctgcctccaccatatccactaccaggcaccctttagaacaggggtctgggggtaccccaggggtgttaaggctcaggagtgggcagcagtcagggagagacagaactgggggaaagggatggttgtgggtctttctgttcccaagatcctgaacatggaagcgatggcagggcatagactcaggcagagaggattgtgggaggaatccgtttttgctccacctctttttgagtgaacagaggacaaaccttgggtcacagggcaagtagatcatggaccacagaacagcagatgagaaaagacttgggttggagtgaaattctggtctcagacaccaggagaccagagtctctgaggatgaagtttcctacccctatttgtagggaaaaggacttgagtgcagggaaaactcaaatcccaggccctgggaaatagtaaaataatcaaagggttttccatttcactccacttgttagtttatcttggcactgaagaggcactttcgagtatctaacttttgccattgggtggggtggggacagctgctcgcggaacagcccctagtcggctgcttccagagtaagcagtctttatgggctttctctgaggcccagtcactgctcctgggacccagtcccctggaggggaggtggaaaatcagtgctacggggccagtctttcccgtggctgccaccagcgaatgaaacttttgtatgatacataaagtgcttgagtctatttttaataaaaagggaaaaagcaacttg

SEQ ID NO: 34618 - DNA, 889 bp, Homo sapiens
  source 1..889: mol_type = unassigned DNA
ccgactccctggctttggcgccagaagcctggatcggctgccaggtttgccagagcagaatggggatccaggggacagggcgacaatgcaactggatgctgtgggggggtcgatggtgatggggaaagtagaggtgacttctatttctatctggttctcgtctgggggggccctggccgggcagccccccaacacttctcctgccctgaaacacggctctagccaacctgctccgctgcttcacctgcgaccgtctctgcgggggctgcacggcgccagcccctccagcccaccagggcattgtcctccagcccgtcatgcccagctgtgaccccggtccgggccctgcctgcctccccaccaagactttccgcagctatctgccccgctgtcaccgcacttacagctgtgtccactgccgtgcacacctggccaaacacgatgagcttatttccaagtccttccaagggagccatggccgagcctacctgtttaactccgtggtcaacgtgggttgcgggccagctgaacagcgcctcttgctcacggggctccactcggtagctgacattttctgtgagagctgcaaaaccacactgggctggaaatatgagcaagcttttgagacgagccagaagtacaaggaagggaaatacatcattgaaatgtcacacatggtgaaggacaacggctgggactgaggggctcaggcagggtgtgcccttcctccgcatgcccctccctccccacggccctgccaagcagtctataccagcatgagtactgccccacccctgggggaaacctggctccaaccaacccctcccctgcctccaccatatccactaccaggcaccctttagaacaggggtctgggggtaccccaggg

SEQ ID NO: 34619 - DNA, 561 bp, Homo sapiens
  source 1..561: mol_type = unassigned DNA
ttcacccacagaccgaggtacagaacgagagacaacctctgcccccccagcagctggccagctttgcagccccagtcttgagcccccaactaccctccccccacccacccccatccccttcccaattgaaggagcggaaagagaagagagaagagtgagcagagagattgagagattgagagagagagagagagatagacggagatctctggagcagacctcaagccaacctgctccgctgcttcacctgcgaccgtctctgcgggggctgcacggcgccagcccctccagcccaccagggcattgtcctccagcccgtcatgcccagctgtgaccccggtccgggccctgcctgcctccccaccaagactttccgcagctatctgccccgctgtcaccgcacttacagctgtgtccactgccgtgcacacctggccaaacacgatgagcttatttccaagtccttccaagggagccatggccgagcctacctgtttaactccgtggtcaacgtgggttgcgggccagctgaacagcgcctcttgctcacggggctccact

SEQ ID NO: 34620 - DNA, 2510 bp, Homo sapiens
  source 1..2510: mol_type = unassigned DNA
ctaatcagaacccagcaattacttcatcttcagtcacccacagagtcactgctgtttgtccctgcccctgggagaaggtagaaagaaacattttctgccttgtgccccaaagcacagctgttaaaaataagagtcccccttctgctgttcgttgtggccgttgctctcaccctaccacacagccctgcccagcccaggaatcaggctcctctgacatgctacccatttcccattggctccagctgtcagattgcctgaagaaaatgtattttctgcctaagtctttaaccaagggctaaggcaacagttagtaaagactaggagagagaaagaccaaggggcccacaggctgggaagacaggcaggtgcttattctgggccagaatgagtgaaccaaggtgcgagaatgggcggccacacgtgagggctttggtactgttggaaacatctataaagttctagtgaagagtcccagagcacaggaccctgacctcaggagagaaccgaatcagggtttgtatacctgcctgcatgctctccctcccctcaccttacacctcctgcccccctccccaaaatgtataaaggaccaattgtattgcaaacaaagaccatgtaaaagaaagaccttcaggcatccccaactcttaaaaggctctgatcccctgagacacagtgcctgtgcgatgcagagcctcacgaagaactgaaaaccaaggagagggcacttgcagatgacgttgctcccatggcagcgtctgtgcccgtgggcttctctctgtggaaaatggtggaggctgcttctgccccaggagggagaaacaccgactccctggctttggcgccagaagcctggatcggctgccaggtttgccagagcagaatggggatccaggggacagggcgacaatgcaactggatgctgtgggggggtcgatggtgatggggaaagtagaggtatgggtgagctgattcccttttcctccattccctcaggaggggtcctcctgaggtcgcagctcccctgatgtcctttcccctcttcccaggtgacttctatttctatctggttctcgtctgggggggccctggccgggcagccccccaacacttctcctgccctgaaacacggctctagccaacctgctccgctgcttcacctgcgaccgtctctgcgggggctgcacggcgccagcccctccagcccaccagggcattgtcctccagcccgtcatgcccagctgtgaccccggtccgggccctgcctgcctccccaccaagactttccgcagctatctgccccgctgtcaccgcacttacagctgtgtccactgccgtgcacacctggccaaacacgatgagcttatttccaagtccttccaagggagccatggccgagcctacctgtttaactccgtggtcaacgtgggttgcgggccagctgaacagcgcctcttgctcacggggctccactcggtagctgacattttctgtgagagctgcaaaaccacactgggctggaaatatgagcaagcttttgagacgagccagaagtacaaggaagggaaatacatcattgaaatgtcacacatggtgaaggacaacggctgggactgaggggctcaggcagggtgtgcccttcctccgcatgcccctccctccccacggccctgccaagcagtctataccagcatgagtactgccccacccctgggggaaacctggctccaaccaacccctcccctgcctccaccatatccactaccaggcaccctttagaacaggggtctgggggtaccccaggggtgttaaggctcaggagtgggcagcagtcagggagagacagaactgggggaaagggatggttgtgggtctttctgttcccaagatcctgaacatggaagcgatggcagggcatagactcaggcagagaggattgtgggaggaatccgtttttgctccacctctttttgagtgaacagaggacaaaccttgggtcacagggcaagtagatcatggaccacagaacagcagatgagaaaagacttgggttggagtgaaattctggtctcagacaccaggagaccagagtctctgaggatgaagtttcctacccctatttgtagggaaaaggacttgagtgcagggaaaactcaaatcccaggccctgggaaatagtaaaataatcaaagggttttccatttcactccacttgttagtttatcttggcactgaagaggcactttcgagtatctaacttttgccattgggtggggtggggacagctgctcgcggaacagcccctagtcggctgcttccagagtaagcagtctttatgggctttctctgaggcccagtcactgctcctgggacccagtcccctggaggggaggtggaaaatcagtgctacggggccagtctttcccgtggctgccaccagcgaatgaaacttttgtatgatacataaagtgcttgagtctatttttaataaaaagggaaaaagcaacttg

SEQ ID NO: 34621 - DNA, 2182 bp, Homo sapiens
  source 1..2182: mol_type = unassigned DNA
gccagggcctgactaaacctggagactcgggtggccgaggggcttcataccagctgaagagcgacaagccgctggcagccgcggatctcaccgccgctcagggtttttagaacttcagccataaaaatgggcagaattttccttgatcatatcggtggtacccgtctgttttcttgtgcaaactgtgatacgatcctgaccaaccgctcagaactcatctccactcgtttcacaggcgccactggcagagcatttctttttaacaaggtagttaacctgcagtacagtgaagttcaagatcgggtcatgctcactggccgccacatggttcgagatgtgagctgcaaaaactgcaatagcaaactgggatggatctatgagtttgccactgaagacagccagcgatataaggaaggccgcgtgatcctggaacgtgctctagttcgagagagtgagggctttgaggagcatgtaccatctgataactcttgaagatacagagagaaatccatcttttcccaggtctccttcactgaaaacaaaaatctacttacatacactgtcaccttagcatcagagtcggattaatgaactgcggaacaagaggttgtgagaatctaagatggaacctttctttctttctttctttttttttaaattttgtattttccatccaacagcagtgtgtagagagaatattatgcagatgccgttaattttttaccctatgtttacatcttgaggcagcagagtctgtctgcagctatgtggtgagctatgtaaggaaaaaaatctgggctgttagagtgaaaaagtgtgttttatgtcaattgtgaaaggaaaatgttaggagtatggtttttaaacttgggcttcattttaaacttttttttttaaacccagttatttcacttgatttgctagcttcagagaagagatccgaatctgtgcccagcgctaaaggctcagtgttagcatggcttgtgctggccggtgtgccatattcttgttggagatgaaccgtagcaccagagcccattcttccttgtcagtcttggcccaaagatgtcaccattcctagttatttgtcaccacataattggtgttgattggaaactttttctgagatgggacagaactgctgggttgtctttttccatgtaacttaagcatagtaatataaataaagtaatagttggatgcttttggtcctgtgttgcttttaaaaacaccttataaaagaggagagtatttgataagcaattttcatagtagtaaagttttttttcatctcttaaactaaattgaccatgcatataatattctttgtttaaatgaaagcatactgttgaaacccgcagtgttgcatttagaaaacagttgaacagaatgtcaatgtgcattcatgcaaaaaaacatttaatctgcatctgttttagaaaagggggaaatgaagcaacttgtctaaaaatactgctttacaaagcatttcagcctttccccctcagttttgcattgattttttgacaagtctgtagagcctaatagtttccatcaaaggcctagatctcttatttagcatttttttcagctcttctctcagaagttcagctgttgaaacgaaaactgtactttgtaccctcacatacaaagggatcaaatttgacctggtgttattttagccccaaatttatgacattacacaatattaaaatgtaaatgtttctttacccaaactacttctagatattctagtatttgcttctggtggaattaaatgacggtaaaattggctaattatttgaatgaatgaatggatggatgttttgcatgctcaatttctaggtcctttgtctagaaaggaaatttgcctcagttgaattagtgaaatatttctgtcgttgatattaaaagtgacttctgagtacagttaagttcctcctatttgccactgggctgttggttagaagcataggtaactgattaagtaggtatgatactgcatttgaaataagtggacacaaactatcctttctccaccatggactcaatctgagaacaacagcattcatttccattcatttccatactggcttttgattatatgcagattcctagtagcatgccttacctacagcactatgtgcatttgctgtcacaataaagtatattttgtcttgca

SEQ ID NO: 34622 - DNA, 2499 bp, Homo sapiens
  source 1..2499: mol_type = unassigned DNA
cagggagaggcggggccaaggccagggcctgactaaacctggagactcgggtggccgaggggcttcataccagctgaagagcgacaagccgctggcagccgcggatctcaccgccgctcaggagatctgttggtaatctgaggatttttattctacgtcgtcttgacagatggaaaacctgaagtaacttcgggctaaccttgtgtttttggaaaattagtagacttggtggtgaagaaactgggaggagtaggatattagctaactttgcatagccacatatagagcgtcgcagctgcattccaccaaagaggaaccaaaaggcctgtggtgttcccagggtacatattcatgccagaagtgaagtgctttggtgaattcgtttcctgaaagtttatcgcatacttgtactgggttaggtttttagaacttcagccataaaaatgggcagaattttccttgatcatatcggtggtacccgtctgttttcttgtgcaaactgtgatacgatcctgaccaaccgctcagaactcatctccactcgtttcacaggcgccactggcagagcatttctttttaacaaggtagttaacctgcagtacagtgaagttcaagatcgggtcatgctcactggccgccacatggttcgagatgtgagctgcaaaaactgcaatagcaaactgggatggatctatgagtttgccactgaagacagccagcgatataaggaaggccgcgtgatcctggaacgtgctctagttcgagagagtgagggctttgaggagcatgtaccatctgataactcttgaagatacagagagaaatccatcttttcccaggtctccttcactgaaaacaaaaatctacttacatacactgtcaccttagcatcagagtcggattaatgaactgcggaacaagaggttgtgagaatctaagatggaacctttctttctttctttctttttttttaaattttgtattttccatccaacagcagtgtgtagagagaatattatgcagatgccgttaattttttaccctatgtttacatcttgaggcagcagagtctgtctgcagctatgtggtgagctatgtaaggaaaaaaatctgggctgttagagtgaaaaagtgtgttttatgtcaattgtgaaaggaaaatgttaggagtatggtttttaaacttgggcttcattttaaacttttttttttaaacccagttatttcacttgatttgctagcttcagagaagagatccgaatctgtgcccagcgctaaaggctcagtgttagcatggcttgtgctggccggtgtgccatattcttgttggagatgaaccgtagcaccagagcccattcttccttgtcagtcttggcccaaagatgtcaccattcctagttatttgtcaccacataattggtgttgattggaaactttttctgagatgggacagaactgctgggttgtctttttccatgtaacttaagcatagtaatataaataaagtaatagttggatgcttttggtcctgtgttgcttttaaaaacaccttataaaagaggagagtatttgataagcaattttcatagtagtaaagttttttttcatctcttaaactaaattgaccatgcatataatattctttgtttaaatgaaagcatactgttgaaacccgcagtgttgcatttagaaaacagttgaacagaatgtcaatgtgcattcatgcaaaaaaacatttaatctgcatctgttttagaaaagggggaaatgaagcaacttgtctaaaaatactgctttacaaagcatttcagcctttccccctcagttttgcattgattttttgacaagtctgtagagcctaatagtttccatcaaaggcctagatctcttatttagcatttttttcagctcttctctcagaagttcagctgttgaaacgaaaactgtactttgtaccctcacatacaaagggatcaaatttgacctggtgttattttagccccaaatttatgacattacacaatattaaaatgtaaatgtttctttacccaaactacttctagatattctagtatttgcttctggtggaattaaatgacggtaaaattggctaattatttgaatgaatgaatggatggatgttttgcatgctcaatttctaggtcctttgtctagaaaggaaatttgcctcagttgaattagtgaaatatttctgtcgttgatattaaaagtgacttctgagtacagttaagttcctcctatttgccactgggctgttggttagaagcataggtaactgattaagtaggtatgatactgcatttgaaataagtggacacaaactatcctttctccaccatggactcaatctgagaacaacagcattcatttccattcatttccatactggcttttgattatatgcagattcctagtagcatgccttacctacagcactatgtgcatttgctgtcacaataaagtatattttgtcttgca

SEQ ID NO: 34623 - DNA, 2560 bp, Homo sapiens
  source 1..2560: mol_type = unassigned DNA
cagggagaggcggggccaaggccagggcctgactaaacctggagactcgggtggccgaggggcttcataccagctgaagagcgacaagccgctggcagccgcggatctcaccgccgctcaggagatctgttggtaatctgaggatttttattctacgtcgtcttgacagatggaaaacctgaagtaacttcgggctaaccttgtgtttttggaaaattagtagacttggtggtgaagaaactgggaggagtaggatattagctaactttgcatagccacatatagagcgtcgcagctgcattccaccaaagaggaaccaaaaggcctgtggtgttcccagggtacatattcatgccagaagtgaagtgctttggtgaattcgtttcctgaaagtttatcgcatacttgtactgggttagccttatgccagcctggaccatcttggaggcagtgtaggatcatggaagaactttgaattaggtttttagaacttcagccataaaaatgggcagaattttccttgatcatatcggtggtacccgtctgttttcttgtgcaaactgtgatacgatcctgaccaaccgctcagaactcatctccactcgtttcacaggcgccactggcagagcatttctttttaacaaggtagttaacctgcagtacagtgaagttcaagatcgggtcatgctcactggccgccacatggttcgagatgtgagctgcaaaaactgcaatagcaaactgggatggatctatgagtttgccactgaagacagccagcgatataaggaaggccgcgtgatcctggaacgtgctctagttcgagagagtgagggctttgaggagcatgtaccatctgataactcttgaagatacagagagaaatccatcttttcccaggtctccttcactgaaaacaaaaatctacttacatacactgtcaccttagcatcagagtcggattaatgaactgcggaacaagaggttgtgagaatctaagatggaacctttctttctttctttctttttttttaaattttgtattttccatccaacagcagtgtgtagagagaatattatgcagatgccgttaattttttaccctatgtttacatcttgaggcagcagagtctgtctgcagctatgtggtgagctatgtaaggaaaaaaatctgggctgttagagtgaaaaagtgtgttttatgtcaattgtgaaaggaaaatgttaggagtatggtttttaaacttgggcttcattttaaacttttttttttaaacccagttatttcacttgatttgctagcttcagagaagagatccgaatctgtgcccagcgctaaaggctcagtgttagcatggcttgtgctggccggtgtgccatattcttgttggagatgaaccgtagcaccagagcccattcttccttgtcagtcttggcccaaagatgtcaccattcctagttatttgtcaccacataattggtgttgattggaaactttttctgagatgggacagaactgctgggttgtctttttccatgtaacttaagcatagtaatataaataaagtaatagttggatgcttttggtcctgtgttgcttttaaaaacaccttataaaagaggagagtatttgataagcaattttcatagtagtaaagttttttttcatctcttaaactaaattgaccatgcatataatattctttgtttaaatgaaagcatactgttgaaacccgcagtgttgcatttagaaaacagttgaacagaatgtcaatgtgcattcatgcaaaaaaacatttaatctgcatctgttttagaaaagggggaaatgaagcaacttgtctaaaaatactgctttacaaagcatttcagcctttccccctcagttttgcattgattttttgacaagtctgtagagcctaatagtttccatcaaaggcctagatctcttatttagcatttttttcagctcttctctcagaagttcagctgttgaaacgaaaactgtactttgtaccctcacatacaaagggatcaaatttgacctggtgttattttagccccaaatttatgacattacacaatattaaaatgtaaatgtttctttacccaaactacttctagatattctagtatttgcttctggtggaattaaatgacggtaaaattggctaattatttgaatgaatgaatggatggatgttttgcatgctcaatttctaggtcctttgtctagaaaggaaatttgcctcagttgaattagtgaaatatttctgtcgttgatattaaaagtgacttctgagtacagttaagttcctcctatttgccactgggctgttggttagaagcataggtaactgattaagtaggtatgatactgcatttgaaataagtggacacaaactatcctttctccaccatggactcaatctgagaacaacagcattcatttccattcatttccatactggcttttgattatatgcagattcctagtagcatgccttacctacagcactatgtgcatttgctgtcacaataaagtatattttgtcttgca

SEQ ID NO: 34624 - DNA, 2197 bp, Homo sapiens
  source 1..2197: mol_type = unassigned DNA
ataccagctgaagagcgacaagccgctggcagccgcggatctcaccgccgctcaggagatctgttggtaatctgaggatttttattctacgtcgtcttgacagatggaaaacctgaagtttttagaacttcagccataaaaatgggcagaattttccttgatcatatcggtggtacccgtctgttttcttgtgcaaactgtgatacgatcctgaccaaccgctcagaactcatctccactcgtttcacaggcgccactggcagagcatttctttttaacaaggtagttaacctgcagtacagtgaagttcaagatcgggtcatgctcactggccgccacatggttcgagatgtgagctgcaaaaactgcaatagcaaactgggatggatctatgagtttgccactgaagacagccagcgatataaggaaggccgcgtgatcctggaacgtgctctagttcgagagagtgagggctttgaggagcatgtaccatctgataactcttgaagatacagagagaaatccatcttttcccaggtctccttcactgaaaacaaaaatctacttacatacactgtcaccttagcatcagagtcggattaatgaactgcggaacaagaggttgtgagaatctaagatggaacctttctttctttctttctttttttttaaattttgtattttccatccaacagcagtgtgtagagagaatattatgcagatgccgttaattttttaccctatgtttacatcttgaggcagcagagtctgtctgcagctatgtggtgagctatgtaaggaaaaaaatctgggctgttagagtgaaaaagtgtgttttatgtcaattgtgaaaggaaaatgttaggagtatggtttttaaacttgggcttcattttaaacttttttttttaaacccagttatttcacttgatttgctagcttcagagaagagatccgaatctgtgcccagcgctaaaggctcagtgttagcatggcttgtgctggccggtgtgccatattcttgttggagatgaaccgtagcaccagagcccattcttccttgtcagtcttggcccaaagatgtcaccattcctagttatttgtcaccacataattggtgttgattggaaactttttctgagatgggacagaactgctgggttgtctttttccatgtaacttaagcatagtaatataaataaagtaatagttggatgcttttggtcctgtgttgcttttaaaaacaccttataaaagaggagagtatttgataagcaattttcatagtagtaaagttttttttcatctcttaaactaaattgaccatgcatataatattctttgtttaaatgaaagcatactgttgaaacccgcagtgttgcatttagaaaacagttgaacagaatgtcaatgtgcattcatgcaaaaaaacatttaatctgcatctgttttagaaaagggggaaatgaagcaacttgtctaaaaatactgctttacaaagcatttcagcctttccccctcagttttgcattgattttttgacaagtctgtagagcctaatagtttccatcaaaggcctagatctcttatttagcatttttttcagctcttctctcagaagttcagctgttgaaacgaaaactgtactttgtaccctcacatacaaagggatcaaatttgacctggtgttattttagccccaaatttatgacattacacaatattaaaatgtaaatgtttctttacccaaactacttctagatattctagtatttgcttctggtggaattaaatgacggtaaaattggctaattatttgaatgaatgaatggatggatgttttgcatgctcaatttctaggtcctttgtctagaaaggaaatttgcctcagttgaattagtgaaatatttctgtcgttgatattaaaagtgacttctgagtacagttaagttcctcctatttgccactgggctgttggttagaagcataggtaactgattaagtaggtatgatactgcatttgaaataagtggacacaaactatcctttctccaccatggactcaatctgagaacaacagcattcatttccattcatttccatactggcttttgattatatgcagattcctagtagcatgccttacctacagcactatgtgcatttgctgtcacaataaagtatattttgtcttgca

SEQ ID NO: 34625 - DNA, 1735 bp, Homo sapiens
  source 1..1735: mol_type = unassigned DNA
tcgcatagtcgggggcgcgcccggtctccgccccgaatccaagtcggaacttgaccgagttgtttgggccgcgatgaccgcacggcgtgaaccgtcctgagcagggcccacgcccggcccaagcggcccagccaccgggctggggcggtgtctccctttgccccctcccccccatgaacgtccgcctcccccgccctcctgcccagaggacccgggactgacagcgcagggtgacggttgggcagcccgccgggtgtcgggaccaagagagccccccggccacccgctcagctgtttcctgctcgtgtttgttgtgccgagggaggccccgccgccaccgccgccgccgcgctctgccgccccggtccctcccgattggccggctggcgtcacgtggcctccatcagctgggccggcgggggcgctcgcgggccccactgcggctgccgggtgagcccacccgggggtcgcccgggccggcccagctccgccagcttcgggctgcggccttccctccgcttgcagtcgggagggtgggcgtgcccttgcaacccctttcctgtaccttctctgcagccttatgccagcctggaccatcttggaggcagtgtaggatcatggaagaactttgaattaggtttttagaacttcagccataaaaatgggcagaattttccttgatcatatcggtggtacccgtctgttttcttgtgcaaactgtgatacgatcctgaccaaccgctcagaactcatctccactcgtttcacaggcgccactggcagagcatttctttttaacaaggtagttaacctgcagtacagtgaagttcaagatcgggtcatgctcactggccgccacatggttcgagatgtgagctgcaaaaactgcaatagcaaactgggatggatctatgagtttgccactgaagacagccagcgatataaggaaggccgcgtgatcctggaacgtgctctagttcgagagagtgagggctttgaggagcatgtaccatctgataactcttgaagatacagagagaaatccatcttttcccaggtctccttcactgaaaacaaaaatctacttacatacactgtcaccttagcatcagagtcggattaatgaactgcggaacaagaggttgtgagaatctaagatggaacctttctttctttctttctttttttttaaattttgtattttccatccaacagcagtgtgtagagagaatattatgcagatgccgttaattttttaccctatgtttacatcttgaggcagcagagtctgtctgcagctatgtggtgagctatgtaaggaaaaaaatctgggctgttagagtgaaaaagtgtgttttatgtcaattgtgaaaggaaaatgttaggagtatggtttttaaacttgggcttcattttaaacttttttttttaaacccagttatttcacttgatttgctagcttcagagaagagatccgaatctgtgcccagcgctaaaggctcagtgttagcatggcttgtgctggccggtgtgccatattcttgttggagatgaaccgtagcaccagagcccattcttccttgtcagtcttggcccaaagatgtcaccattcctagttatttgtcaccacataattggtgttgattggaaactttttctgagatgggacagaactgctgggttgtctttttccatgtaacttaagcatagtaatataaataaagtaatagttgga

SEQ ID NO: 34626 - DNA, 3994 bp, Homo sapiens
  source 1..3994: mol_type = unassigned DNA
aggggaggccattttccgtttctgggaggagtgaggggcaacgggtcggagaaaaaggaaaaaagaagggctcagcgcctccccgccgggccgtggacagaggggcacagtttcggcaggcgggtgaggtcgctgagggcccgccggagatgttttccttgtcgagcacggtgcaaccccaggttacagttcctctgagtcatctcatcaatgccttccatacaccaaaaaacacttctgtttctctcagtggagtgtcagtttctcaaaaccagcatcgagatgtagttcctgagcatgaggctcccagcagtgagtgtatgttcagtgacttcctgacgaagcttaacattgtttcaattggcaaaggaaaaatattcgaagggtacagatccatgttcatggagccagcaaaaaggatgaagaagagcttggacacaaccgataactggcacatccgtccagaacccttctccctctcaatccctccttcacttaacttaagggaccttggattatctgaactaaaaattggacagattgatcagctggtagaaaatctacttcctggattttgtaaaggcaaaaacatttcttcccattggcatacatcccatgtctctgcacaatccttctttgaaaataaatatggtaacttagatatatttagtacattacgttcctcttgcttgtatcgacatcattcaagagctcttcaaagcatttgttcagatcttcagtactggccagttttcatacagtctcggggttttaaaactttgaaatcaaggacacgacgtctccagtctacctccgagagattagctgaaacacagaatatagcgccatcattcgtgaaggggtttcttttgcgggacagaggatcagatgttgagagtttggacaaactcatgaaaaccaaaaatatacctgaagctcaccaagatgcatttaaaactggttttgcggaaggttttctgaaagctcaagcactcacacaaaaaaccaatgattccctaaggcgaacccgtctgattctcttcgttctgctgctattcggcatttatggacttctaaaaaacccatttttatctgtccgcttccggacaacaacagggcttgattctgcagtagatcctgtccagatgaaaaatgtcacctttgaacatgttaaaggggtggaggaagctaaacaagaattacaggaagttgttgaattcttgaaaaatccacaaaaatttactattcttggaggtaaacttccaaaaggaattcttttagttggacccccagggactggaaagacacttcttgcccgagctgtggcgggagaagctgatgttcctttttattatgcttctggatccgaatttgatgagatgtttgtgggtgtgggagccagccgtatcagaaatctttttagggaagcaaaggcgaatgctccttgtgttatatttattgatgaattagattctgttggtgggaagagaattgaatctccaatgcatccatattcaaggcagaccataaatcaacttcttgctgaaatggatggttttaaacccaatgaaggagttatcataataggagccacaaacttcccagaggcattagataatgccttaatacgtcctggtcgttttgacatgcaagttacagttccaaggccagatgtaaaaggtcgaacagaaattttgaaatggtatctcaataaaataaagtttgatcaatccgttgatccagaaattatagctcgaggtactgttggcttttccggagcagagttggagaatcttgtgaaccaggctgcattaaaagcagctgttgatggaaaagaaatggttaccatgaaggagctggagttttccaaagacaaaattctaatggggcctgaaagaagaagtgtggaaattgataacaaaaacaaaaccatcacagcatatcatgaatctggtcatgccattattgcatattacacaaaagatgcaatgcctatcaacaaagctacaatcatgccacgggggccaacacttggacatgtgtccctgttacctgagaatgacagatggaatgaaactagagcccagctgcttgcacaaatggatgttagtatgggaggaagagtggcagaggagcttatatttggaaccgaccatattacaacaggtgcttccagtgattttgataatgccactaaaatagcaaagcggatggttaccaaatttggaatgagtgaaaagcttggagttatgacctacagtgatacagggaaactaagtccagaaacccaatctgccatcgaacaagaaataagaatccttctaagggactcatatgaacgagcaaaacatatcttgaaaactcatgcaaaggagcataagaatctcgcagaagctttattgacctatgagactttggatgccaaagagattcaaattgttcttgaggggaaaaagttggaagtgagatgataactctcttgatatggatgcttgctggttttattgcaagaatacaagtagcattgcagtagtctacttttacaacgctttcccctcattcttgatgtggtgtaattgaagggtgtgaaatgctttgtcaatcatttgtcacatttatccagtttgggttattctcattatgacacctattgcaaattagcatcccatggcaaatatattttgaaaaaataaagaactatcaggattgaaaacagctcttttgaggaatgtcaattagttattaagttgaaagtaattaatgattttatgtttggttactctactagatttgataaaaattgtgcctttagccttctatatacatcagtggaaacttaagatgcagtaattatgttccagattgaccatgaataaaatattttttaatctaaatgtagagaagttgggattaaaagcagtctcggaaacacagagccaggaatatagccttttggcatggtgccatggctcacatctgtaatcccagcacttttggaggctgaggcgggtggattgcttgaggccaggagttcgagaccagcctggccaacgtggtgaaacgctgtctctactaaaatacaaaaaaatagggctgggcgcggttgctcacgcctgtaatcccagcacttttcagaggccaaggcgggcaaatcacctgaggtcaagagtttgagaccagcctggccaacatggtgaaaccccatctctactaaacatgcaaaaattacctgggcatggtggcaggtgcttataatcccagctactctgggggccaaggcaggagaattgcttgagcctgggagatggaggttgcagtgagctgagatcatgccactgcactccagcctgggcaacagagcaagactctgcctcaaaaaaaaattaaaataaatttaaatacaaaaaaaaatagccaggtgtggggtgcatgcctggaatcccagctacttgagaggctgaggcacgagaattgcttgaacccaggaggtggaggttgcagtgagccaagatcacaggagccactgcactccagcctgggtgacagagtgagactctgtctcaaaaaaaaattaaataaattattataacctttcagaaatgctgtgtgcattttcatgttcttttttttagcattactgtcactctccctaatgaaatgtacttcagagaagcagtattttgttaaataaatacataacctcattctgaataatgtccctcattttgactataactgtgcttggtttcaaaagcaaaattaaacaaaaatctcagtcccctccgaagtgaactttgtgttaccctgcgtcagaaatgccaagttgtgtttacttttcattcagattttgtgaatatgaacatgctgttataggatctacagatgaatatttaactcaatagaaaaattattttagaacacattgtattggtattacaaccagattatattcttgacgttgacttcattaaaattatctacaatttcctaataa

SEQ ID NO: 34627 - DNA, 2517 bp, Homo sapiens
  source 1..2517: mol_type = unassigned DNA
ggaggccattttccgtttctgggaggagtgaggggcaacgggtcggagaaaaaggaaaaaagaagggctcagcgcctccccgccgggccgtggacagaggggcacagtttcggcaggcgggtgaggtcgctgagggcccgccggagatgttttccttgtcgagcacggtgcaaccccaggttacagttcctctgagtcatctcatcaatgccttccatacaccaaaaaacacttctgtttctctcagtggagtgtcagtttctcaaaaccagcatcgagatgtagttcctgagcatgaggctcccagcagtgagtgtatgttcagtgacttcctgacgaagcttaacattgtttcaattggcaaaggaaaaatattcgaagggtacagatccatgttcatggagccagcaaaaaggatgaagaagagcttggacacaaccgataactggcacatccgtccagaacccttctccctctcaatccctccttcacttaacttaagggaccttggattatctgaactaaaaattggacagattgatcagctggtagaaaatctacttcctggattttgtaaaggcaaaaacatttcttcccattggcatacatcccatgtctctgcacaatccttctttgaaaataaatatggtaacttagatatatttagtacattacgttcctcttgcttgtatcgacatcattcaagagctcttcaaagcatttgttcagatcttcagtactggccagttttcatacagtctcggggttttaaaactttgaaatcaaggacacgacgtctccagtctacctccgagagattagctgaaacacagaatatagcgccatcattcgtgaaggggtttcttttgcgggacagaggatcagatgttgagagtttggacaaactcatgaaaaccaaaaatatacctgaagctcaccaagatgcatttaaaactggttttgcggaaggttttctgaaagctcaagcactcacacaaaaaaccaatgattccctaaggcgaacccgtctgattctcttcgttctgctgctattcggcatttatggacttctaaaaaacccatttttatctgtccgcttccggacaacaacagggcttgattctgcagtagatcctgtccagatgaaaaatgtcacctttgaacatgttaaaggggtggaggaagctaaacaagaattacaggaagttgttgaattcttgaaaaatccacaaaaatttactattcttggaggtaaacttccaaaaggaattcttttagttggacccccagggactggaaagacacttcttgcccgagctgtggcgggagaagctgatgttcctttttattatgcttctggatccgaatttgatgagatgtttgtgggtgtgggagccagccgtatcagaaatctttttagggaagcaaaggcgaatgctccttgtgttatatttattgatgaattagattctgttggtgggaagagaattgaatctccaatgcatccatattcaaggcagaccataaatcaacttcttgctgaaatggatggttttaaacccaatgaaggagttatcataataggagccacaaacttcccagaggcattagataatgccttaatacgtcctggtcgttttgacatgcaagttacagttccaaggccagatgtaaaaggtcgaacagaaattttgaaatggtatctcaataaaataaagtttgatcaatccgttgatccagaaattatagctcgaggtactgttggcttttccggagcagagttggagaatcttgtgaaccaggctgcattaaaagcagctgttgatggaaaagaaatggttaccatgaaggagctggagttttccaaagacaaaattctaatggggcctgaaagaagaagtgtggaaattgataacaaaaacaaaaccatcacagcatatcatgaatctggtcatgccattattgcatattacacaaaagatgcaatgcctatcaacaaagctacaatcatgccacgggggccaacacttggacatgtgtccctgttacctgagaatgacagatggaatgaaactagagcccagctgcttgcacaaatggatgttagtatgggaggaagagtggcagaggagcttatatttggaaccgaccatattacaacaggtgcttccagtgattttgataatgccactaaaatagcaaagcggatggttaccaaatttggaatgagtgaaaagcttggagttatgacctacagtgatacagggaaactaagtccagaaacccaatctgccatcgaacaagaaataagaatccttctaagggactcatatgaacgagcaaaacatatcttgaaaactcattcttgatgtggtgtaattgaagggtgtgaaatgctttgtcaatcatttgtcacatttatccagtttgggttattctcattatgacacctattgcaaattagcatcccatggcaaatatattttgaaaaaataaagaactatcaggattgaaaac

SEQ ID NO: 34628 - DNA, 2469 bp, Homo sapiens
  source 1..2469: mol_type = unassigned DNA
gtctgtcgttgcagtagctgtaggaaggggaggccattttccgtttctgggaggagtgaggggcaacgggtcggagaaaaaggaaaaaagaagggctcagcgcctccccgccgggccgtggacagaggggcacagtttcggcaggcgggtgaggtcgctgagggcccgccggagatgttttccttgtcgagcacggtgcaaccccaggttacagttcctctgagtcatctcatcaatgccttccatacaccaaaaaacacttctgtttctctcagtggagtgtcagtttctcaaaaccagcatcgagatgtagttcctgagcatgaggctcccagcagtgagccttcacttaacttaagggaccttggattatctgaactaaaaattggacagattgatcagctggtagaaaatctacttcctggattttgtaaaggcaaaaacatttcttcccattggcatacatcccatgtctctgcacaatccttctttgaaaataaatatgttttcatacagtctcggggttttaaaactttgaaatcaaggacacgacgtctccagtctacctccgagagattagctgaaacacagaatatagcgccatcattcgtgaaggggtttcttttgcgggacagaggatcagatgttgagagtttggacaaactcatgaaaaccaaaaatatacctgaagctcaccaagatgcatttaaaactggttttgcggaaggttttctgaaagctcaagcactcacacaaaaaaccaatgattccctaaggcgaacccgtctgattctcttcgttctgctgctattcggcatttatggacttctaaaaaacccatttttatctgtccgcttccggacaacaacagggcttgattctgcagtagatcctgtccagatgaaaaatgtcacctttgaacatgttaaaggggtggaggaagctaaacaagaattacaggaagttgttgaattcttgaaaaatccacaaaaatttactattcttggaggtaaacttccaaaaggaattcttttagttggacccccagggactggaaagacacttcttgcccgagctgtggcgggagaagctgatgttcctttttattatgcttctggatccgaatttgatgagatgtttgtgggtgtgggagccagccgtatcagaaatctttttagggaagcaaaggcgaatgctccttgtgttatatttattgatgaattagattctgttggtgggaagagaattgaatctccaatgcatccatattcaaggcagaccataaatcaacttcttgctgaaatggatggttttaaacccaatgaaggagttatcataataggagccacaaacttcccagaggcattagataatgccttaatacgtcctggtcgttttgacatgcaagttacagttccaaggccagatgtaaaaggtcgaacagaaattttgaaatggtatctcaataaaataaagtttgatcaatccgttgatccagaaattatagctcgaggtactgttggcttttccggagcagagttggagaatcttgtgaaccaggctgcattaaaagcagctgttgatggaaaagaaatggttaccatgaaggagctggagttttccaaagacaaaattctaatggggcctgaaagaagaagtgtggaaattgataacaaaaacaaaaccatcacagcatatcatgaatctggtcatgccattattgcatattacacaaaagatgcaatgcctatcaacaaagctacaatcatgccacgggggccaacacttggacatgtgtccctgttacctgagaatgacagatggaatgaaactagagcccagctgcttgcacaaatggatgttagtatgggaggaagagtggcagaggagcttatatttggaaccgaccatattacaacaggtgcttccagtgattttgataatgccactaaaatagcaaagcggatggttaccaaatttggaatgagtgaaaagcttggagttatgacctacagtgatacagggaaactaagtccagaaacccaatctgccatcgaacaagaaataagaatccttctaagggactcatatgaacgagcaaaacatatcttgaaaactcatgcaaaggagcataagaatctcgcagaagctttattgacctatgagactttggatgccaaagagattcaaattgttcttgaggggaaaaagttggaagtgagatgataactctcttgatatggatgcttgctggttttattgcaagaatacaagtagcattgcagtagtctacttttacaacgctttcccctcattcttgatgtggtgtaattgaagggtgtgaaatgctttgtcaatcatttgtcacatttatccagtttgggttattctcattatgacacctattgcaaattagcatcccatggcaaatatattttgaaaaaataaagaactatcaggattgaaaac

SEQ ID NO: 34629 - DNA, 3856 bp, Homo sapiens
  source 1..3856: mol_type = unassigned DNA
ggcggattgtctgtcgttgcagtagctgtaggaaggggaggccattttccgtttctgggaggagtgaggggcaacgggtcggagaaaaaggaaaaaagaagggctcagcgcctccccgccgggccgtggacagaggggcacagtttcggcaggcgggtgaggtcgctgagggcccgccggagatgttttccttgtcgagcacggtgcaaccccaggttacagttcctctgagtcatctcatcaatgccttccatacaccaaaaaacacttctgtttctctcagtggagtgtcagtttctcaaaaccagcatcgagatgtagttcctgagcatgaggctcccagcagtgagccttcacttaacttaagggaccttggattatctgaactaaaaattggacagattgatcagctggtagaaaatctacttcctggattttgtaaaggcaaaaacatttcttcccattggcatacatcccatgtctctgcacaatccttctttgaaaataaatatggtaacttagatatatttagtacattacgttcctcttgcttgtatcgacatcattcaagagctcttcaaagcatttgttcagatcttcagtactggccagttttcatacagtctcggggttttaaaactttgaaatcaaggacacgacgtctccagtctacctccgagagattagctgaaacacagaatatagcgccatcattcgtgaaggggtttcttttgcgggacagaggatcagatgttgagagtttggacaaactcatgaaaaccaaaaatatacctgaagctcaccaagatgcatttaaaactggttttgcggaaggttttctgaaagctcaagcactcacacaaaaaaccaatgattccctaaggcgaacccgtctgattctcttcgttctgctgctattcggcatttatggacttctaaaaaacccatttttatctgtccgcttccggacaacaacagggcttgattctgcagtagatcctgtccagatgaaaaatgtcacctttgaacatgttaaaggggtggaggaagctaaacaagaattacaggaagttgttgaattcttgaaaaatccacaaaaatttactattcttggaggtaaacttccaaaaggaattcttttagttggacccccagggactggaaagacacttcttgcccgagctgtggcgggagaagctgatgttcctttttattatgcttctggatccgaatttgatgagatgtttgtgggtgtgggagccagccgtatcagaaatctttttagggaagcaaaggcgaatgctccttgtgttatatttattgatgaattagattctgttggtgggaagagaattgaatctccaatgcatccatattcaaggcagaccataaatcaacttcttgctgaaatggatggttttaaacccaatgaaggagttatcataataggagccacaaacttcccagaggcattagataatgccttaatacgtcctggtcgttttgacatgcaagttacagttccaaggccagatgtaaaaggtcgaacagaaattttgaaatggtatctcaataaaataaagtttgatcaatccgttgatccagaaattatagctcgaggtactgttggcttttccggagcagagttggagaatcttgtgaaccaggctgcattaaaagcagctgttgatggaaaagaaatggttaccatgaaggagctggagttttccaaagacaaaattctaatggggcctgaaagaagaagtgtggaaattgataacaaaaacaaaaccatcacagcatatcatgaatctggtcatgccattattgcatattacacaaaagatgcaatgcctatcaacaaagctacaatcatgccacgggggccaacacttggacatgtgtccctgttacctgagaatgacagatggaatgaaactagagcccagctgcttgcacaaatggatgttagtatgggaggaagagtggcagaggagcttatatttggaaccgaccatattacaacaggtgcttccagtgattttgataatgccactaaaatagcaaagcggatggttaccaaatttggaatgagtgaaaagcttggagttatgacctacagtgatacagggaaactaagtccagaaacccaatctgccatcgaacaagaaataagaatccttctaagggactcatatgaacgagcaaaacatatcttgaaaactcatgcaaaggagcataagaatctcgcagaagctttattgacctatgagactttggatgccaaagagattcaaattgttcttgaggggaaaaagttggaagtgagatgataactctcttgatatggatgcttgctggttttattgcaagaatacaagtagcattgcagtagtctacttttacaacgctttcccctcattcttgatgtggtgtaattgaagggtgtgaaatgctttgtcaatcatttgtcacatttatccagtttgggttattctcattatgacacctattgcaaattagcatcccatggcaaatatattttgaaaaaataaagaactatcaggattgaaaacagctcttttgaggaatgtcaattagttattaagttgaaagtaattaatgattttatgtttggttactctactagatttgataaaaattgtgcctttagccttctatatacatcagtggaaacttaagatgcagtaattatgttccagattgaccatgaataaaatattttttaatctaaatgtagagaagttgggattaaaagcagtctcggaaacacagagccaggaatatagccttttggcatggtgccatggctcacatctgtaatcccagcacttttggaggctgaggcgggtggattgcttgaggccaggagttcgagaccagcctggccaacgtggtgaaacgctgtctctactaaaatacaaaaaaatagggctgggcgcggttgctcacgcctgtaatcccagcacttttcagaggccaaggcgggcaaatcacctgaggtcaagagtttgagaccagcctggccaacatggtgaaaccccatctctactaaacatgcaaaaattacctgggcatggtggcaggtgcttataatcccagctactctgggggccaaggcaggagaattgcttgagcctgggagatggaggttgcagtgagctgagatcatgccactgcactccagcctgggcaacagagcaagactctgcctcaaaaaaaaattaaaataaatttaaatacaaaaaaaaatagccaggtgtggggtgcatgcctggaatcccagctacttgagaggctgaggcacgagaattgcttgaacccaggaggtggaggttgcagtgagccaagatcacaggagccactgcactccagcctgggtgacagagtgagactctgtctcaaaaaaaaattaaataaattattataacctttcagaaatgctgtgtgcattttcatgttcttttttttagcattactgtcactctccctaatgaaatgtacttcagagaagcagtattttgttaaataaatacataacctcattctgaataatgtccctcattttgactataactgtgcttggtttcaaaagcaaaattaaacaaaaatctcagtcccctccgaagtgaactttgtgttaccctgcgtcagaaatgccaagttgtgtttacttttcattcagattttgtgaatatgaacatgctgttataggatctacagatgaatatttaactcaatagaaaaattattttagaacacattgtattggtattacaaccagattatattcttgacgttgacttcattaaaattatctacaatttcctaataa

SEQ ID NO: 34630 - DNA, 986 bp, Homo sapiens
  source 1..986: mol_type = unassigned DNA
gtagctgtaggaaggggaggccattttccgtttctgggaggagtgaggggcaacgggtcggagaaaaaggaaaaaagaagggctcagcgcctccccgccgggccgtggacagaggggcacagtttcggcaggcgggtgaggtcgctgagggcccgccggagatgttttccttgtcgagcacggtgcaaccccagtactggctaacaaactgaagcagctgcttgttattgggcatcagttatgtaccaggttacagttcctctgagtcatctcatcaatgccttccatacaccaaaaaacacttctgtttctctcagtggagtgtcagtttctcaaaaccagcatcgagatgtagttcctgagcatgaggctcccagcagtgagccttcacttaacttaagggaccttggattatctgaactaaaaattggacagattgatcagctggtagaaaatctacttcctggattttgtaaaggcaaaaacatttcttcccattggcatacatcccatgtctctgcacaatccttctttgaaaataaatatggtaacttagatatatttagtacattacgttcctcttgcttgtatcgacatcattcaagagctcttcaaagcatttgttcagatcttcagtactggccagttttcatacagtctcggggttttaaaactttgaaatcaaggacacgacgtctccagtctacctccgagagattagctgaaacacagaatatagcgccatcattcgtgaaggggtttcttttgcgggacagaggatcagatgttgagagtttggacaaactcatgaaaaccaaaaatatacctgaagctcaccaagatgcatttaaaactggttttgcggaaggttttctgaaagctcaagcactcacacaaaaaaccaatgattccctaaggcgaacccgtctgattctcttcgttctgctgctattcggcatttatggacttctaaaaaacccattttt

SEQ ID NO: 34631 - DNA, 775 bp, Homo sapiens
  source 1..775: mol_type = unassigned DNA
tgagggcccgccggagatgttttccttgtcgagcacggtgcaaccccaggttacagttcctctgagtcatctcatcaatgccttccatacaccaaaaaacacttctgtttctctcagtggagtgtcagtttctcaaaaccagcatcgagatgtagttcctgagcatgaggctcccagcagtgagccttcacttaacttaagggaccttggattatctgaactaaaaattggacagattgatcagctggtagaaaatctacttcctggattttgtaaaggcaaaaacatttcttcccattggcatacatcccatgtctctgcacaatccttctttgaaaataaatatgttttcatacagtctcggggttttaaaactttgaaatcaaggacacgacgtctccagtctacctccgagagattagctgaaacacagaatatagcgccatcattcgtgaaggggtttcttttgcgggacagaggatcagatgttgagagtttggacaaactcatgaaaaccaaaaatatacctgaagctcaccaagatgcatttaaaactggttttgcggaaggttttctgaaagctcaagcactcacacaaaaaaccaatgattccctaaggcgaacccgtctgattctcttcgttctgctgctattcggcatttatggacttctaaaaaacccatttttatctgtccgcttccggacaacaacagggcttgattctgcagtagatcctgtccagatgaaaaatgtcacctttgaacatgttaaaggg

SEQ ID NO: 34632 - DNA, 2459 bp, Homo sapiens
  source 1..2459: mol_type = unassigned DNA
ggaggccattttccgtttctgggaggagtgaggggcaacgggtcggagaaaaaggaaaaaagaagggctcagcgcctccccgccgggccgtggacagaggggcacagtttcggcaggcgggtgaggtcgctgagggcccgccggagatgttttccttgtcgagcacggtgcaaccccaggttacagttcctctgagtcatctcatcaatgccttccatacaccaaaaaacacttctgtttctctcagtggagtgtcagtttctcaaaaccagcatcgagatgtagttcctgagcatgaggctcccagcagtgagtgtatgttcagtgacttcctgacgaagcttaacattgtttcaattggcaaaggaaaaatattcgaagggtacagatccatgttcatggagccagcaaaaaggatgaagaagagcttggacacaaccgataactggcacatccgtccagaacccttctccctctcaatccctccttcacttaacttaagggaccttggattatctgaactaaaaattggacagattgatcagctggtagaaaatctacttcctggattttgtaaaggcaaaaacatttcttcccattggcatacatcccatgtctctgcacaatccttctttgaaaataaatatggtaacttagatatatttagtacattacgttcctcttgcttgtatcgacatcattcaagagctcttcaaagcatttgttcagatcttcagtactggccagttttcatacagtctcggggttttaaaactttgaaatcaaggacacgacgtctccagtctacctccgagagattagctgaaacacagaatatagcgccatcattcgtgaaggggtttcttttgcgggacagaggatcagatgttgagagtttggacaaactcatgaaaaccaaaaatatacctgaagctcaccaagatgcatttaaaactggttttgcggaaggttttctgaaagctcaagcactcacacaaaaaaccaatgattccctaaggcgaacccgtctgattctcttcgttctgctgctattcggcatttatggacttctaaaaaacccatttttatctgtccgcttccggacaacaacagggcttgattctgcagtagatcctgtccagatgaaaaatgtcacctttgaacatgttaaaggggtggaggaagctaaacaagaattacaggaagttgttgaattcttgaaaaatccacaaaaatttactattcttggaggtaaacttccaaaaggaattcttttagttggacccccagggactggaaagacacttcttgcccgagctgtggcgggagaagctgatgttcctttttattatgcttctggatccgaatttgatgagatgtttgtgggtgtgggagccagccgtatcagaaatctttttagggaagcaaaggcgaatgctccttgtgttatatttattgatgaattagattctgttggtgggaagagaattgaatctccaatgcatccatattcaaggcagaccataaatcaacttcttgctgaaatggatggttttaaacccaatgaaggagttatcataataggagccacaaacttcccagaggcattagataatgccttaatacgtcctggtcgttttgacatgcaagttacagttccaaggccagatgtaaaaggtcgaacagaaattttgaaatggtatctcaataaaataaagtttgatcaatccgttgatccagaaattatagctcgaggtactgttggcttttccggagcagagttggagaatcttgtgaaccaggctgcattaaaagcagctgttgatggaaaagaaatggttaccatgaaggagctggagttttccaaagacaaaattctaatggggcctgaaagaagaagtgtggaaattgataacaaaaacaaaaccatcacagcatatcatgaatctggtcatgccattattgcatattacacaaaagatgcaatgcctatcaacaaagctacaatcatgccacgggggccaacacttggacatgtgtccctgttacctgagaatgacagatggaatgaaactagagcccagctgcttgcacaaatggatgttagtatgggaggaagagtggcagaggagcttatatttggaaccgaccatattacaacaggtgcttccagtgattttgataatgccactaaaatagcaaagcggatggttaccaaatttggaatgagtgaaaagcttggagttatgacctacagtgatacagggaaactaagtccagaaacccaatctgccatcgaacaagaaataagaatccttctaagggactcatatgaacgagcaaaacatatcttgaaaactcatgcaaaggagcataagaatctcgcagaagctttattgacctatgagactatgccaaagagattcaaattgttcttgaggggaaaaagttggaagtga

SEQ ID NO: 34633 - DNA, 6265 bp, Homo sapiens
  source 1..6265: mol_type = unassigned DNA
ccgcaccgaagcgtcgcgataactgcaaccacccgcaacttctcgcgatgtttggccccgctaaaggtcgccattttggagtccacccggcgcctggtttccccggcggcgtctcccaacaggctgccgggaccaaagctggccccgcgggtgcctggcctgtgggcagccggaccgacacgatgtggcggctccgctgcaaggccaaggacggcacccatgttttgcaggggctgtccagccggacccgggtgcgggaactccagggccaaattgccgccatcaccgggatcgcccccggcggtcagcgaatcctcgtcggataccctcccgagtgcctggatctcagcaatggggataccattctggaagacttgcccatccaatctggtgacatgctgatcattgaagaagaccaaaccaggcccagaagttcacctgcatttactaaacgtggtgcttctagttacgtcagggaaactttgcctgtgcttaccagaaccgtggtcccagcagacaactcttgcctctttactagtgtgtactatgtcgtcgaaggaggagtcttgaatccagcttgtgcccctgagatgagacgcctcatagcacaaattgtagcaagcgatccagacttctatagtgaggcaatactgggaaaaacaaatcaagagtactgtgactggatcaaaagggatgacacttggggaggagcaatagagatatcgattttgtccaagttttaccaatgtgaaatatgtgtagtggatacacagacagtaagaattgatcgttttggggaagatgcaggatataccaaaagggttctgcttatttatgatggcatccactatgatccacttcagcgtaacttccctgatccagatacacctcctctgaccattttctcctctaatgatgatattgttcttgtacaagcactggaattagcagatgaagctagaagaaggagacagtttactgatgtcaaccgcttcaccctgagatgcatggtatgtcagaaaggattaactggacaagcagaagcaagggaacatgccaaggagacaggccataccaactttggagaagtgtgacctatgcatgaatgagggttgaagcctactacctcacacatccagaaggctctgggttttccaataagctatggtaaccctaaagaacaaaggatacaatgcttgaaccatccttttaacttaaaaccactaagacactgaaattccttgttaagattaaaattagtgtgcaagtttacagatgtgtgtctacagtggtaaactgtacatacatgcctctttctgctggagtgacagaataggtgatccttgccacctactgacactgacctgaaggttgagattgagtattataaactagcacccagcagctttaacttgtagaagaaagcatcacattttgggtaatgtggaaggcctcctgtgagtccactgggcatacgattgagattgagtattataaactagcacccagcagctttaacttgtagaagaaagcatcacattttgggtaatgtggaaggcctcctgtgagtccactggacatttaccacagtgtctccagtaactgagtctttttaaaaactctgaatgagttaagtttctaaattatgaattgattcatcaaatgaagatactcagaattgtccaaactgattttatattgcaatttggtagacattataaatgtgtgcttaaccactgataagtacatcacaagcaatttttacagggatgagtctcatccttgagaatgttatcacaaaacaggaactgattgtgccctgtttaagatctctagcatataaaacgtagaatgtatgagggaataggtgcctgagcagcttcctgaagctttaaaagaccgttggcctcgtgttttaatgcaattcatgtattggtctttgtcacattggataacattttaaagttaagcagggtacttttttaattgaaattccttgaaattcgagtcctcagttttttcttcatttgcgtaaagtttatcggggggaatttaattttctcagctttttgttaagagcacttcctccaaaaaatttttttcaagtaataatgctctgctttgggttggtttttgtaagattttttgcacacctaaagagtgtttgcttttgtgctagccttatccctccactaaagttattttaaataatttcacatttctgcaaattagcactttgcttatctgcaatcttttactttgatttttgaagttttaaagcaattggagtaatactgttgaatgaactagtttcacttccaaaatagaaaaaattgtaaatccttgccttatgcagctttctcagaattctgcttcttcctagtactagatgtgtagccatttgcttagtggactaatccgcaaggcacaccctctaaaacttagcttcactacaagatcttccagataaaagttttctacctcttttcttaattattctgatcagggatgctaaattataatttgttatgtattatctcacataatgtgaagaggcttaatgtgaagttttgttattttggtctcttttttattaagtatctcacttagaaattcagtggtatactttaaagcacttggatctttttcagcatatctgcctagcaaatgttttaaaattgacatttatttttagcactttcacttggtgaaggtggccatataaaattaaggaacatttgaacaatataagagaaaagaacttttaaggaacaattcacaaagtttgtttgaaattgtcagatgacatttcttgagtaccttttgtgtgcatagttattttagacaatataagctgttatggtcagcataacttaaaagtgtttagttttctattttactgagccttaaaaatagcactgatgagcttatgatacttaatgtttggcaatcataatgtgttcaaattaatgggattgaaaatctctccacacctgactctcatctgatctggatggttttggttttgtatcttttttacttctcccagaaaatactaaatttaaaactgtaaattaagaatataccactagataacaattatcaaattgagctttatgcatcattactcagaaagcttgccttcctttctttgctacttcaggacacagagttgacatttgcttactacagctttagatctagaagtttattcgtgcaacaaatatttattgagtaatttatactgtgccaggcatgttttgatatgtttctgtcatatgttttgatatgttccaacataagtttctgtcactttatattcagtatatattttctacagtgggtaaatttaacaaatggaaaggaatagaacactgatattttacagaattaaaccccttcattgtaagggctttgtttacatattaagtgtcaagtatttattcaggggatcttatttcattgtattttatctgttatctaggttgtccatttaccggttggacactgatactctgtcaaattcctttcaaaaatgactctttagtctgctgaaatttagcactagtactttagtgttctgatcctggaaaattcaaggtgaagctttatttgtggaccatctgatttaattattgaggattaaaaacctaaacctttgctcattctaaactcaagcttttaagcctcacagaatttacaggggtttgctttttgtttgtttgttttttcattttttactgtgcttattaaactcttggaattagttattaaagggagtaaattctcatcttgggaattttgaaaatctatggacttacaactttcaggaggattaaatgtcttaagttttgtactagagcagaatgaaatctttcctattcattgagtttttgcctgccatagaggaatttttttaaaaattaaaatgacagtttatattagtggcaaagtgaataaagacctcactttcccaccccacccttcttcctttctcttacttttctttggattaaaggtcaggtgtagtactatgaagattcactcctgaataaagtgatttcagaagctaaaatttaacatacctggaaattttgtgatgtgttagccaagtgaagacattagtgtgttccatcttttgctaatggttcatggttgatttcttcattgtttcccatgaaattagcatagtcaagtggtacccttgacgcttgactgctggtcagtttgaccctgtttttaacaactaatgtagtcatgccgcttgattattccatgaagtcccagcaaaataataatgaggaattaactaacattatgttatctatctaatttgtctgtgtccctaaatgcccatgcctaacttgcttctctagtttattccttctgtggagggattaaaacgtgggtgttgcaagttgccctaagctaaacatagttttcttacatctttttgggaaaaaaaatggaatgggaagtatgcaagattaagcaagagtgatttttttttttttttgacaaatcaggtggccttcctaaacatactaagaattatgttctttcatgtgtggagacacatttgtttgcagcactttaaaaaatatatatggaataaaagtttacatgttggccctctagggatctaattaaggacattaaagtacaattcttgagctactaaccatcagctcttcttaatcaaagattgccatcagtgtagagtgtatctattggcacaacattctggtgttttgataacagtagaactcaatttcagtaactattaggagcatggtctgtgccctagcattaaaaatgttacttattattatgtgaatatcttgtattattatacaatgcagtattcaaatttgtccttgtagtgcagagatgactgataatttctaaaagattcgatccttaaaacttgtttccaagcagacttataaggaagctgatttttgagtcagaggccttaaacgtgtcatatacaagtggcatcattttaagtccaaagtgaaacacttgatttgaataagctagtttataaactaaagctgttttcttatgttacagtatttcagcacatttcattccacataaaaagaatattaagtgtccctggttgtgggagagtgtttatttttctcaaaattatctagcattttgcttacagtgctttgaatgtttgacttaaaattattattgatgttgaattgtagggtgctgatttaggtcttgattcatacacatttaaaggaggttggtaaccccctcatggtagagtgaagggagaaaagggccaagaagacaaagtaccactgataaagaagagattgtcaaatagatgcattcctagtcatgaattacccttttccaaacatttttaaagcaatgcctttgtgtcaactcaacccttcttccccatttcttgtcatagaatgtagcatggccataggtgaaaaagcttatcattaaagtatgaaaccatgaattataagcattttgccatgatgcccttttatacatatgtttttaaaagtactaaccaacatataggagtttaggaatggtgaagatataatttgattaagttgtaggtaaacagaaaggatcatcttaggctcagaatttctaatatgattacatgagtctactttataaactggtataggctatgtaattagcccgtaagttacttaaaggaccaggggacctaatttttgtcagttttccagtcacattggtgccattcaggactccagctgtttacaggaaatatgtacttagcagaatagtatttttccttgaaaaaaatttgaattcagcctaaatacagaatgaatatgaatagtttgtgaaaagggttagagaacaacaatattcctatagtttctgtattaatgcagtagagacagaggttcctaacgcaaaaagaaaaccacaagtaaagaccgtcaaattagagctttagaatatgacttgaaaaagtagggatgggcaaaacagcataagaaaatattttttcttaatgcagatggacagtgttttcttgttttaaaaatgttttgcctatttgccagcattttttgaagtaatacactgctgctacctggaagatgtctaacttcattttctacaactcttatgtgattttgccattgtcattaagatgcattgattttatttatgaggtgtatgactttaaatatctaaatgctgtattaagtgacttgtttcaaaggaataaatgaagtgaaaacgt

SEQ ID NO: 34634 - DNA, 6291 bp, Homo sapiens
  source 1..6291: mol_type = unassigned DNA
agactattcggtaggcgtcttgagagcgggtgtgccgggtgacgagaaaatgctgcaaagattaacgctctcattcctgaatcccagcagaacctcattagatccataaatgggaacgctgtatcatccgttgcagtcgtcttgaagaaccaaggaggaaaattgcaccagcaaaaaaaaattgagtcatgaaagatgtgaaaagatggaaacattacatataatttattcagaagcaaagtcttttacagtggaggggctgtccagccggacccgggtgcgggaactccagggccaaattgccgccatcaccgggatcgcccccggcggtcagcgaatcctcgtcggataccctcccgagtgcctggatctcagcaatggggataccattctggaagacttgcccatccaatctggtgacatgctgatcattgaagaagaccaaaccaggcccagaagttcacctgcatttactaaacgtggtgcttctagttacgtcagggaaactttgcctgtgcttaccagaaccgtggtcccagcagacaactcttgcctctttactagtgtgtactatgtcgtcgaaggaggagtcttgaatccagcttgtgcccctgagatgagacgcctcatagcacaaattgtagcaagcgatccagacttctatagtgaggcaatactgggaaaaacaaatcaagagtactgtgactggatcaaaagggatgacacttggggaggagcaatagagatatcgattttgtccaagttttaccaatgtgaaatatgtgtagtggatacacagacagtaagaattgatcgttttggggaagatgcaggatataccaaaagggttctgcttatttatgatggcatccactatgatccacttcagcgtaacttccctgatccagatacacctcctctgaccattttctcctctaatgatgatattgttcttgtacaagcactggaattagcagatgaagctagaagaaggagacagtttactgatgtcaaccgcttcaccctgagatgcatggtatgtcagaaaggattaactggacaagcagaagcaagggaacatgccaaggagacaggccataccaactttggagaagtgtgacctatgcatgaatgagggttgaagcctactacctcacacatccagaaggctctgggttttccaataagctatggtaaccctaaagaacaaaggatacaatgcttgaaccatccttttaacttaaaaccactaagacactgaaattccttgttaagattaaaattagtgtgcaagtttacagatgtgtgtctacagtggtaaactgtacatacatgcctctttctgctggagtgacagaataggtgatccttgccacctactgacactgacctgaaggttgagattgagtattataaactagcacccagcagctttaacttgtagaagaaagcatcacattttgggtaatgtggaaggcctcctgtgagtccactgggcatacgattgagattgagtattataaactagcacccagcagctttaacttgtagaagaaagcatcacattttgggtaatgtggaaggcctcctgtgagtccactggacatttaccacagtgtctccagtaactgagtctttttaaaaactctgaatgagttaagtttctaaattatgaattgattcatcaaatgaagatactcagaattgtccaaactgattttatattgcaatttggtagacattataaatgtgtgcttaaccactgataagtacatcacaagcaatttttacagggatgagtctcatccttgagaatgttatcacaaaacaggaactgattgtgccctgtttaagatctctagcatataaaacgtagaatgtatgagggaataggtgcctgagcagcttcctgaagctttaaaagaccgttggcctcgtgttttaatgcaattcatgtattggtctttgtcacattggataacattttaaagttaagcagggtacttttttaattgaaattccttgaaattcgagtcctcagttttttcttcatttgcgtaaagtttatcggggggaatttaattttctcagctttttgttaagagcacttcctccaaaaaatttttttcaagtaataatgctctgctttgggttggtttttgtaagattttttgcacacctaaagagtgtttgcttttgtgctagccttatccctccactaaagttattttaaataatttcacatttctgcaaattagcactttgcttatctgcaatcttttactttgatttttgaagttttaaagcaattggagtaatactgttgaatgaactagtttcacttccaaaatagaaaaaattgtaaatccttgccttatgcagctttctcagaattctgcttcttcctagtactagatgtgtagccatttgcttagtggactaatccgcaaggcacaccctctaaaacttagcttcactacaagatcttccagataaaagttttctacctcttttcttaattattctgatcagggatgctaaattataatttgttatgtattatctcacataatgtgaagaggcttaatgtgaagttttgttattttggtctcttttttattaagtatctcacttagaaattcagtggtatactttaaagcacttggatctttttcagcatatctgcctagcaaatgttttaaaattgacatttatttttagcactttcacttggtgaaggtggccatataaaattaaggaacatttgaacaatataagagaaaagaacttttaaggaacaattcacaaagtttgtttgaaattgtcagatgacatttcttgagtaccttttgtgtgcatagttattttagacaatataagctgttatggtcagcataacttaaaagtgtttagttttctattttactgagccttaaaaatagcactgatgagcttatgatacttaatgtttggcaatcataatgtgttcaaattaatgggattgaaaatctctccacacctgactctcatctgatctggatggttttggttttgtatcttttttacttctcccagaaaatactaaatttaaaactgtaaattaagaatataccactagataacaattatcaaattgagctttatgcatcattactcagaaagcttgccttcctttctttgctacttcaggacacagagttgacatttgcttactacagctttagatctagaagtttattcgtgcaacaaatatttattgagtaatttatactgtgccaggcatgttttgatatgtttctgtcatatgttttgatatgttccaacataagtttctgtcactttatattcagtatatattttctacagtgggtaaatttaacaaatggaaaggaatagaacactgatattttacagaattaaaccccttcattgtaagggctttgtttacatattaagtgtcaagtatttattcaggggatcttatttcattgtattttatctgttatctaggttgtccatttaccggttggacactgatactctgtcaaattcctttcaaaaatgactctttagtctgctgaaatttagcactagtactttagtgttctgatcctggaaaattcaaggtgaagctttatttgtggaccatctgatttaattattgaggattaaaaacctaaacctttgctcattctaaactcaagcttttaagcctcacagaatttacaggggtttgctttttgtttgtttgttttttcattttttactgtgcttattaaactcttggaattagttattaaagggagtaaattctcatcttgggaattttgaaaatctatggacttacaactttcaggaggattaaatgtcttaagttttgtactagagcagaatgaaatctttcctattcattgagtttttgcctgccatagaggaatttttttaaaaattaaaatgacagtttatattagtggcaaagtgaataaagacctcactttcccaccccacccttcttcctttctcttacttttctttggattaaaggtcaggtgtagtactatgaagattcactcctgaataaagtgatttcagaagctaaaatttaacatacctggaaattttgtgatgtgttagccaagtgaagacattagtgtgttccatcttttgctaatggttcatggttgatttcttcattgtttcccatgaaattagcatagtcaagtggtacccttgacgcttgactgctggtcagtttgaccctgtttttaacaactaatgtagtcatgccgcttgattattccatgaagtcccagcaaaataataatgaggaattaactaacattatgttatctatctaatttgtctgtgtccctaaatgcccatgcctaacttgcttctctagtttattccttctgtggagggattaaaacgtgggtgttgcaagttgccctaagctaaacatagttttcttacatctttttgggaaaaaaaatggaatgggaagtatgcaagattaagcaagagtgatttttttttttttttgacaaatcaggtggccttcctaaacatactaagaattatgttctttcatgtgtggagacacatttgtttgcagcactttaaaaaatatatatggaataaaagtttacatgttggccctctagggatctaattaaggacattaaagtacaattcttgagctactaaccatcagctcttcttaatcaaagattgccatcagtgtagagtgtatctattggcacaacattctggtgttttgataacagtagaactcaatttcagtaactattaggagcatggtctgtgccctagcattaaaaatgttacttattattatgtgaatatcttgtattattatacaatgcagtattcaaatttgtccttgtagtgcagagatgactgataatttctaaaagattcgatccttaaaacttgtttccaagcagacttataaggaagctgatttttgagtcagaggccttaaacgtgtcatatacaagtggcatcattttaagtccaaagtgaaacacttgatttgaataagctagtttataaactaaagctgttttcttatgttacagtatttcagcacatttcattccacataaaaagaatattaagtgtccctggttgtgggagagtgtttatttttctcaaaattatctagcattttgcttacagtgctttgaatgtttgacttaaaattattattgatgttgaattgtagggtgctgatttaggtcttgattcatacacatttaaaggaggttggtaaccccctcatggtagagtgaagggagaaaagggccaagaagacaaagtaccactgataaagaagagattgtcaaatagatgcattcctagtcatgaattacccttttccaaacatttttaaagcaatgcctttgtgtcaactcaacccttcttccccatttcttgtcatagaatgtagcatggccataggtgaaaaagcttatcattaaagtatgaaaccatgaattataagcattttgccatgatgcccttttatacatatgtttttaaaagtactaaccaacatataggagtttaggaatggtgaagatataatttgattaagttgtaggtaaacagaaaggatcatcttaggctcagaatttctaatatgattacatgagtctactttataaactggtataggctatgtaattagcccgtaagttacttaaaggaccaggggacctaatttttgtcagttttccagtcacattggtgccattcaggactccagctgtttacaggaaatatgtacttagcagaatagtatttttccttgaaaaaaatttgaattcagcctaaatacagaatgaatatgaatagtttgtgaaaagggttagagaacaacaatattcctatagtttctgtattaatgcagtagagacagaggttcctaacgcaaaaagaaaaccacaagtaaagaccgtcaaattagagctttagaatatgacttgaaaaagtagggatgggcaaaacagcataagaaaatattttttcttaatgcagatggacagtgttttcttgttttaaaaatgttttgcctatttgccagcattttttgaagtaatacactgctgctacctggaagatgtctaacttcattttctacaactcttatgtgattttgccattgtcattaagatgcattgattttatttatgaggtgtatgactttaaatatctaaatgctgtattaagtgacttgtttcaaaggaataaatgaagtgaaaacgt

SEQ ID NO: 34635 - DNA, 6086 bp, Homo sapiens
  source 1..6086: mol_type = unassigned DNA
atggaaacattacatataatttattcagaagcaaagtcttttacagtggaggggctgtccagccggacccgggtgcgggaactccagggccaaattgccgccatcaccgggatcgcccccggcggtcagcgaatcctcgtcggataccctcccgagtgcctggatctcagcaatggggataccattctggaagacttgcccatccaatctggtgacatgctgatcattgaagaagaccaaaccaggcccagaagttcacctgcatttactaaacgtggtgcttctagttacgtcagggaaactttgcctgtgcttaccagaaccgtggtcccagcagacaactcttgcctctttactagtgtgtactatgtcgtcgaaggaggagtcttgaatccagcttgtgcccctgagatgagacgcctcatagcacaaattgtagcaagcgatccagacttctatagtgaggcaatactgggaaaaacaaatcaagagtactgtgactggatcaaaagggatgacacttggggaggagcaatagagatatcgattttgtccaagttttaccaatgtgaaatatgtgtagtggatacacagacagtaagaattgatcgttttggggaagatgcaggatataccaaaagggttctgcttatttatgatggcatccactatgatccacttcagcgtaacttccctgatccagatacacctcctctgaccattttctcctctaatgatgatattgttcttgtacaagcactggaattagcagatgaagctagaagaaggagacagtttactgatgtcaaccgcttcaccctgagatgcatggtatgtcagaaaggattaactggacaagcagaagcaagggaacatgccaaggagacaggccataccaactttggagaagtgtgacctatgcatgaatgagggttgaagcctactacctcacacatccagaaggctctgggttttccaataagctatggtaaccctaaagaacaaaggatacaatgcttgaaccatccttttaacttaaaaccactaagacactgaaattccttgttaagattaaaattagtgtgcaagtttacagatgtgtgtctacagtggtaaactgtacatacatgcctctttctgctggagtgacagaataggtgatccttgccacctactgacactgacctgaaggttgagattgagtattataaactagcacccagcagctttaacttgtagaagaaagcatcacattttgggtaatgtggaaggcctcctgtgagtccactgggcatacgattgagattgagtattataaactagcacccagcagctttaacttgtagaagaaagcatcacattttgggtaatgtggaaggcctcctgtgagtccactggacatttaccacagtgtctccagtaactgagtctttttaaaaactctgaatgagttaagtttctaaattatgaattgattcatcaaatgaagatactcagaattgtccaaactgattttatattgcaatttggtagacattataaatgtgtgcttaaccactgataagtacatcacaagcaatttttacagggatgagtctcatccttgagaatgttatcacaaaacaggaactgattgtgccctgtttaagatctctagcatataaaacgtagaatgtatgagggaataggtgcctgagcagcttcctgaagctttaaaagaccgttggcctcgtgttttaatgcaattcatgtattggtctttgtcacattggataacattttaaagttaagcagggtacttttttaattgaaattccttgaaattcgagtcctcagttttttcttcatttgcgtaaagtttatcggggggaatttaattttctcagctttttgttaagagcacttcctccaaaaaatttttttcaagtaataatgctctgctttgggttggtttttgtaagattttttgcacacctaaagagtgtttgcttttgtgctagccttatccctccactaaagttattttaaataatttcacatttctgcaaattagcactttgcttatctgcaatcttttactttgatttttgaagttttaaagcaattggagtaatactgttgaatgaactagtttcacttccaaaatagaaaaaattgtaaatccttgccttatgcagctttctcagaattctgcttcttcctagtactagatgtgtagccatttgcttagtggactaatccgcaaggcacaccctctaaaacttagcttcactacaagatcttccagataaaagttttctacctcttttcttaattattctgatcagggatgctaaattataatttgttatgtattatctcacataatgtgaagaggcttaatgtgaagttttgttattttggtctcttttttattaagtatctcacttagaaattcagtggtatactttaaagcacttggatctttttcagcatatctgcctagcaaatgttttaaaattgacatttatttttagcactttcacttggtgaaggtggccatataaaattaaggaacatttgaacaatataagagaaaagaacttttaaggaacaattcacaaagtttgtttgaaattgtcagatgacatttcttgagtaccttttgtgtgcatagttattttagacaatataagctgttatggtcagcataacttaaaagtgtttagttttctattttactgagccttaaaaatagcactgatgagcttatgatacttaatgtttggcaatcataatgtgttcaaattaatgggattgaaaatctctccacacctgactctcatctgatctggatggttttggttttgtatcttttttacttctcccagaaaatactaaatttaaaactgtaaattaagaatataccactagataacaattatcaaattgagctttatgcatcattactcagaaagcttgccttcctttctttgctacttcaggacacagagttgacatttgcttactacagctttagatctagaagtttattcgtgcaacaaatatttattgagtaatttatactgtgccaggcatgttttgatatgtttctgtcatatgttttgatatgttccaacataagtttctgtcactttatattcagtatatattttctacagtgggtaaatttaacaaatggaaaggaatagaacactgatattttacagaattaaaccccttcattgtaagggctttgtttacatattaagtgtcaagtatttattcaggggatcttatttcattgtattttatctgttatctaggttgtccatttaccggttggacactgatactctgtcaaattcctttcaaaaatgactctttagtctgctgaaatttagcactagtactttagtgttctgatcctggaaaattcaaggtgaagctttatttgtggaccatctgatttaattattgaggattaaaaacctaaacctttgctcattctaaactcaagcttttaagcctcacagaatttacaggggtttgctttttgtttgtttgttttttcattttttactgtgcttattaaactcttggaattagttattaaagggagtaaattctcatcttgggaattttgaaaatctatggacttacaactttcaggaggattaaatgtcttaagttttgtactagagcagaatgaaatctttcctattcattgagtttttgcctgccatagaggaatttttttaaaaattaaaatgacagtttatattagtggcaaagtgaataaagacctcactttcccaccccacccttcttcctttctcttacttttctttggattaaaggtcaggtgtagtactatgaagattcactcctgaataaagtgatttcagaagctaaaatttaacatacctggaaattttgtgatgtgttagccaagtgaagacattagtgtgttccatcttttgctaatggttcatggttgatttcttcattgtttcccatgaaattagcatagtcaagtggtacccttgacgcttgactgctggtcagtttgaccctgtttttaacaactaatgtagtcatgccgcttgattattccatgaagtcccagcaaaataataatgaggaattaactaacattatgttatctatctaatttgtctgtgtccctaaatgcccatgcctaacttgcttctctagtttattccttctgtggagggattaaaacgtgggtgttgcaagttgccctaagctaaacatagttttcttacatctttttgggaaaaaaaatggaatgggaagtatgcaagattaagcaagagtgatttttttttttttttgacaaatcaggtggccttcctaaacatactaagaattatgttctttcatgtgtggagacacatttgtttgcagcactttaaaaaatatatatggaataaaagtttacatgttggccctctagggatctaattaaggacattaaagtacaattcttgagctactaaccatcagctcttcttaatcaaagattgccatcagtgtagagtgtatctattggcacaacattctggtgttttgataacagtagaactcaatttcagtaactattaggagcatggtctgtgccctagcattaaaaatgttacttattattatgtgaatatcttgtattattatacaatgcagtattcaaatttgtccttgtagtgcagagatgactgataatttctaaaagattcgatccttaaaacttgtttccaagcagacttataaggaagctgatttttgagtcagaggccttaaacgtgtcatatacaagtggcatcattttaagtccaaagtgaaacacttgatttgaataagctagtttataaactaaagctgttttcttatgttacagtatttcagcacatttcattccacataaaaagaatattaagtgtccctggttgtgggagagtgtttatttttctcaaaattatctagcattttgcttacagtgctttgaatgtttgacttaaaattattattgatgttgaattgtagggtgctgatttaggtcttgattcatacacatttaaaggaggttggtaaccccctcatggtagagtgaagggagaaaagggccaagaagacaaagtaccactgataaagaagagattgtcaaatagatgcattcctagtcatgaattacccttttccaaacatttttaaagcaatgcctttgtgtcaactcaacccttcttccccatttcttgtcatagaatgtagcatggccataggtgaaaaagcttatcattaaagtatgaaaccatgaattataagcattttgccatgatgcccttttatacatatgtttttaaaagtactaaccaacatataggagtttaggaatggtgaagatataatttgattaagttgtaggtaaacagaaaggatcatcttaggctcagaatttctaatatgattacatgagtctactttataaactggtataggctatgtaattagcccgtaagttacttaaaggaccaggggacctaatttttgtcagttttccagtcacattggtgccattcaggactccagctgtttacaggaaatatgtacttagcagaatagtatttttccttgaaaaaaatttgaattcagcctaaatacagaatgaatatgaatagtttgtgaaaagggttagagaacaacaatattcctatagtttctgtattaatgcagtagagacagaggttcctaacgcaaaaagaaaaccacaagtaaagaccgtcaaattagagctttagaatatgacttgaaaaagtagggatgggcaaaacagcataagaaaatattttttcttaatgcagatggacagtgttttcttgttttaaaaatgttttgcctatttgccagcattttttgaagtaatacactgctgctacctggaagatgtctaacttcattttctacaactcttatgtgattttgccattgtcattaagatgcattgattttatttatgaggtgtatgactttaaatatctaaatgctgtattaagtgacttgtttcaaaggaataaatgaagtgaaaacgt

SEQ ID NO: 34636 - DNA, 1826 bp, Homo sapiens
  source 1..1826: mol_type = unassigned DNA
ggcggatgtctccggcgcgtcggtgcagggggatgagggccgcggtggctgccagcgtggggttgagcgaggggcctgctggctcccggagcggtcgcctcttccgcccgccgagtcccgctccggcggcccccggcgcccggctgttgcggctcccggggagcggggccgtgcaggccgcgagcccggagcgcgccggctggaccgaggcgctgcgggccgccgtggccgagctgcgcgccggcgccgtggtggccgtccccaccgatacgctgtacggcctggcctgcgcggcgagctgctcggcggctctgcgcgctgtgtaccgcctcaagggtcgcagcgaggccaagcctctggccgtatgcctcggccgcgtggccgacgtctacagatactgccgtgtgagagtacctgaggggctcctgaaagacctactgccaggaccagtgaccctggtgatggaacgctcggaggagctcaacaaggacctaaacccttttacgcctcttgtaggcattcggattcctgatcatgcttttatgcaagacttggctcagatgtttgagggtccgcttgctctcactagtgccaacctcagctcccaggccagttctctgaatgtcgaggagttccaggatctctggcctcagttgtccttggttattgatgggggacaaattggggatggccagagccccgagtgtcgccttggctcaactgtggttgatttgtctgtgcccggaaagtttggcatcattcgtccaggctgtgccctggaaagtactacagccatcctccaacagaagtacggactgctcccctcacatgcgtcctacctgtgaaactctgggaagcaggaaggcccaagacctggtgctggatactatgtgtctgtccactgacgactgtcaaggcctcatttgcagaggccaccggagctagggcactagcctgacttttaaggcagtgtgtctttctgagcactgtagaccaagcccttggagctgctggtttagccttgcacctggggaaaggatgtatttatttgtattttcatatatcagccaaaagctgaatggaaaagttaagaacattcctaggtggccttattctaataagtttcttctgtctgttttgtttttcaattgaaaagtaattaaataacagatttagaatctagtgagagcctcctctctggtgggtggtggcatttaaggttcaaaccagccagaagtgctggtgctgtttaaaaagtctcaggtggctgcgtgtggtggctcatgcctgtaatcccaacattctgggaggcccaggcgggagaactgcttgagcccaggagttcagaatcagcctgggcaacatagcaatactccgtctcataaaaattaataaataaaaagtctcaggtgaccaaaggctcctgaagctagaaccaggtttggataaagattgaagagccacaggccactcttccctctgagccattgggcctagtggtgtcatgtattgtaattgctcgcagggagagcagtctttttggtgtaatagtgggatgtctgcttagttggcaggggttcagtccaaatggaagaatattgggaaataaacctccactatcctttatagccagggacttttttcttatttattcataaaataaattatagttaattatacccataacacctttatttaaatccagtgttctccgcagccttttgtctatttatatgtgtaccaagtgttaaacataattattattgggcatttgaactttgtttttctttaaagaaatgctgctattaaacatatttgtaaatggt

SEQ ID NO: 34637 - DNA, 2925 bp, Homo sapiens
  source 1..2925: mol_type = unassigned DNA
ggccggcctctcccttcccggggttcttcgcgccgggccccttccgcgtgggtgagtgaatgtgagagtcagcgctcgcgccgcgcgcgccgcccgcctccgctgttcggcgctctgctttaggcggtggggggcgggcgcgcgcgtaaaagcatagagacgggcattgagctcttgggctagagcgtcgccgagtcggagccggagcctgagccgcgcgctgtgtctccgctgcgtccgccgaggcccccgagtgtcagggacaaaagcctccgcctgctcccgcagacggggctcatctgccgccgccgccgcgctgaggagagttcgccgccgtcgccgcccgtgaggatctgagagccatgtcggccagcagcctcttggagcagagaccaaaaggtcaaggaaacaaagtacaaaatggatctgtacatcaaaaggatggattaaacgatgatgattttgaaccttacttgagtccacaggcaaggcccaataatgcatatactgccatgtcagattcctacttacccagttactacagtccctccattggcttctcctattctttgggtgaagctgcttggtctacggggggtgacacagccatgccctacttaacttcttatggacagctgagcaacggagagccccacttcctaccagatgcaatgtttgggcaaccaggagccctaggtagcactccatttcttggtcagcatggttttaatttctttcccagtgggattgacttctcagcatggggaaataacagttctcagggacagtctactcagagctctggatatagtagcaattatgcttatgcacctagctccttaggtggagccatgattgatggacagtcagcttttgccaatgagaccctcaataaggctcctggcatgaatactatagaccaagggatggcagcactgaagttgggtagcacagaagttgcaagcaatgttccaaaagttgtaggttctgctgttggtagcgggtccattactagtaacatcgtggcttccaatagtttgcctccagccaccattgctcctccaaaaccagcatcttgggctgatattgctagcaagcctgcaaaacagcaacctaaactgaagaccaagaatggcattgcagggtcaagtcttccgccacccccgataaagcataacatggatattggaacttgggataacaagggtcccgttgcaaaagccccctcacaggctttggttcagaatataggtcagccaacccaggggtctcctcagcctgtaggtcagcaggctaacaatagcccaccagtggctcaggcatcagtagggcaacagacacagccattgcctccacctccaccacagcctgcccagctttcagtccagcaacaggcagctcagccaacccgctgggtagcacctcggaaccgtggcagtgggttcggtcataatggggtggatggtaatggagtaggacagtctcaggctggttctggatctactccttcagaaccccacccagtgttggagaagcttcggtccattaataactataaccccaaagattttgactggaatctgaaacatggccgggttttcatcattaagagctactctgaggacgatattcaccgttccattaagtataatatttggtgcagcacagagcatggtaacaagagactggatgctgcttatcgttccatgaacgggaaaggccccgtttacttacttttcagtgtcaacggcagtggacacttctgtggcgtggcagaaatgaaatctgctgtggactacaacacatgtgcaggtgtgtggtcccaggacaaatggaagggtcgttttgatgtcaggtggatttttgtgaaggacgttcccaatagccaactgcgacacattcgcctagagaacaacgagaataaaccagtgaccaactctagggacactcaggaagtgcctctggaaaaggctaagcaggtgttgaaaattatagccagctacaagcacaccacttccatttttgatgacttctcacactatgagaaacgccaagaggaagaagaaagtgttaaaaaggaacgtcaaggtcgtgggaaataaaaggcagttctacacagactgcagcaacggttgcatctgcatatcctaagaggaaaaaatgaccttcaagagaattaggacttttttcttaatttcactgacttcagagacgattgcagacttgcagtttaagtattggaatttcacaaaagacataggacttaactggaaaatgaaaaaaaaaagaaaaagaaaaaactaaacaaaaaatccctctaggtagtttaggtgaaaaatgtcccttttattttggctttggttgtgatttcagagcataatgctatgtttttttgtctttttactatgtttttcggatttttaagtccgtaagtgcatacagttttctctaatttttaaaccctttcctcctcccattttgacatttgcacttggagaacacttgagttgtgaaggttttgggcatccaccccagaaagtgggaatttgattttatccttccgaactggaagaacatttttatgaagaatttttgtctaggagaatataacagtgttacccaaggttgtgtctttaagggtggttcattttctctgaccttttgttactcaaagtaaagtactaggagtcctaagaaatgttctgttcttgtacattatactgattaagtcaggattaatttgatttcaaagctgagaacagtggtaaaaactcgtttacagaaatgcattttggaagagaaaaatactgtaaaacgtgtcgtgaatgtttcttcagtttcttgttcagccaatgaggaaagggcattgcctttctttttaccattaatcacttctcaataaacgtgagatcctgttgagcatca

SEQ ID NO: 34638 - DNA, 1710 bp, Homo sapiens
  source 1..1710: mol_type = unassigned DNA
atgtcggccagcagcctcttggagcagagaccaaaaggtcaaggaaacaaagtacaaaatggatctgtacatcaaaaggatggattaaacgatgatgattttgaaccttacttgagtccacaggcaaggcccaataatgcatatactgccatgtcagattcctacttacccagttactacagtccctccattggcttctcctattctttgggtgaagctgcttggtctacggggggtgacacagccatgccctacttaacttcttatggacagctgagcaacggagagccccacttcctaccagatgcaatgtttgggcaaccaggagccctaggtagcactccatttcttggtcagcatggttttaatttctttcccagtgggattgacttctcagcatggggaaataacagttctcagggacagtctactcagagctctggatatagtagcaattatgcttatgcacctagctccttaggtggagccatgattgatggacagtcagcttttgccaatgagaccctcaataaggctcctggcatgaatactatagaccaagggatggcagcactgaagttgggtagcacagaagttgcaagcaatgttccaaaagttgtaggttctgctgttggtagcgggtccattactagtaacatcgtggcttccaatagtttgcctccagccaccattgctcctccaaaaccagcatcttgggctgatattgctagcaagcctgcaaaacagcaacctaaactgaagaccaagaatggcattgcagggtcaagtcttccgccacccccgataaagcataacatggatattggaacttgggataacaagggtcccgttgcaaaagccccctcacaggctttggttcagaatataggtcagccaacccaggggtctcctcagcctgtaggtcagcaggctaacaatagcccaccagtggctcaggcatcagtagggcaacagacacagccattgcctccacctccaccacagcctgcccagctttcagtccagcaacaggcagctcagccaacccgctgggtagcacctcggaaccgtggcagtgggttcggtcataatggggtggatggtaatggagtaggacagtctcaggctggttctggatctactccttcagaaccccacccagtgttggagaagcttcggtccattaataactataaccccaaagattttgactggaatctgaaacatggccgggttttcatcattaagagctactctgaggacgatattcaccgttccattaagtataatatttggtgcagcacagagcatggtaacaagagactggatgctgcttatcgttccatgaacgggaaaggccccgtttacttacttttcagtgtcaacggcagtggacacttctgtggcgtggcagaaatgaaatctgctgtggactacaacacatgtgcaggtgtgtggtcccaggacaaatggaagggtcgttttgatgtcaggtggatttttgtgaaggacgttcccaatagccaactgcgacacattcgcctagagaacaacgagaataaaccagtgaccaactctagggacactcaggaagtgcctctggaaaaggctaagcaggtgttgaaaattatagccagctacaagcacaccacttccatttttgatgacttctcacactatgagaaacgccaaggaagaagaaagtgttaa

SEQ ID NO: 34639 - DNA, 2718 bp, Homo sapiens
  source 1..2718: mol_type = unassigned DNA
agagcgtcgccgagtcggagccggagcctgagccgcgcgctgtgtctccgctgcgtccgccgaggcccccgagtgtcagggacaaaagcctccgcctgctcccgcagacggggctcatctgccgccgccgccgcgctgaggagagttcgccgccgtcgccgcccgtgaggatctgagagccatgtcggccagcagcctcttggagcagtacaaaatggatctgtacatcaaaaggatggattaaacgatgatgattttgaaccttacttgagtccacaggcaaggcccaataatgcatatactgccatgtcagattcctacttacccagttactacagtccctccattggcttctcctattctttgggtgaagctgcttggtctacggggggtgacacagccatgccctacttaacttcttatggacagctgagcaacggagagccccacttcctaccagatgcaatgtttgggcaaccaggagccctaggtagcactccatttcttggtcagcatggttttaatttctttcccagtgggattgacttctcagcatggggaaataacagttctcagggacagtctactcagagctctggatatagtagcaattatgcttatgcacctagctccttaggtggagccatgattgatggacagtcagcttttgccaatgagaccctcaataaggctcctggcatgaatactatagaccaagggatggcagcactgaagttgggtagcacagaagttgcaagcaatgttccaaaagttgtaggttctgctgttggtagcgggtccattactagtaacatcgtggcttccaatagtttgcctccagccaccattgctcctccaaaaccagcatcttgggctgatattgctagcaagcctgcaaaacagcaacctaaactgaagaccaagaatggcattgcagggtcaagtcttccgccacccccgataaagcataacatggatattggaacttgggataacaagggtcccgttgcaaaagccccctcacaggctttggttcagaatataggtcagccaacccaggggtctcctcagcctgtaggtcagcaggctaacaatagcccaccagtggctcaggcatcagtagggcaacagacacagccattgcctccacctccaccacagcctgcccagctttcagtccagcaacaggcagctcagccaacccgctgggtagcacctcggaaccgtggcagtgggttcggtcataatggggtggatggtaatggagtaggacagtctcaggctggttctggatctactccttcagaaccccacccagtgttggagaagcttcggtccattaataactataaccccaaagattttgactggaatctgaaacatggccgggttttcatcattaagagctactctgaggacgatattcaccgttccattaagtataatatttggtgcagcacagagcatggtaacaagagactggatgctgcttatcgttccatgaacgggaaaggccccgtttacttacttttcagtgtcaacggcagtggacacttctgtggcgtggcagaaatgaaatctgctgtggactacaacacatgtgcaggtgtgtggtcccaggacaaatggaagggtcgttttgatgtcaggtggatttttgtgaaggacgttcccaatagccaactgcgacacattcgcctagagaacaacgagaataaaccagtgaccaactctagggacactcaggaagtgcctctggaaaaggctaagcaggtgttgaaaattatagccagctacaagcacaccacttccatttttgatgacttctcacactatgagaaacgccaagaggaagaagaaagtgttaaaaaggaacgtcaaggtcgtgggaaataaaaggcagttctacacagactgcagcaacggttgcatctgcatatcctaagaggaaaaaatgaccttcaagagaattaggacttttttcttaatttcactgacttcagagacgattgcagacttgcagtttaagtattggaatttcacaaaagacataggacttaactggaaaatgaaaaaaaaaagaaaaagaaaaaactaaacaaaaaatccctctaggtagtttaggtgaaaaatgtcccttttattttggctttggttgtgatttcagagcataatgctatgtttttttgtctttttactatgtttttcggatttttaagtccgtaagtgcatacagttttctctaatttttaaaccctttcctcctcccattttgacatttgcacttggagaacacttgagttgtgaaggttttgggcatccaccccagaaagtgggaatttgattttatccttccgaactggaagaacatttttatgaagaatttttgtctaggagaatataacagtgttacccaaggttgtgtctttaagggtggttcattttctctgaccttttgttactcaaagtaaagtactaggagtcctaagaaatgttctgttcttgtacattatactgattaagtcaggattaatttgatttcaaagctgagaacagtggtaaaaactcgtttacagaaatgcattttggaagagaaaaatactgtaaaacgtgtcgtgaatgtttcttcagtttcttgttcagccaatgaggaaagggcattgcctttctttttaccattaatcacttctcaataaacgtgagatcctgttgagcatc

SEQ ID NO: 34640 - DNA, 2825 bp, Homo sapiens
  source 1..2825: mol_type = unassigned DNA
agtctttccaggtgttagtcgaaacctcgtggtgcgaccctggtcgtcccaaaccccctaggccttaatcctggggcggtgggggcggggaggccgtgagcacggcttccgctcctccaatccgccagagggcgcagcggccggcctctcccttcccggggttcttcgcgccgggccccttccgcgtggacggggctcatctgccgccgccgccgcgctgaggagagttcgccgccgtcgccgcccgtgaggatctgagagccatgtcggccagcagcctcttggagcagagaccaaaaggtcaaggaaacaaagtacaaaatggatctgtacatcaaaaggatggattaaacgatgatgattttgaaccttacttgagtccacaggcaaggcccaataatgcatatactgccatgtcagattcctacttacccagttactacagtccctccattggcttctcctattctttgggtgaagctgcttggtctacggggggtgacacagccatgccctacttaacttcttatggacagctgagcaacggagagccccacttcctaccagatgcaatgtttgggcaaccaggagccctaggtagcactccatttcttggtcagcatggttttaatttctttcccagtgggattgacttctcagcatggggaaataacagttctcagggacagtctactcagagctctggatatagtagcaattatgcttatgcacctagctccttaggtggagccatgattgatggacagtcagcttttgccaatgagaccctcaataaggctcctggcatgaatactatagaccaagggatggcagcactgaagttgggtagcacagaagttgcaagcaatgttccaaaagttgtaggttctgctgttggtagcgggtccattactagtaacatcgtggcttccaatagtttgcctccagccaccattgctcctccaaaaccagcatcttgggctgatattgctagcaagcctgcaaaacagcaacctaaactgaagaccaagaatggcattgcagggtcaagtcttccgccacccccgataaagcataacatggatattggaacttgggataacaagggtcccgttgcaaaagccccctcacaggctttggttcagaatataggtcagccaacccaggggtctcctcagcctgtaggtcagcaggctaacaatagcccaccagtggctcaggcatcagtagggcaacagacacagccattgcctccacctccaccacagcctgcccagctttcagtccagcaacaggcagctcagccaacccgctgggtagcacctcggaaccgtggcagtgggttcggtcataatggggtggatggtaatggagtaggacagtctcaggctggttctggatctactccttcagaaccccacccagtgttggagaagcttcggtccattaataactataaccccaaagattttgactggaatctgaaacatggccgggttttcatcattaagagctactctgaggacgatattcaccgttccattaagtataatatttggtgcagcacagagcatggtaacaagagactggatgctgcttatcgttccatgaacgggaaaggccccgtttacttacttttcagtgtcaacggcagtggacacttctgtggcgtggcagaaatgaaatctgctgtggactacaacacatgtgcaggtgtgtggtcccaggacaaatggaagggtcgttttgatgtcaggtggatttttgtgaaggacgttcccaatagccaactgcgacacattcgcctagagaacaacgagaataaaccagtgaccaactctagggacactcaggaagtgcctctggaaaaggctaagcaggtgttgaaaattatagccagctacaagcacaccacttccatttttgatgacttctcacactatgagaaacgccaagaggaagaagaaagtgttaaaaaggaacgtcaaggtcgtgggaaataaaaggcagttctacacagactgcagcaacggttgcatctgcatatcctaagaggaaaaaatgaccttcaagagaattaggacttttttcttaatttcactgacttcagagacgattgcagacttgcagtttaagtattggaatttcacaaaagacataggacttaactggaaaatgaaaaaaaaaagaaaaagaaaaaactaaacaaaaaatccctctaggtagtttaggtgaaaaatgtcccttttattttggctttggttgtgatttcagagcataatgctatgtttttttgtctttttactatgtttttcggatttttaagtccgtaagtgcatacagttttctctaatttttaaaccctttcctcctcccattttgacatttgcacttggagaacacttgagttgtgaaggttttgggcatccaccccagaaagtgggaatttgattttatccttccgaactggaagaacatttttatgaagaatttttgtctaggagaatataacagtgttacccaaggttgtgtctttaagggtggttcattttctctgaccttttgttactcaaagtaaagtactaggagtcctaagaaatgttctgttcttgtacattatactgattaagtcaggattaatttgatttcaaagctgagaacagtggtaaaaactcgtttacagaaatgcattttggaagagaaaaatactgtaaaacgtgtcgtgaatgtttcttcagtttcttgttcagccaatgaggaaagggcattgcctttctttttaccattaatcacttctcaataaacgtgagatcctgttgagcatc

SEQ ID NO: 34641 - DNA, 6697 bp, Homo sapiens
  source 1..6697: mol_type = unassigned DNA
cgaggcgaggcgaggcggggagccgagacgagcagcggccgagcgagcgcgggcgcgggcgcaccgaggcgagggaggcggggaagccccgccgccgccgcggcgcccgccccttcccccgccgcccgccccctctccccccgcccgctcgccgccttcctccctctgccttccttccccacggccggccgcctcctcgcccgcccgcccgcagccgaggagccgaggccgccgcggccgtggcggcggagccctcagccatggcctcgggcgacaccctctacatcgccacggacggctcggagatgccggccgagatcgtggagctgcacgagatcgaggtggagaccatcccggtggagaccatcgagaccacagtggtgggcgaggaggaggaggaggacgacgacgacgaggacggcggcggtggcgaccacggcggcgggggcggccacgggcacgccggccaccaccaccaccaccatcaccaccaccaccacccgcccatgatcgctctgcagccgctggtcaccgacgacccgacccaggtgcaccaccaccaggaggtgatcctggtgcagacgcgcgaggaggtggtgggcggcgacgactcggacgggctgcgcgccgaggacggcttcgaggatcagattctcatcccggtgcccgcgccggccggcggcgacgacgactacattgaacaaacgctggtcaccgtggcggcggccggcaagagcggcggcggcggctcgtcgtcgtcgggaggcggccgcgtcaagaagggcggcggcaagaagagcggcaagaagagttacctcagcggcggggccggcgcggcgggcggcggcggcgccgacccgggcaacaagaagtgggagcagaagcaggtgcagatcaagaccctggagggcgagttctcggtcaccatgtggtcctcagatgaaaaaaaagatattgaccatgagacagtggttgaagaacagatcattggagagaactcacctcctgattattcagaatatatgacaggaaagaaacttcctcctggaggaatacctggcattgacctctcagatcccaaacaactggcagaatttgctagaatgaagccaagaaaaattaaagaagatgatgctccaagaacaatagcttgccctcataaaggctgcacaaagatgttcagggataactcggccatgagaaaacatctgcacacccacggtcccagagtccacgtctgtgcagaatgtggcaaagcttttgttgagagttcaaaactaaaacgacaccaactggttcatactggagagaagccctttcagtgcacgttcgaaggctgtgggaaacgcttttcactggacttcaatttgcgcacacatgtgcgaatccataccggagacaggccctatgtgtgccccttcgatggttgtaataagaagtttgctcagtcaactaacctgaaatctcacatcttaacacatgctaaggccaaaaacaaccagtgaaaagaagagagaagacccttctcgaccacgggaagcatcttccagaagtgtgattgggaataaatatgcctctcctttgtatattatttctaggaagaattttaaaaatgaatcctacacacctaagggacatgttttgataaagtagtaaaaattaaaaaaaaaaaactttactaagatgacattgctaagatgctctatcttgctctgtaatctcgtttcaaaaacacagtgtttttgtaaagtgtggtcccaacaggaggacaattcatgaacttcgcatcaaaagacaattctttatacaacagtgctaaaaatgggacttcttttcacattcttataaatatgaagctcacctgttgcttacaatttttttaattttgtattttccaagtgtgcatattgtacacttttttggggatatgcttagtaatgctacgtgtgatttttctggaggttgataactttgcttgcagtagattttctttaaaagaatgggcagttacatgcatacttcaaaagtattttcctgtaaaaaaaaaaaagttatataggttttgtttgctatcttaattttggttgtattctttgatgttaacacattttgtataattgtatcgtatagctgtattgaatcatgtagtatcaaatattagatgtgatttaatagtgttaatcaatttaaacccattttagtcactttttttttccaaaaaaatactgccagatgctgatgttcagtgtaatttctttgcctgttcagttacagaaagtggtgctcagttgtagaatgtattgtaccttttaacacctgatgtgtacatcccatgtaacagaaagggcaacaataaaatagcaatcctaaagcaagaatatggcagaacaagatctgtaagcacagtcttattttcttttgttgtccagaatacttataattcttgagcctcccagaaattggaagctaaataaagcaactcaagtttcctttattttgcactcaattacagtgattattgatgaaagcgatgcatggatattttaatacttcctacatgtcctgacttctgaaagagagtaggtaacaggcatcccgagttcaggaactacctcagaacaccccaggccaggttggtcataggctgtgattttagcccccggcaagtgtgagtgaagcatctgtaccaccgcgcaggctgagcgcctgcgcagggtaaggtgccacctggcagtggggcacacagagggaagaccaggcctgtccatcagccggctgccttcagaggcagctccagcaggaccttggcttgtctgacaggaaatgcttgtggtcgttggttatttggtttgagagcccttgttcctccatctagtggagtccttattaaatgctagcaatgtggcaattgagtgccagtagcttaatttcatgtttctaaatggacactgggtgcaaatcggcaaggtgattagattattagaaaattctgctcaatgagtacctctcacattgtaacctcttaaatgtacgattataatgttggatcttaggtcaaataacagacttgagaatactttataaactgccatgatacagcaaaatctcatttattcaaagtgcaaacatactgtgtgtctttctgttttgtgtatgcttgactgcaagataaatgacaaactagctaatatccgagatttatttacaaatggccagggaccccatcaggtgaaacacatagcccattgtcttagagcttctccatcggtcctgtacaggaggattggtgacctactaacagtgaccctgtggctctgtggaattttgaagtgccttttgtgaatcatgaatgaaacatttaacttgagaccctttaaaaaattcatccagaatctgttaccccttgggtagtttgatggaactgagttaagcagaagaccccagctgttttctgggtaagccaggctttgctgtatctggcagtcaggagagaggtcagcccatggtggaggtcttcagtgccgagggctcggatgagaacgtgtagttctttgacttggacctgggcagcgtcttctatggatgcctgccttgtgagcacccacaccttccctccccactgtcgggttgagtagccccagcgtggctgtgttaggagtcctttgcccaacattgtgctgcactggagcctggccctggcactgtcctcaggaccctgcccaagggcccaccgcagagcacacctatgctatggggagccctgctggcagccccgagagccatgccatggcctgcaggagccaggctcctgtgtggatgaagtccctcttcctctgtgccttgatcccttgggggtgcctttggtcatctcttctgtcctttcctgtctctgaaatagtcatcactccccttgactctctctgttcacgtcttctcagtctgcagagttaacttctgtaaggagtttaatctggggttccaagaaaacaagttccttgttaacatagcactgactttgcaacaatagaaaactaacaaatgagcaacaatataaagagtagaggtagttctcattgggtgtaacttcaacccattctgcttgtggttagaatttataattttgctaacgatgtaatttactaaggtttgaaatggtattctaacagtgagtccattgtcttgaggattaatctgatttataagtaatactgatagacatattttcgtacatctgagcagaaataaatgcatgtttctagcatatgtaatataaaaactccagaggataagtttacacttaacaagatgttgttttctatttttgaatttcttattatttccccctttttggtagtggagttgagagggggagcatactatttgtataaagaactgtcaccccagagtgacatttattttccaagatgaccctgaactcatgctgttggtttcatatggtgtttgtgtgctttgcctagattcaaggcctgaggatttgaggaaaatcgggattttttttttcctatttggttttcatgtaaaagttctaaatgtcacttattttgctaaataagaccctttcacaggatagtgtgcgcaatacctgtccgtgtttccaagcagagttcaagttcatgtcttcacaagtagatgagagtcacttccagtcgggggaagcccgcctgagcagtgttttgagagtgcgtacattggaggactgccccacgtccgtttgcactctgccttgcaaaacttactgtggagacgtgtcccagactggtctcagaccagagtttgtggcacaggaaaacctggccccctaaaaagaagttttggaattggaagcctgataatttcgggaggctgaggcaggagaacggcgtgaacccgggaggcggagcttgcagtgagccgagatcgcaccactgcactccagcctgggtgacagagcaagactccgtctcccaaaaaaaaaaaaaaaaaaaaaaaaaaggaaacctgacaattctacccacctccccccacccccgactataggcaaagagagttgatcacttccagggtctctgacttctgtgacctggaaatcagcctggcttgggaaattcatgttgttgatctttaattatttaattattctttaataatccttctattttcttgacatctgacccccagcaagagtaaggatcccagaggtcaaaacagtggtgagagccaagctgctcacagacacccacttgatgccacagccatgccatgaggcttcctcccagctgctctgctggcttgctgaagccagctctgagtcacagggttgccttggaccctcggctgtagggggcacctgtctggctccgggccctttgtcctggatacactgacagtaatgtgagcgcagcacttcagagttcaggcccagcaggtcctggcaagtgcattccacccgaacttttaacccaagcggtggggaaggaagccaaaactccaagctgcactttcttggggttctggccatgcacttcttagccttctctctgactttacaggacaaaaggtaccccacgccttcagaatcatgcttacctgcacggcagcatctgactggatggctggctaggtctcatccaccccaaattactgacccttgatttatgttgttactgctcaggttatgctcagatgccctggttgcctgaagatggtttaagtgcaggcccttcagacaagtcacgtcaggcaagagagggctggcctctgacccacaagagggcagatttgtggccaagaggcttcctggcatccacccccaggcccaagggatcagtgtggtgccagagaggatctttaagctgggactgtactgaggcttgatgggaagtatgggcagcatgtacttgacacgttatcacccagtccccttgtaaaatctggaatggagcgtttaagctgagcgttagcatcaggtcagcaggcaaagcaaacctcccacaaactgggtgccgtaaggtgggaggtgacacatggagagcttcgtcctggccgagcaggcacccagccccatgtcccccgccagcattctggatgtcagaggagggtgcgtgtgatggcgtcacattcatctgaagcacactgattgattttccacaaggtggcaagtttgatcaaattgaccgcttttcatgagacacccagatgctgtaaaaaaaaaaaacagcactgggatgtgttgaggagggggcagtttgctgtgctctgttctgtctgctgctctctctgggggccgcacaatgtccgcacacatcacggaggggagaaaggcatcagtaccaaacggaacaacctcttttttctacattgtccatacccggacatgtgaggctctattatcaacaggtggtgagaaaaattatgtttttattcgctttctggtaacttctgtaggccctggctcaaggacttagcatttcgtctcatgtacatctttttcttaagtgttctttgccatttctggaattgtccttggtttttccttagctcataggtcatagatgcagaaatatagtatttaaggcatccgcatccagcatcagatggctttgcatccagaaaaacattgataactcagtttgaagcaccaagcatgtgtaatatggctctatacaatataataaatgcataatgttaagctttttaa

SEQ ID NO: 34642 - DNA, 636 bp, Homo sapiens
  source 1..636: mol_type = unassigned DNA
ttctcgtcaaagcagactttattggggcgacagggccgccccgcacgcgccagccgctccccgcgcggcccccgggccgcccacccgcctcaaccccgctcccggccggcccctccctcccttctcctcaggctcccgcccccgtggtgcccggggccgcgcggaccgctcaccggctcccaaggcagcggctgtagcggcgacgccccgttcccgagtgcggccccggcccgaggcggcgggttttgtggctgttgcaccgcgaagggcggcagccgcgcgacaccgggaagcgggaggcggtggcggcggcggcggcgcgctgacgtcacgcgccgcgggccagccagggcgcgtgcgagccgccccgcccccggtcccatcggccccaatccgggaggagcccggcgagtgggcggggccgcggaggccagcggacagatcgattggccgagaggagaatcgagagggcgaacgggcgagtggcagcgaggagccgaggccgccgcggccgtggcggcggagccctcagccatggcctcgggcgacaccctctacatcgccacggacggctcggagatgccggccgagatcgtggagctgcacgagatcgaggtggagaccatcccggtggag

SEQ ID NO: 34643 - DNA, 2225 bp, Homo sapiens
  source 1..2225: mol_type = unassigned DNA
tttttttttctttcaaaagacgaacagagaagtttcattttctttttctcctgaaaccgaatctggccggcctggctaggcatctatttccgggctgtaagcagctgacacctgcccagtggaagctggcatccctccccttgtgggttcagagctgcaagaagcaccaggctcggccacttcagaagccccagcctcgacctagcccaccctctcagggccacagtgcagaagcctgcacacctgccaagtctctccgactccttgcagctgctgtcagcatggcccaggctcctgctgacccgggcagagaaggccaccttgaacaaagaatcctgcaggtgctgacagaggctggctccccggtgaaacttgcccagctggtgaaggaatgccaagcacccaagagggagctcaaccaagtcctctaccgaatgaaaaaggagttgaaagtctccctcacatcccctgccacctggtgcttgggcgggactgatcctgaaggcgagggtcctgcagagctggccttgtccagccctgaggaagacatctacaggtttctcaaagacaatggtccccagagggccctggtcatcgcccaagcactgggaatgaggacagcaaaagatgtgaaccgagacttgtacaggatgaagagcaggcaccttctggacatggatgagcagtccaaagcatggacgatttaccgcccagaagattctggaagaagagcaaagtcagcctcaattatttaccagcacaatccaatcaacatgatctgccagaatggacccaacagctggatttccattgcaaactccgaagccatccagattggacacgggaacatcattacaagacagacagtctccagggaggacggttccgccggtccacgccacctcccttcaatggcaccaggtgattcctcaacttgggggaccctagttgatccctgggggccccaggacatccacatggagcagtccatactgagacgggtgcagctgggacacagcaatgagatgaggctccacggcgtcccgtccgagggccctgcccacatcccccctggcagccccccagtctctgccactgctgccggcccagaagcttcgtttgaagcaagaattcccagtccaggaactcaccctgagggggaagccgcccagagaatccacatgaaatcgtgctttctcgaggacgccaccatcggcaacagcaacaaaatgtctatcagcccaggggtggctggcccaggaggagtcgcagggtctggagagggggagccaggggaggacgcaggtcgtcgtcccgcagacacacaatccagaagtcactttcctcgagacattggtcagcccatcactcccagccactcgaagctcacccccaagctggaaactatgactcttggaaacaggagtcacaaagctgcagaaggcagccactatgtggatgaagcctcacacgaggggagctggtggggaggtgggatttagtgcacagcctcacgtggggcttggacacaggctgggggtgggcgcatgctagggagactagcctgctgctctctgcattccttagcgtcttgtttgacctgcttgcttccagacataacctgcatgaatcagttttgggggaatggacctggcatggggatgggttcaggccaggtcttttgatggccaggagtagatgacagggagttgccttggggaacctttggtgtgccaagaggaggtgggtagatgggagtggggctcggtcccccaggcccaggggactctctccactctttcctgggctcggggcatctgcctggagttaccttccatcatggctacctgctgtggtttgaatgtttgagtcccaacaaaattcatatcaaaacataatcccaactgggtgcagtggctcacgcctgtaatcccagcactttgggaggccgaggcgggcggatcaataggtcaggaaatccagaccgtcctggctaacatggtgaaaccccgtctctactaaaaaaaaaaatacaaaaaattagccgggcgttgtggcgggcacctggagtcccagctactccggaggctgagggaggagaatggtgtgaacccgggaggtggagcttccagtgagccgagatcgcgccactgcactccaggctgggcgacagagcgagactccgtctcaaaaaaataaatacataaataaaaaataaaccaacc

SEQ ID NO: 34644 - DNA, 1622 bp, Homo sapiens
  source 1..1622: mol_type = unassigned DNA
tttttttttctttcaaaagacgaacagagaagtttcattttctttttctcctgaaaccgaatctggccggcctggctaggcatctatttccgggctgtaagcagctgacacctgcccagtggaagctggcatccctccccttgtgggttcagagctgcaagaagcaccaggctcggccacttcagaagccccagcctcgacctagcccaccctctcagggccacagtgcagaagcctgcacacctgccaagtctctccgactccttgcagctgctgtcagcatggcccaggctcctgctgacccgggcagagaaggccaccttgaacaaagaatcctgcaggtgctgacagaggctggctccccggtgaaacttgcccagctggtgaaggaatgccaagcacccaagagggagctcaaccaagtcctctaccgaatgaaaaaggagttgaaagtctccctcacatcccctgccacctggtgcttgggcgggactgatcctgaaggcgagggtcctgcagagctggccttgtccagccctgccgagaggccccagcaacatgcagctacaattccagagacccctggccctcagttcagccaacaacgggaggaagacatctacaggtttctcaaagacaatggtccccagagggccctggtcatcgcccaagcactgggaatgaggacagcaaaagatgtgaaccgagacttgtacaggatgaagagcaggcaccttctggacatggatgagcagtccaaagcatggacgatttaccgcccagaagattctggaagaagagcaaagtcagcctcaattatttaccagcacaatccaatcaacatgatctgccagaatggacccaacagctggatttccattgcaaactccgaagccatccagattggacacgggaacatcattacaagacagacagtctccagggaggacggttccgccggtccacgccacctcccttcaatggcaccaggtgattcctcaacttgggggaccctagttgatccctgggggccccaggacatccacatggagcagtccatactgagacgggtgcagctgggacacagcaatgagatgaggctccacggcgtcccgtccgagggccctgcccacatcccccctggcagccccccagtctctgccactgctgccggcccagaagcttcgtttgaagcaagaattcccagtccaggaactcaccctgagggggaagccgcccagagaatccacatgaaatcgtgctttctcgaggacgccaccatcggcaacagcaacaaaatgtctatcagcccaggggtggctggcccaggaggagtcgcagggtctggagagggggagccaggggaggacgcagttgctgccttcactgaagtcttgaacccctcaaagtcattcatgaaatttggaatcaacttcttccagactcctgtgaatgttgatagtttgacctcctcccatgaatcacaaatgttcttaacggcatgtagattggtgatcttttccagaagattttcaacttactttgcccagatccatctgaggaatcactctgtgttgcacttatgccctcataaaatatatttattgaagaataagaagtga

SEQ ID NO: 34645 - DNA, 1424 bp, Homo sapiens
  source 1..1424: mol_type = unassigned DNA
tttttttttctttcaaaagacgaacagagaagtttcattttctttttctcctgaaaccgaatctggccggcctggctaggcatctatttccgggctgtaagcagctgacacctgcccagtggaagctggcatccctccccttgtgggttcagagctgcaagaagcaccaggctcggccacttcagaagccccagcctcgacctagcccaccctctcagggccacagtgcagaagcctgcacacctgccaagtctctccgactccttgcagctgctgtcagcatggcccaggctcctgctgacccgggcagagaaggccaccttgaacaaagaatcctgcaggtgctgacagaggctggctccccggtgaaacttgcccagctggtgaaggaatgccaagcacccaagagggagctcaaccaagtcctctaccgaatgaaaaaggagttgaaagtctccctcacatcccctgccacctggtgcttgggcgggactgatcctgaaggcgagggtcctgcagagctggccttgtccagccctgccgagaggccccagcaacatgcagctacaattccagagacccctggccctcagttcagccaacaacgggaggaagacatctacaggtttctcaaagacaatggtccccagagggccctggtcatcgcccaagcactgggaatgaggacagcaaaagatgtgaaccgagacttgtacaggatgaagagcaggcaccttctggacatggatgagcagtccaaagcatggacgatttaccgcccagaagattctggaagaagagcaaagtcagcctcaattatttaccagcacaatccaatcaacatgatctgccagaatggacccaacagctggatttccattgcaaactccgaagccatccagattggacacgggaacatcattacaagacagacagtctccagggaggacggttccgccggtccacgccacctcccttcaatggcaccaggtgattcctcaacttgggggaccctagttgatccctgggggccccaggacatccacatggagcagtccatactgagacgggtgcagctgggacacagcaatgagatgaggctccacggcgtcccgtccgagggccctgcccacatcccccctggcagccccccagtctctgccactgctgccggcccagaagcttcgtttgaagcaagaattcccagtccaggaactcaccctgagggggaagccgcccagagaatccacatgaaatcgtgctttctcgaggacgccaccatcggcaacagcaacaaaatgtctatcagcccaggggtggctggcccaggaggagtcgcagggtctggagagggggagccaggggaggacgcaggtcgtcgtcccgcagacacacaagccaggtcttttgatggccaggagtag

SEQ ID NO: 34646 - DNA, 2195 bp, Homo sapiens
  source 1..2195: mol_type = unassigned DNA
gctgacacctgcccagtggaagctggcatccctccccttgtgggttcagagctgcaagaagcaccaggctcggccacttcagaagccccagcctcgacctagcccaccctctcagggccacagtgcagaagcctgcacacctgccaagtctctccgactccttgcagctgctgtcagcatggcccaggctcctgctgacccgggcagagaaggccaccttgaacaaagaatcctgcaggtgctgacagaggctggctccccggtgaaacttgcccagctggtgaaggaatgccaagcacccaagagggagctcaaccaagtcctctaccgaatgaaaaaggagttgaaagtctccctcacatcccctgccacctggtgcttgggcgggactgatcctgaaggcgagggtcctgcagagctggccttgtccagccctgccgagaggccccagcaacatgcagctacaattccagagacccctggccctcagttcagccaacaacgggaggaagacatctacaggtttctcaaagacaatggtccccagagggccctggtcatcgcccaagcactgggaatgaggacagcaaaagatgtgaaccgagacttgtacaggatgaagagcaggcaccttctggacatggatgagcagtccaaagcatggacgatttaccgcccagaagattctggaagaagagcaaagtcagcctcaattatttaccagcacaatccaatcaacatgatctgccagaatggacccaacagctggatttccattgcaaactccgaagccatccagattggacacgggaacatcattacaagacagacagtctccagggaggacggttccgccggtccacgccacctcccttcaatggcaccaggtgattcctcaacttgggggaccctagttgatccctgggggccccaggacatccacatggagcagtccatactgagacgggtgcagctgggacacagcaatgagatgaggctccacggcgtcccgtccgagggccctgcccacatcccccctggcagccccccagtctctgccactgctgccggcccagaagcttcgtttgaagcaagaattcccagtccaggaactcaccctgagggggaagccgcccagagaatccacatgaaatcgtgctttctcgaggacgccaccatcggcaacagcaacaaaatgtctatcagcccaggggtggctggcccaggaggagtcgcagggtctggagagggggagccaggggaggacgcaggtcgtcgtcccgcagacacacaatccagaagtcactttcctcgagacattggtcagcccatcactcccagccactcgaagctcacccccaagctggaaactatgactcttggaaacaggagtcacaaagctgcagaaggcagccactatgtggatgaagcctcacacgaggggagctggtggggaggtgggatttagtgcacagcctcacgtggggcttggacacaggctgggggtgggcgcatgctagggagactagcctgctgctctctgcattccttagcgtcttgtttgacctgcttgcttccagacataacctgcatgaatcagttttgggggaatggacctggcatggggatgggttcaggccaggtcttttgatggccaggagtagatgacagggagttgccttggggaacctttggtgtgccaagaggaggtgggtagatgggagtggggctcggtcccccaggcccaggggactctctccactctttcctgggctcggggcatctgcctggagttaccttccatcatggctacctgctgtggtttgaatgtttgagtcccaacaaaattcatatcaaaacataatcccaactgggtgcagtggctcacgcctgtaatcccagcactttgggaggccgaggcgggcggatcaataggtcaggaaatccagaccgtcctggctaacatggtgaaaccccgtctctactaaaaaaaaaaatacaaaaaattagccgggcgttgtggcgggcacctggagtcccagctactccggaggctgagggaggagaatggtgtgaacccgggaggtggagcttccagtgagccgagatcgcgccactgcactccaggctgggcgacagagcgagactccgtctcaaaaaaataaatacataaataaaaaataaaccaaccataa

SEQ ID NO: 34647 - DNA, 1041 bp, Homo sapiens
  source 1..1041: mol_type = unassigned DNA
cagaagccccagcctcgacctagcccaccctctcagggccacagtgcagaagcctgcacacctgccaagtctctccgactccttgcagctgctgtcagcatggcccaggctcctgctgacccgggcagagaaggccaccttgaacaaagaatcctgcaggtgctgacagaggctggctccccggtgaaacttgcccagctggtgaaggaatgccaagcacccaagagggagctcaaccaagtcctctaccgaatgaaaaaggagttgaaagtctccctcacatcccctgccacctggtgcttgggcgggactgatcctgaaggcgagggtcctgcagagctggccttgtccagccctgccgagaggccccagcaacatgcagctacaattccagagacccctggccctcagttcagccaacaacgggaggaagacatctacaggtttctcaaagacaatggtccccagagggccctggtcatcgcccaagcactgggaatgaggacagcaaaagatgtgaaccgagacttgtacaggatgaagagcaggcaccttctggacatggatgagcagtccaaagcatggacgatttaccgcccagaagattctggaagaagagcaaagtcagcctcaattatttaccagcacaatccaatcaacatgatctgccagaatggacccaacagctggatttccattgcaaactccgaagccatccagattggacacgggaacatcattacaagacagacagtctccagggaggacggtaagtcacccaagagagcccagggaggggacctcggtggggagccaccggatcctctgggtgggggcaaagggtagggatggggagtggggggattctgccctccaaggggaaagggttgcttccagacccccacagtccacctttacggccgtcctgagaatgaggacacctggatcaaagctctcctgatttccctgtactctgatactttctacctcattttaaagtttaatttaatttttatttttctaataaaattttaaaattaa

SEQ ID NO: 34648 - DNA, 2073 bp, Homo sapiens
  source 1..2073: mol_type = unassigned DNA
tttttttttctttcaaaagacgaacagagaagtttcattttctttttctcctgaaaccgaatctggccggcctggctaggcatctatttccgggctgtaagcagctgacacctgcccagtggaagctggcatccctccccttgtgggttcagagctgcaagaagcaccaggctcggccacttcagaagccccagcctcgacctagcccaccctctcagggccacagtgcagaagcctgcacacctgccaagtctctccgactccttgcagctgctgtcagcatggcccaggctcctgctgacccgggcagagaagccgagaggccccagcaacatgcagctacaattccagagacccctggccctcagttcagccaacaacgggaggaagacatctacaggtttctcaaagacaatggtccccagagggccctggtcatcgcccaagcactgggaatgaggacagcaaaagatgtgaaccgagacttgtacaggatgaagagcaggcaccttctggacatggatgagcagtccaaagcatggacgatttaccgcccagaagattctggaagaagagcaaagtcagcctcaattatttaccagcacaatccaatcaacatgatctgccagaatggacccaacagctggatttccattgcaaactccgaagccatccagattggacacgggaacatcattacaagacagacagtctccagggaggacggttccgccggtccacgccacctcccttcaatggcaccaggtgattcctcaacttgggggaccctagttgatccctgggggccccaggacatccacatggagcagtccatactgagacgggtgcagctgggacacagcaatgagatgaggctccacggcgtcccgtccgagggccctgcccacatcccccctggcagccccccagtctctgccactgctgccggcccagaagcttcgtttgaagcaagaattcccagtccaggaactcaccctgagggggaagccgcccagagaatccacatgaaatcgtgctttctcgaggacgccaccatcggcaacagcaacaaaatgtctatcagcccaggggtggctggcccaggaggagtcgcagggtctggagagggggagccaggggaggacgcaggtcgtcgtcccgcagacacacaatccagaagtcactttcctcgagacattggtcagcccatcactcccagccactcgaagctcacccccaagctggaaactatgactcttggaaacaggagtcacaaagctgcagaaggcagccactatgtggatgaagcctcacacgaggggagctggtggggaggtgggatttagtgcacagcctcacgtggggcttggacacaggctgggggtgggcgcatgctagggagactagcctgctgctctctgcattccttagcgtcttgtttgacctgcttgcttccagacataacctgcatgaatcagttttgggggaatggacctggcatggggatgggttcaggccaggtcttttgatggccaggagtagatgacagggagttgccttggggaacctttggtgtgccaagaggaggtgggtagatgggagtggggctcggtcccccaggcccaggggactctctccactctttcctgggctcggggcatctgcctggagttaccttccatcatggctacctgctgtggtttgaatgtttgagtcccaacaaaattcatatcaaaacataatcccaactgggtgcagtggctcacgcctgtaatcccagcactttgggaggccgaggcgggcggatcaataggtcaggaaatccagaccgtcctggctaacatggtgaaaccccgtctctactaaaaaaaaaaatacaaaaaattagccgggcgttgtggcgggcacctggagtcccagctactccggaggctgagggaggagaatggtgtgaacccgggaggtggagcttccagtgagccgagatcgcgccactgcactccaggctgggcgacagagcgagactccgtctcaaaaaaataaatacataaataaaaaataaaccaaccataa

SEQ ID NO: 34649 - DNA, 2437 bp, Homo sapiens
  source 1..2437: mol_type = unassigned DNA
atccaggaaataggttagtttcagacaagcctgcttgccggagctcagcagacaccaggccttccgggcaggcctggcccaccgtgggcctcagagctgctgctggggcattcagaaccggctctccattggcattgggaccagagaccccgcaagtggcctgtttgcctggacatccacctgtacgtccccaggtttcgggaggcccaggggcgatgccagaccccgcggcgcacctgcccttcttctacggcagcatctcgcgtgccgaggccgaggagcacctgaagctggcgggcatggcggacgggctcttcctgctgcgccagtgcctgcgctcgctgggcggctatgtgctgtcgctcgtgcacgatgtgcgcttccaccactttcccatcgagcgccagctcaacggcacctacgccattgccggcggcaaagcgcactgtggaccggcagagctctgcgagttctactcgcgcgaccccgacgggctgccctgcaacctgcgcaagccgtgcaaccggccgtcgggcctcgagccgcagccgggggtcttcgactgcctgcgagacgccatggtgcgtgactacgtgcgccagacgtggaagctggagggcgaggccctggagcaggccatcatcagccaggccccgcaggtggagaagctcattgctacgacggcccacgagcggatgccctggtaccacagcagcctgacgcgtgaggaggccgagcgcaaactttactctggggcgcagaccgacggcaagttcctgctgaggccgcggaaggagcagggcacatacgccctgtccctcatctatgggaagacggtgtaccactacctcatcagccaagacaaggcgggcaagtactgcattcccgagggcaccaagtttgacacgctctggcagctggtggagtatctgaagctgaaggcggacgggctcatctactgcctgaaggaggcctgccccaacagcagtgccagcaacgcctcaggggctgctgctcccacactcccagcccacccatccacgttgactcatcctcagagacgaatcgacaccctcaactcagatggatacacccctgagccagcacgcataacgtccccagacaaaccgcggccgatgcccatggacacgagcgtgtatgagagcccctacagcgacccagaggagctcaaggacaagaagctcttcctgaagcgcgataacctcctcatagctgacattgaacttggctgcggcaactttggctcagtgcgccagggcgtgtaccgcatgcgcaagaagcagatcgacgtggccatcaaggtgctgaagcagggcacggagaaggcagacacggaagagatgatgcgcgaggcgcagatcatgcaccagctggacaacccctacatcgtgcggctcattggcgtctgccaggccgaggccctcatgctggtcatggagatggctgggggcgggccgctgcacaagttcctggtcggcaagagggaggagatccctgtgagcaatgtggccgagctgctgcaccaggtgtccatggggatgaagtacctggaggagaagaactttgtgcaccgtgacctggcggcccgcaacgtcctgctggttaaccggcactacgccaagatcagcgactttggcctctccaaagcactgggtgccgacgacagctactacactgcccgctcagcagggaagtggccgctcaagtggtacgcacccgaatgcatcaacttccgcaagttctccagccgcagcgatgtctggagctatggggtcaccatgtgggaggccttgtcctacggccagaagccctacaagaagatgaaagggccggaggtcatggccttcatcgagcagggcaagcggatggagtgcccaccagagtgtccacccgaactgtacgcactcatgagtgactgctggatctacaagtgggaggatcgccccgacttcctgaccgtggagcagcgcatgcgagcctgttactacagcctggccagcaaggtggaagggcccccaggcagcacacagaaggctgaggctgcctgtgcctgagctcccgctgcccaggggagccctccacgccggctcttccccaccctcagccccaccccaggtcctgcagtctggctgagccctgcttggttgtctccacacacagctgggctgtggtagggggtgtctcaggccacaccggccttgcattgcctgcctggccccctgtcctctctggctggggagcagggaggtccgggagggtgcggctgtgcagcctgtcctgggctggtggctcccggagggccctgagctgagggcattgcttacacggatgccttcccctgggccctgacattggagcctgggcatcctcaggtggtcaggcgtagatcaccagaataaacccagcttccctcttg

SEQ ID NO: 34650 - DNA, 1844 bp, Homo sapiens
  source 1..1844: mol_type = unassigned DNA
atgcgcttggggccgcgctggaagggcgaggccctggagcaggccatcatcagccaggccccgcaggtggagaagctcattgctacgacggcccacgagcggatgccctggtaccacagcagcctgacgcgtgaggaggccgagcgcaaactttactctggggcgcagaccgacggcaagttcctgctgaggccgcggaaggagcagggcacatacgccctgtccctcatctatgggaagacggtgtaccactacctcatcagccaagacaaggcgggcaagtactgcattcccgagggcaccaagtttgacacgctctggcagctggtggagtatctgaagctgaaggcggacgggctcatctactgcctgaaggaggcctgccccaacagcagtgccagcaacgcctcaggggctgctgctcccacactcccagcccacccatccacgttgactcatcctcagagacgaatcgacaccctcaactcagatggatacacccctgagccagcacgcataacgtccccagacaaaccgcggccgatgcccatggacacgagcgtgtatgagagcccctacagcgacccagaggagctcaaggacaagaagctcttcctgaagcgcgataacctcctcatagctgacattgaacttggctgcggcaactttggctcagtgcgccagggcgtgtaccgcatgcgcaagaagcagatcgacgtggccatcaaggtgctgaagcagggcacggagaaggcagacacggaagagatgatgcgcgaggcgcagatcatgcaccagctggacaacccctacatcgtgcggctcattggcgtctgccaggccgaggccctcatgctggtcatggagatggctgggggcgggccgctgcacaagttcctggtcggcaagagggaggagatccctgtgagcaatgtggccgagctgctgcaccaggtgtccatggggatgaagtacctggaggagaagaactttgtgcaccgtgacctggcggcccgcaacgtcctgctggttaaccggcactacgccaagatcagcgactttggcctctccaaagcactgggtgccgacgacagctactacactgcccgctcagcagggaagtggccgctcaagtggtacgcacccgaatgcatcaacttccgcaagttctccagccgcagcgatgtctggagctatggggtcaccatgtgggaggccttgtcctacggccagaagccctacaagaagatgaaagggccggaggtcatggccttcatcgagcagggcaagcggatggagtgcccaccagagtgtccacccgaactgtacgcactcatgagtgactgctggatctacaagtgggaggatcgccccgacttcctgaccgtggagcagcgcatgcgagcctgttactacagcctggccagcaaggtggaagggcccccaggcagcacacagaaggctgaggctgcctgtgcctgagctcccgctgcccaggggagccctccacgccggctcttccccaccctcagccccaccccaggtcctgcagtctggctgagccctgcttggttgtctccacacacagctgggctgtggtagggggtgtctcaggccacaccggccttgcattgcctgcctggccccctgtcctctctggctggggagcagggaggtccgggagggtgcggctgtgcagcctgtcctgggctggtggctcccggagggccctgagctgagggcattgcttacacggatgccttcccctgggccctgacattggagcctgggcatcctcaggtggtcaggcgtagatcaccagaataaacccagcttccctcttg

SEQ ID NO: 34651 - DNA, 1085 bp, Homo sapiens
  source 1..1085: mol_type = unassigned DNA
tgcatgctccagggacggcacccttgtctggggcaggtgcttgtgggggctgaggctgccttgctccccacacccctgcccctgacctgggagtgtaccgctgtgtgtgcccagcacgcataacgtccccagacaaaccgcggccgatgcccatggacacgagcgtgtatgagagcccctacagcgacccagaggagctcaaggacaagaagctcttcctgaagcgcgataacctcctcatagctgacattgaacttggctgcggcaactttggctcagtgcgccagggcgtgtaccgcatgcgcaagaagcagatcgacgtggccatcaaggtgctgaagcagggcacggagaaggcagacacggaagagatgatgcgcgaggcgcagatcatgcaccagctggacaacccctacatcgtgcggctcattggcgtctgccaggccgaggccctcatgctggtcatggagatggctgggggcgggccgctgcacaagttcctggtcggcaagagggaggagatccctgtgagcaatgtggccgagctgctgcaccaggtgtccatggggatgaagtacctggaggagaagaactttgtgcaccgtgacctggcggcccgcaacgtcctgctggttaaccggcactacgccaagatcagcgactttggcctctccaaagcactgggtgccgacgacagctactacactgcccgctcagcagggaagtggccgctcaagtggtacgcacccgaatgcatcaacttccgcaagttctccagccgcagcgatgtctggagctatggggtcaccatgtgggaggccttgtcctacggccagaagccctacaagaagatgaaagggccggaggtcatggccttcatcgagcagggcaagcggatggagtgcccaccagagtgtccacccgaactgtacgcactcatgagtgactgctggatctacaagtgggaggatcgccccgacttcctgaccgtggagcagcgcatgcgagcctgttactacagcctggccagcaaggtggaagggcccccaggcagcacacagaaggctgaggctgcctgtgcctga

SEQ ID NO: 34652 - DNA, 5241 bp, Homo sapiens
  source 1..5241: mol_type = unassigned DNA
atgattgctgctatcagtctcgcgctcaccgcccggctgaggaggtgaaagtttctccccaggaagataaaccgcaaaagacaatattgtgcatgatttgcgccttttctttggctttttctttctttcttcacccccccacccacttttttttttttttttttcaaaaagcagagagggaaaaacggagagtgaaggagcgaggaggcgagcgtgagagaaaggagagagagagaaaagaaagggcgaggggctagtggagaagtaaggaggggcgcgctgcgcgaggcggagagagggcgaagcagtcgcggcactggcgctcacattcctctatgctacaaatccaggaggaagtttttttttagggggctgagatgctccatgcctttccccgggcagccttgacgcgcggccctctcggcagagactgagcggcgagaaagtgcgagccgggccggcagaatctgcctggcgggcgctggagcctgcgttactcgcggcccgcagccgtccggctactttgcgtttggcccggccagcgcccgggcgcgccgcgccattgcctgcaggctaggacttcgcgaggtgggtcgactccccctccctcctcctcttcttcctcctcttcctcctcctcttgttcctcctcctcctcccgattttccctcctcggctggcgagggtggggggggcgggggaggccggggctcgccccgagcagccacgatgctcctggacgccggcccccagtacccagcgatcggcgtgaccacctttggcgcgtcccgccaccactccgcgggcgacgtggccgaacgagacgtgggcctgggcatcaacccgttcgccgacggcatgggcgccttcaagctcaaccccagttcgcacgagctggcttcggccggccagacggccttcacgtcgcaggcgccaggctacgcggctgctgcggccctgggccatcaccatcacccgggccacgtcggctcctattccagcgcagccttcaactccacgcgggactttctgttccgcaaccggggttttggcgacgcggcggcggcagccagcgcacagcacagcctctttgctgcatcggccgggggcttcgggggcccacacggccacacggacgccgcgggccacctcctcttccccgggcttcacgagcaggctgccggccacgcgtcgcctaacgtggtcaacgggcagatgaggctcggcttctcgggggacatgtacccgcgaccggagcagtacggccaggtgaccagcccgcgttcggagcactatgctgcgccgcagctgcacggctacgggcccatgaacgtgaacatggccgcgcatcacggcgccggcgccttcttccgctacatgcgccaacccatcaagcaagagctcatctgcaagtggatcgagcccgagcagctggccaaccccaaaaagtcgtgcaacaaaactttcagcaccatgcacgagctagttacgcacgtcaccgtggagcacgtaggtggcccggagcagagtaatcacatctgcttctgggaggagtgtccgcgcgagggcaagcccttcaaagccaaatacaaactggttaaccacatccgcgtgcacacgggcgagaagccctttccctgccccttccctggctgtggcaaggtcttcgcgcgctccgagaatttaaagatccacaaaaggacgcacacaggggagaagcccttcaagtgcgagtttgagggctgtgaccggcgcttcgctaacagcagcgaccgcaagaagcacatgcacgtgcacacgagcgacaagccctatctttgcaagatgtgcgacaagtcctacacgcatcccagttcgctgcgcaaacacatgaaggtccacgaatcctcctcgcagggctcgcagccttcgccggccgccagctctggctacgaatcctccacgcctcccaccatcgtgtctccctccacagacaacccgaccacaagctccttatcgccctcctcctccgcagtccaccacacagccggccacagtgcgctctcttccaattttaacgaatggtacgtttaaaatcagaaacaaaacatcgaacaaaaccctatttaagagactgatcacacacgtatacacaacattactgaaagaaccctgcgaatcaaaacaacccccacacagaccccgcaatccttttttaaaaaatctgccaatagacccaggacgagtaagagaggaagcatcaaccttttaaaaatttcctttcgctttcattatttttctttttttggcaaaggcttggtacccaaggtgcggtagggggtcgagggggaggaggccacctgaccaaatgccgccaaccccgagggccagtttcttgtcgaattggtacgggctctctggggcttcggcttctttttttctttgttttcttgtaaatacagaattattagcttaaaactgtactgttgaattctgtaaatagttatatctcggttggagcgggtgggtgggattgtggcgttgtggtctttgcattgggggaggggggagggaccggatgggcggggggagggggagggggaggggtgggcggccgaaagccaactgtttgtactgaatggcaagaatgttctagtaaatgtgtaccaaaatgtgaattactttgtacgattacagtctccacgtcgacctaacccaatattattggtattaatgtgctttttttgtataaagtgcaaacatttcgtcccaaagtctaagtactttagtgcagtaaaatgttgtttcatgtcctgtcaagaattcgtatagtacgagcctggatctgcgtgtcaaactgttccatttgtttatgtaaagtgatattaaaaaagatataaactataactgtccgttacttttggcaaaagatacaaccacataatgtatataattcctagtttccatatttatccgcatgtaaagggccggtttatccatgttacagctcttcaatatttatggctagaagaactcgtatgtacactttagtttccagaactgtttggtaacctttcgtaccttattaaagattcttaaatctccgtgattgtggtaggaatttcttcttcacccaccagcaacctgctgcctcttctgccagtcttaaagggtctccagaaaagctctccagtctcccttgccttccctttctgtcactgcaggtcgtataaacgtgataaatgaatgctaccctgctggctctccgagagagtgtaattagtatttatatcaaaatttatgaaacaaattttcggccgcagtataatttaaatgacctttgcagatgtagaataacaaccataaaaataacaggaatagattgcacaggcgacatcaatattaatgtagacgaattgtcagaagctcaggggctcgctctgcaacattgcaaatgaacttgcagccgagggttccgctgccccctagattaaattccccgggctgaaactgagttgcagatttacaatatcatattttaaattgctgtcttcaattaaaccatttatgaccataactaattttcaggatgtcgatgcatgcttttccaggccttccttctttgtacaaaagtaaatgtccataaagcgtttcacttatattcttcaaacatgatgctaatttaaattaattacttcctatgatatgttattattcctatgattttgccactgttattagttctctcaaaaatacatctagggaagaggattattttaagtaatttgattatctttctatctcttttatttatttctcatttacttaagaaattcgttccattggttggcattgatacagtaaatttgtaaatgaggagacaatataaaaaatctaaattacttgtgcttaatgactgtagcagaatgccttttctctaaatcagattgtctttcttgcagtttagtttgatagatttgcaagctatgctgcttccatgaagttagctgcgctggtaggaacgcaggcttctttgtctctggttgtagcttgcatgatcgccccattaggcagacaacgtagccggagatcacaaatcaggcccttggctgtagttgctagtgtgtggaggtgcagagcaggtggcagaaactgacctcactgggcaagggtggccatggacctgattctttaatgcactctatgtgttcaggaagccacaggccatatttgactctgagaaagaaaacaagaggaaaaaccccacaaagtataacaaccccttaagatacatctattttaaagtgaaattaatttttcagtttataccattggccaattacaagataaaaatgttcaatttctttaagaatcctttgttgacttgtcttttcatctcttgctatttatatttgtcactgtttcaacaaagtcttatttgctgaggaaggactttgctgcacttactgtaccacatcaaacactggggagggtggtgtttaactttttaaaaaatgttattctgattataacaataatattggcttttttcatgaaaagagcgccaccttgcaaggtttagtgagatttatggaagttgaatacctaagcaggaattgctgctagctccaaaaatttgcgaagcaaaagctagccccaattggtttggaagtttgaaactgattaacagatttgcatttgaagtgactccagacattaggtccagacattagttaaaaatagaaagaggaataaagacatctcttctctctagaaaagataacaccacaattaataatccttcccactttcattgagatcagcttgtctgataacctgatatgagtgtgataatgataaacatgataatagtggtacttttgtaattttgctggtgcatttaagaagatagtaaatgatgagttcatcttttcttcgaacattcctattcctagatgtagtttacctcaaattgggaattataactgtctaatttttgttgtgtacctgatgccccttttgctttaataccacagtgtaacaattaaatatcacactatgacatatgatttaagtaggatattttaaagataaattttaggggtaaatgtttacttcaaaatgactccatatttcaaatatctgtttagactgtgaaggccaaataatttttaagaaaacatttgaagagtagtgtgtttgcatttgtgaataatcttactcacagcaagtaaacgtaataaaagccaacatttaagccaa

SEQ ID NO: 34653 - DNA, 2974 bp, Homo sapiens
  source 1..2974: mol_type = unassigned DNA
ccgcctggctttggactcttctcctcctccacctcctcctcctcctcccgcgccgccgcctcctcctcctcttcctctccgcgccttcgctacgcgcccggccgcccgaggcagatccaggcggcggcggaggcggcgggcgcaggagagcggctcccagggctgaagtggccgccaccaccgccgcctgcgcctggagcccggtggccgccggacgcaccgcgcggatcgggagcgggagtcgaggcggcgcggaggcgcagggctcgcaggggcgggcgggcgcgctggccatgctcctggacgcgggtccgcagttcccggccatcggggtgggcagcttcgcgcgccaccatcaccactccgccgcggcggcggcggcggctgccgccgagatgcaggaccgtgaactgagcctggcggcggcgcagaacggcttcgttgactccgccgccgcgcacatgggagccttcaagctcaacccgggcgcgcacgagctgtccccgggccagagctcggcgttcacgtcgcagggccccggcgcctaccccggctccgctgcggctgccgctgcggccgcagcgctcgggccccacgccgcgcacgttggctcctactctgggccgcccttcaactccacccgggacttcctgttccgcagccgcggcttcggggactcggcgccgggcggcgggcagcacgggctgttcgggccgggcgcgggcggcctgcaccacgcgcactcggacgcgcagggccacctcctcttcccgggcctgccagagcagcacgggccgcacggctcgcagaatgtgctcaacgggcagatgcgcctcgggctgcccggcgaggtgttcgggcgctcggagcaataccgccaggtggccagcccgcggaccgacccctactcggcggcgcaactccacaaccagtacggccccatgaatatgaacatgggtatgaacatggcagcagccgcggcccaccaccaccaccaccaccaccaccaccccggtgcctttttccgctatatgcggcagcagtgcatcaagcaggagctaatctgcaagtggatcgaccccgagcaactgagcaatcccaagaagagctgcaacaaaactttcagcaccatgcacgagctggtgacacacgtctcggtggagcacgtcggcggcccggagcagagcaaccacgtctgcttctgggaggagtgtccgcgcgagggcaagcccttcaaggccaaatacaaactggtcaaccacatccgcgtgcacacaggcgagaaacccttcccctgccccttcccgggctgtggcaaagtcttcgcgcgctccgagaacctcaagatccacaaaaggacccacacaggggagaagccgttccagtgtgagtttgagggctgcgaccggcgcttcgccaacagcagcgacaggaagaagcacatgcacgtccacacctccgataagccctatctctgcaagatgtgcgacaagtcctacacgcaccccagctcgctgcggaagcacatgaaggtccatgagtcctccccgcagggctctgaatcctccccggccgccagctccggctatgagtcgtccacgcccccggggctggtgtcccccagcgccgagccccagagcagctccaacctgtccccagcggcggcggcagcggcggcggcggctgcggcggcggcggccgcggtgtccgcggtgcaccggggcggaggctcgggcagtggcggcgcgggaggcggctcaggcggcggcagcggcagtggcgggggcggcggcggggcgggcggcgggggcggcggcagctctggcgggggcagcgggacagccgggggtcacagcggcctctcctccaacttcaatgaatggtacgtgtgacgggtcggggcctctctccctctccctgtccccaccccagcgcagcagccctccccgcagctagcagcgagggcaccttgtgatcatgttgttaaaattatgaatctgatttttatgatgatgaaaattttaccagcagaaggattttttaaagttttttttttttttttaataataatctaggcatgaagagcaaaaatatcccttccggagtctttgaagctgaaaatataaaacaaataaaaaataaaaaaataaaaacccacaaaaatgttgaaccaaacctccctgctaatctccatgcccacgttctttcccaccctgttcccagtcttctgacaaactgtgtacatagcggactcctcctttctcctccgaggtggttttaaaggctttttggtgtatagaagtttgtccatttgtaaaactccggattgcgttcctccccgccttccgccccttcccttccctaaagtgatgggctttctcttttctctttttagtttacccggtttctttttaagtaatgtggaagaaaatggtttattttgtattgtggtattgaatattgtgttcctttttatgaggcaacctgattgtaaacttcatgtaactatagactggaaaaaatgagccgtgccaaagtctcccttctgtttcttcagcacattgacccatagcacacacatacacaccaccaccaacaacgcttgtgaatgtatttttctgttagctgggtttacatgtgatgttttagtgcttttgcaagttcaatttgttagttcctgtatgaaagattgtgggggaaaaataaacgtcgtgccgttagctttttccgtaataacacccttccttctgtaaatacccgttaccatatttatccatttgtaattaaattatggtattaacttgctacagaggaaacaatatttataaagaatgtttcttaactataaatatgtacaattgtgggcataaactgtttcagattttttatttgaaggttttaagtggtttgatcatttcttgtgatgttttgagagtaatgcatacagaaatataataaaatgtgttgaaactgc

SEQ ID NO: 34654 - DNA, 1928 bp, Homo sapiens
  source 1..1928: mol_type = unassigned DNA
cctccacctcctcctcctcctcccgcgccgccgcctcctcctcctctcaatcccaagaagagctgcaacaaaactttcagcaccatgcacgagctggtgacacacgtctcggtggagcacgtcggcggcccggagcagagcaaccacgtctgcttctgggaggagtgtccgcgcgagggcaagcccttcaaggccaaatacaaactggtcaaccacatccgcgtgcacacaggcgagaaacccttcccctgccccttcccgggctgtggcaaagtcttcgcgcgctccgagaacctcaagatccacaaaaggacccacacaggggagaagccgttccagtgtgagtttgagggctgcgaccggcgcttcgccaacagcagcgacaggaagaagcacatgcacgtccacacctccgataagccctatctctgcaagatgtgcgacaagtcctacacgcaccccagctcgctgcggaagcacatgaaggtccatgagtcctccccgcagggctctgaatcctccccggccgccagctccggctatgagtcgtccacgcccccggggctggtgtcccccagcgccgagccccagagcagctccaacctgtccccagcggcggcggcagcggcggcggcggctgcggcggcggcggccgcggtgtccgcggtgcaccggggcggaggctcgggcagtggcggcgcgggaggcggctcaggcggcggcagcggcagtggcgggggcggcggcggggcgggcggcgggggcggcggcagctctggcgggggcagcgggacagccgggggtcacagcggcctctcctccaacttcaatgaatggtacgtgtgacgggtcggggcctctctccctctccctgtccccaccccagcgcagcagccctccccgcagctagcagcgagggcaccttgtgatcatgttgttaaaattatgaatctgatttttatgatgatgaaaattttaccagcagaaggattttttaaagttttttttttttttttaataataatctaggcatgaagagcaaaaatatcccttccggagtctttgaagctgaaaatataaaacaaataaaaaataaaaaaataaaaacccacaaaaatgttgaaccaaacctccctgctaatctccatgcccacgttctttcccaccctgttcccagtcttctgacaaactgtgtacatagcggactcctcctttctcctccgaggtggttttaaaggctttttggtgtatagaagtttgtccatttgtaaaactccggattgcgttcctccccgccttccgccccttcccttccctaaagtgatgggctttctcttttctctttttagtttacccggtttctttttaagtaatgtggaagaaaatggtttattttgtattgtggtattgaatattgtgttcctttttatgaggcaacctgattgtaaacttcatgtaactatagactggaaaaaatgagccgtgccaaagtctcccttctgtttcttcagcacattgacccatagcacacacatacacaccaccaccaacaacgcttgtgaatgtatttttctgttagctgggtttacatgtgatgttttagtgcttttgcaagttcaatttgttagttcctgtatgaaagattgtgggggaaaaataaacgtcgtgccgttagctttttccgtaataacacccttccttctgtaaatacccgttaccatatttatccatttgtaattaaattatggtattaacttgctacagaggaaacaatatttataaagaatgtttcttaactataaatatgtacaattgtgggcataaactgtttcagattttttatttgaaggttttaagtggtttgatcatttcttgtgatgttttgagagtaatgcatacagaaatataataaaatgtgttgaaactgc

SEQ ID NO: 34655 - DNA, 783 bp, Homo sapiens
  source 1..783: mol_type = unassigned DNA
atgctcctggacgcgggtccgcagttcccggccatcggggtgggcagcttcgcgcgccaccatcaccactccgccgcggcggcggcggcggctgccgccgagatgcaggaccgtgaactgagcctggcggcggcgcagaacggcttcgttgactccgccgccgcgcacatgggagccttcaagctcaacccgggcgcgcacgagctgtccccgggccagagctcggcgttcacgtcgcagggccccggcgcctaccccggctccgctgcggctgccgctgcggccgcagcgctcgggccccacgccgcgcacgttggctcctactctgggccgcccttcaactccacccgggacttcctgttccgcagccgcggcttcggggactcggcgccgggcggcgggcagcacgggctgttcgggccgggcgcgggcggcctgcaccacgcgcactcggacgcgcagggccacctcctcttcccgggcctgccagagcagcacgggccgcacggctcgcagaatgtgctcaacgggcagatgcgcctcgggctgcccggcgaggtgttcgggcgctcggagcaataccgccaggtggccagcccgcggaccgacccctactcggcggcgcaactccacaaccagtacggccccatgaatatgaacatgggtatgaacatggcagcagccgcggcccaccaccaccaccaccaccaccaccctgttcccagtcttctgacaaactgtgtacatagcggactcctcctttctcctccgaggtggttttaa

SEQ ID NO: 34656 - DNA, 3469 bp, Homo sapiens
  source 1..3469: mol_type = unassigned DNA
ttactctggaggcgaagaggctgggactcgcgcggcgagcggcaagcggcgagtaacgagcctgcctactgcccgctgcccgcctgcccggccgctagccggctccgccacttggcgcagcccagcccggaggccggtacccagggagcctcctggccccgcggttctgtgcactcggggagaggaggggtgcccgggacaggattggcaaactccgccctccacttactattttgcttatttttctttgtgcgcgcctgttagtttgttaaaccagatctagtccgagtcttttctcctcccttctcctccctcctcctccccccgccaacaccccctccctgctctttcttcccctcctccctcctatccctctgcaggagactcttgcagtgacggaaagttgcagcccctggtagcgccttgggggtctccccgcagtgtccaaccgccgccacccctttccgactacggcacttcggagatctcctccttcgccggtaccctctctcacttcggccggatcgcctgtgcccagaacgtcccacccatgacgatgctcctggacggaggcccgcagttccctgggctgggagtgggcagcttcggcgcgccgcgccaccacgagatgcccaaccgtgagccggcaggcatggggctgaatcccttcggggactcaacccacgccgccgccgccgccgccgccgccgctgccttcaagctgagccctgccgcggcgcacgatctatcttcaggccagagctcggctttcacgccgcagggttcgggctacgccaacgccctgggccaccatcaccaccaccatcaccatcatcaccacaccagccaggtgcccagctacggtggcgctgcctctgccgccttcaactcaacgcgcgagtttctgttccgccagcgcagctccgggctcagtgaggcggcctcgggtggcgggcagcacgggctcttcgccggctcggcgagcagcctgcatgctccagctggcatccccgagccccctagctacttgctgtttcccgggctgcatgagcagggcgctgggcacccgtcgcccacagggcacgtggacaacaaccaggtccacctggggctgcgtggggagctgttcggccgtgctgacccataccgcccagtggccagcccgcgcacggacccctacgcggccggcgctcagtttcctaactacagccccatgaacatgaacatgggagtgaacgtggcggcccaccacgggcccggcgccttcttccgttatatgcggcagcctatcaagcaggagctgtcgtgcaagtggatcgacgaggctcagctgagccggcccaagaagagctgcgaccggaccttcagcaccatgcatgagctggtgacacatgtcaccatggagcatgtggggggcccggagcagaacaaccacgtctgctactgggaggagtgcccccgggagggcaagtctttcaaggcgaagtacaaactggtcaaccacatccgagtgcacacgggcgagaagcccttcccatgccccttcccgggctgcgggaagatctttgcccgttctgagaacctcaagatccacaagaggacccacacaggtgagaaacctttcaaatgtgaatttgaaggctgtgacagacgctttgccaacagcagcgaccgtaagaagcacatgcatgtgcatacctcggacaagccctatatctgcaaagtgtgcgacaagtcctacacgcacccgagctccctgcgcaaacacatgaaggttcatgaatctcaagggtcagattcctcccctgctgccagttcaggctatgaatcttccactccacccgctatagcttctgcaaacagtaaagataccactaaaaccccttctgcagttcaaactagcaccagccacaaccctggacttcctcctaattttaacgaatggtacgtctgaggacaaacacaaaccctgttaattatagaatggaccaaatacatttttaaaagaaaactgagaccaatcagatggaaatggagttttaaggcaagaggccatatatagggctacatcttgttaattgcaattgtccaggaaggttttgggcaagatccaaaagtagccatgcccttttctcaggatagaaaatatgttttggcatttgaagcattttttacaaaatctttacactactttttcttccccttcctcttgctctctgcacaccccattcttaaactcctccaattcattttaacacttgtcctgtttcttgagaggaagttatagaaggcttgttggtggtggtgatgttaaactgatggaaattctttttcgccttagtggtgattgtttaaactctcacagtcttaaaccgtgccaaagtcctgttatgtcttgaacttttcctcaaagcattacacttgtgaatgtatttttgtctaatagggtcgaaactgttgttcagtattttttcaggctgaggatgtgatgttactctacacattgtgacgtttagtatacagttgccttttgtaataactttttttttgtaaatacatatccattgatgccatatttatcgtttgtaatttaattattgctacaagtgccgggaactgaacaatatttatggataaatgttttctaacaaattctgtacagcttttgattataactgctttagcattaaaaattgttttgaaagaagaacacaatttacaattttggaaccactgactcctttctcttgttttgtaacagccttcttctacaaagaggagatgtgagcaaattaaatcttgtttgttggtatttataactcactcagatcccttttttaattgttaaattatttttctattacagtataaattccttacagtgtcagtttccatctgggaagactctcctttctttatctctatctcagatggttgtttaactgcgagtttaaatgtgtttgtcctggattttcggcatgcaaatcaaatattactgatcaattcagttagtggccatgacatctcaatcttgtacttcaaagactgagaagctggatttaatcatccctgccctacatatataaacataaggtaacctactgaattttatgtcccttagttctttattaccttacataaaaatgaaaattgcggcaggatgcatgtctgtctgttctatctagagatcacccatatacctatatatgtttgtatctatgacttatctaatctgcctatcaatctatctagtagctatctatatattttcaaaagatagcttatgtctaaaacagtggtgatgagtaaggccagttgagcattgcttacttatggttaaagtgcttcttaaaagaaccatagtccatttacaattttggaaggcaaaggctgatttgtttgctgtatatagttcaattcataattatcgcaattatccataacatttatatagcggtgtaataactgc

SEQ ID NO: 34657 - DNA, 1968 bp, Homo sapiens
  source 1..1968: mol_type = unassigned DNA
gcaggagactcttgcagtgacggaaagttgcagcccctggtagcgccttgggggtctccccgcagtgtccaaccgccgccacccctttccgactacggcacttcggagatctcctccttcgccggtaccctctctcacttcggccggatcgcctgtgcccagaacgtcccacccatgacgatgctcctggacggaggcccgcagttccctgggctgggagtgggcagcttcggcgcgccgcgccaccacgagatgcccaaccgtgagccggcaggcatggggctgaatcccttcggggactcaacccacgccgccgccgccgccgccgccgccgctgccttcaagctgagccctgccgcggcgcacgatctatcttcaggccagagctcggctttcacgccgcagggttcgggctacgccaacgccctgggccaccatcaccaccaccatcaccatcatcaccacaccagccaggtgcccagctacggtggcgctgcctctgccgccttcaactcaacgcgcgagtttctgttccgccagcgcagctccgggctcagtgaggcggcctcgggtggcgggcagcacgggctcttcgccggctcggcgagcagcctgcatgctccagctggcatccccgagccccctagctacttgctgtttcccgggctgcatgagcagggcgctgggcacccgtcgcccacagggcacgtggacaacaaccaggtccacctggggctgcgtggggagctgttcggccgtgctgacccataccgcccagtggccagcccgcgcacggacccctacgcggccggcgctcagtttcctaactacagccccatgaacatgaacatgggagtgaacgtggcggcccaccacgggcccggcgccttcttccgttatatgcggcagcctatcaagcaggagctgtcgtgcaagtggatcgacgaggctcagctgagccggcccaagaagagctgcgaccggaccttcagcaccatgcatgagctggtgacacatgtcaccatggagcatgtggggggcccggagcagaacaaccacgtctgctactgggaggagtgcccccgggagggcaagtctttcaaggcgaagtacaaactggtcaaccacatccgagtgcacacgggcgagaagcccttcccatgccccttcccgggctgcgggaagatctttgcccgttctgagaacctcaagatccacaagaggacccacacaggtgagaaacctttcaaatgtgaatttgaaggctgtgacagacgctttgccaacagcagcgaccgtaagaagcacatgcatgtgcatacctcggacaagccctatatctgcaaagtgtgcgacaagtcctacacgcacccgagctccctgcgcaaacacatgaagtgttgtcctgcttggtatccgggacagtctctaattcctgacgaagaacttgatactgacgttggtatgcagcagccagccctccataacactacctatcctaaatgcagggttaatgccgaacctactgtgcaagaaatgatttactgatgaggtttcaaagaaaaccacatcaatttggatgtctgttaccttgaagtgatcattttaagagtagtagcttcttccctaggtataaaaagactattttcttcttttggtgtatttcatcctgtgttgagcaatcatttgtgaaatgaaaaagcaaaaaaactccccccactttaggatttataaatgggaagatggaggtgaagactggcctaattcataacccagtatgcattatctcatgcattgtgttgaccttggtgaaaatctttttcaaataccagcattctatatgtagaactaaagtgtttaaaactagaaacatgaattgttgttttgttaattttatgtttgtgttcagaaagcaatacccaggatccctttaatttttgtttgacttaaataaaaccatttaaatta

SEQ ID NO: 34658 - DNA, 4331 bp, Homo sapiens
  source 1..4331: mol_type = unassigned DNA
acacaacaagggaggggacctaaggggggaagggtagctgttgggagggggagagggaaaataattcttcaaaaaagaaaagtcagtcttctcctctccagtccgtggaaaatccaacggggacgttgacaagagggtatttttaggaaacacatccaaatatacagggtaagagtgaatgtgagaaaaaaaaaagttgtgggttgtagaagttatcaagtgggatttgcggcgctctctgcaggaaacgcgaacggctccagttcaaagccacatgcaccaacgtgacatataagccattaaaatatcatcctgacggctcatttctgcttcatcatacattccctaactgcttcctgaaagctggaaaaggagaagtgaaggatgaccgcctcgctggaaccacaaaagagaggcttggaggggtttgtggtcccctctcagccaccccgaaatgatgtgcagaaatgaggcgatcctggcaacaggtggagtggggctcaaagtcagaaaatgagatacaagacatccttggtgatgaggaaacgattacggctttaccgaaacactcttaaagagtcaagtagcagctctggacaccatggcccccagctcaccgccgcctccagcccctcggtgttcccgggcctccacgaggagcctccccaggcctcccccagccgtcctttgaatggactcctgcgtctggggctccctggagacatgtacgcgcggccggagcccttcccgccagggcctgcggcccgcagcgacgccctggcagctgccgcagccctgcatggctacgggggcatgaacctgacggtgaacctcgctgcgccccacggtcctggcgctttcttccgctacatgcgccagcccatcaaacaggagctcatctgcaagtggctggcggccgacggcaccgcgaccccgagcctctgctccaaaactttcagcaccatgcacgagctggtcacgcacgtcaccgtggagcacgtcggcggcccggaacaggccaaccacatttgcttctgggaggagtgtccgcgccagggaaagcccttcaaagccaaatacaaacttgtaaatcacatccgcgtgcacacgggcgagaagcccttcccttgtcctttcccggggtgtgggaaggtctttgctagatcagaaaatctcaaaatacacaaacgaactcacacaggcgagaagcccttcagatgcgagttcgagggctgcgagcggcgcttcgccaacagcagcgaccgtaagaagcattcgcacgtgcacactagcgacaagccatacacgtgcaaggtgcggggctgcgacaagtgctacacgcaccccagctcgctgcgtaagcacatgaaggtgcacgggcgctcgccgccgcccagctctggctacgattcggctacaccgtctgccctcgtgtcgccctcgtcggactgcggccacaagtcccaggtggcctcctcggcggcggtggcggcgcgtaccgccgacttgagcgaatgatgtccaccgcgttgctcgcaaggtaatctcgctccgcgcagctgagcgccccgcatctcgcgcctgctacatcaaagggcccgcgcacaaagcagtgtttcttcgccacggtgcatcttcatggtaagttaggatttctatggcaatgtgcaagtcgcactgaaatcctgaaaggccaagcctggagcccgtccaggcttttcattaaggacataatatttacgtctaacagaccttttttcttgtgtatacaagtatatatttttgtttgacgcggactaaatcattttcatttaatttccggtaaacaaaacccacgcgaatgggcacttgtacccgatcataataaaaatggataataatgtgaaggaagaaaagagccgcttgaatcgccgctcagccccctttgtttctgctttctgcggtgatcagagggcgcgtttgggtttgatggcgagtttctaaaggcgaggaaatggtttgtaagaggggaaagaaaaggagaaaggtctaatcaagctcgggttgttcaaagagtcgggttttggggttgaaagtgtgagtttgacggtgcatcagcatgccgcgttaggctcgccatggaaatacgcgcggggagcggccgcttcaaaggcggcacacttcactacagacactctattaagatacatttgcgctgacctttgctttcacgccatttaatactgtcactgcgctctccagtatatacttcctttctagaacccgacttgcccacgtttaggggttcactctgcaccctgatgtgggaggctttggcgcaggggacactttcaggaaagggaggagcacaaggactctgtgcatcttgactgcaccccaaagaggctccaggatcaggagtgaaagattttaaagcagcctccgaagcttaacaaatgagcattccaagctcagttttgtgcaaatcgcctttctgactcttgagtaggatggaggcttaaatttaatggcgacttggggggaagggagccaccctgggggagtctgaggagttcagactgtgcccttgggaatttccactctggctttccgtgccactcttcttcctttccatcccaaaagtctcttgcggcccctgaaacttgtttctttctaaggcagggtgtgtggtacccttaggcctggactagtcctagatgcaaactcaagagcccaaggccaaggggatgtggggaagatggcaggaaagttagaagtccatgttcccttaattgtcttgttgtttattttatccaagtaccccagtgaataggggaaaaataaacacagtgaaaaaaaaaatcaaacagtggagtcttctttagtgccagtccttgtggttgaataaaaaggatggtccgctttctattgagctgagaaatctttgaagtgggagttattatctgagacattcctgcttgtcgtcctaacaacgctgatgaaacgtaaaaggttctttgtcagcgatttgttctcctctctgtcaaactccctctgccccgttagtttcaaaccgtttctaaagagataaaaatcaaacttcttttaaaacaatatccacacactgcatcaatacataactttaggtctaagtcttgctaagggataaacaaaagcaatgcctagacatcagggtcagggcctggtctggtgaagtatgcagaagttggggggccctcgggacaagctttgggacatgaggaaaagaatgcagagagggtgcaagcagaatacataccctaagtccataattgtgtttctgcttctttctgctctggtttgcattcaatcagcccaagttgggtcacatagatgggtttcctttgggtacccctcaggctcctaatattcttgcccaggatccttggaacttaagaatgcagccaagcaattgttaatatctcctgctccttcaaagccacctctgctaaaaatagacccattgtgtgtttcttctcactagcagcaatcaacaagccctttctgccgttaataagaaggagaatagctgaaggagagagatattttattaatttcctgtttccttcagaatcttggcaattgaagtttagaaggtttggtctacaacacagtgatcgaaaatgcatgtaaatgcccatccttcccttcattcacgtgtgaagttgttcattttatattgtgcccagcaaagaaactttcacccagttcaggtttccccaaaactcctgtggtggttttaaaggtggtttaaataaataaggatgtgctggtccccctactctgtgtgtgctgaataaatggcttgtaaagaagtttttccaagctgtaacccatgctgttattatagttgctgcaaaatgttcttcctgatattgattttatttgttaactgaaggtctccatatgtttgtttatattgctaatttatgagaaaatgtaataattgcaatgaatgtgaattatacagacaggcaaacattttgtaatcataattcacatatacacaaaagcctggctgaaatctttagactatttgtaccctctctacccacactgtttgtgatttatcatctgtctctttagtgtcagttaaattatgaactaacttgaaaataaaagttgtttgactgaaagtgattgttgaatgaacaacaaagttgaaagccatggcttgatcttgtaaatatataaatgtaaatgatattaaatctgtgattccttttccctccaaaggcttttgtgtacatggcgctgcatttggctattttctttggaaataaataatgtgatgtttctcttcctcttttgaa

SEQ ID NO: 34659 - DNA, 3979 bp, Homo sapiens
  source 1..3979: mol_type = unassigned DNA
gaaagaaagctaggactggctcaaaggttggatctgaaagttggggttgatgaatggcccatgtcaaagtcttaggaaagcggaggggcttttggagggttgcacttcggccgtcaccgtcttcaggaaactccctttggattccaaggctcaaagtcagaaaatgagatacaagacatccttggtgatgaggaaacgattacggctttaccgaaacactcttaaagagtcaagtagcagctctggacaccatggcccccagctcaccgccgcctccagcccctcggtgttcccgggcctccacgaggagcctccccaggcctcccccagccgtcctttgaatggactcctgcgtctggggctccctggagacatgtacgcgcggccggagcccttcccgccagggcctgcggcccgcagcgacgccctggcagctgccgcagccctgcatggctacgggggcatgaacctgacggtgaacctcgctgcgccccacggtcctggcgctttcttccgctacatgcgccagcccatcaaacaggagctcatctgcaagtggctggcggccgacggcaccgcgaccccgagcctctgctccaaaactttcagcaccatgcacgagctggtcacgcacgtcaccgtggagcacgtcggcggcccggaacaggccaaccacatttgcttctgggaggagtgtccgcgccagggaaagcccttcaaagccaaatacaaacttgtaaatcacatccgcgtgcacacgggcgagaagcccttcccttgtcctttcccggggtgtgggaaggtctttgctagatcagaaaatctcaaaatacacaaacgaactcacacaggcgagaagcccttcagatgcgagttcgagggctgcgagcggcgcttcgccaacagcagcgaccgtaagaagcattcgcacgtgcacactagcgacaagccatacacgtgcaaggtgcggggctgcgacaagtgctacacgcaccccagctcgctgcgtaagcacatgaaggtgcacgggcgctcgccgccgcccagctctggctacgattcggctacaccgtctgccctcgtgtcgccctcgtcggactgcggccacaagtcccaggtggcctcctcggcggcggtggcggcgcgtaccgccgacttgagcgaatgatgtccaccgcgttgctcgcaaggtaatctcgctccgcgcagctgagcgccccgcatctcgcgcctgctacatcaaagggcccgcgcacaaagcagtgtttcttcgccacggtgcatcttcatggtaagttaggatttctatggcaatgtgcaagtcgcactgaaatcctgaaaggccaagcctggagcccgtccaggcttttcattaaggacataatatttacgtctaacagaccttttttcttgtgtatacaagtatatatttttgtttgacgcggactaaatcattttcatttaatttccggtaaacaaaacccacgcgaatgggcacttgtacccgatcataataaaaatggataataatgtgaaggaagaaaagagccgcttgaatcgccgctcagccccctttgtttctgctttctgcggtgatcagagggcgcgtttgggtttgatggcgagtttctaaaggcgaggaaatggtttgtaagaggggaaagaaaaggagaaaggtctaatcaagctcgggttgttcaaagagtcgggttttggggttgaaagtgtgagtttgacggtgcatcagcatgccgcgttaggctcgccatggaaatacgcgcggggagcggccgcttcaaaggcggcacacttcactacagacactctattaagatacatttgcgctgacctttgctttcacgccatttaatactgtcactgcgctctccagtatatacttcctttctagaacccgacttgcccacgtttaggggttcactctgcaccctgatgtgggaggctttggcgcaggggacactttcaggaaagggaggagcacaaggactctgtgcatcttgactgcaccccaaagaggctccaggatcaggagtgaaagattttaaagcagcctccgaagcttaacaaatgagcattccaagctcagttttgtgcaaatcgcctttctgactcttgagtaggatggaggcttaaatttaatggcgacttggggggaagggagccaccctgggggagtctgaggagttcagactgtgcccttgggaatttccactctggctttccgtgccactcttcttcctttccatcccaaaagtctcttgcggcccctgaaacttgtttctttctaaggcagggtgtgtggtacccttaggcctggactagtcctagatgcaaactcaagagcccaaggccaaggggatgtggggaagatggcaggaaagttagaagtccatgttcccttaattgtcttgttgtttattttatccaagtaccccagtgaataggggaaaaataaacacagtgaaaaaaaaaatcaaacagtggagtcttctttagtgccagtccttgtggttgaataaaaaggatggtccgctttctattgagctgagaaatctttgaagtgggagttattatctgagacattcctgcttgtcgtcctaacaacgctgatgaaacgtaaaaggttctttgtcagcgatttgttctcctctctgtcaaactccctctgccccgttagtttcaaaccgtttctaaagagataaaaatcaaacttcttttaaaacaatatccacacactgcatcaatacataactttaggtctaagtcttgctaagggataaacaaaagcaatgcctagacatcagggtcagggcctggtctggtgaagtatgcagaagttggggggccctcgggacaagctttgggacatgaggaaaagaatgcagagagggtgcaagcagaatacataccctaagtccataattgtgtttctgcttctttctgctctggtttgcattcaatcagcccaagttgggtcacatagatgggtttcctttgggtacccctcaggctcctaatattcttgcccaggatccttggaacttaagaatgcagccaagcaattgttaatatctcctgctccttcaaagccacctctgctaaaaatagacccattgtgtgtttcttctcactagcagcaatcaacaagccctttctgccgttaataagaaggagaatagctgaaggagagagatattttattaatttcctgtttccttcagaatcttggcaattgaagtttagaaggtttggtctacaacacagtgatcgaaaatgcatgtaaatgcccatccttcccttcattcacgtgtgaagttgttcattttatattgtgcccagcaaagaaactttcacccagttcaggtttccccaaaactcctgtggtggttttaaaggtggtttaaataaataaggatgtgctggtccccctactctgtgtgtgctgaataaatggcttgtaaagaagtttttccaagctgtaacccatgctgttattatagttgctgcaaaatgttcttcctgatattgattttatttgttaactgaaggtctccatatgtttgtttatattgctaatttatgagaaaatgtaataattgcaatgaatgtgaattatacagacaggcaaacattttgtaatcataattcacatatacacaaaagcctggctgaaatctttagactatttgtaccctctctacccacactgtttgtgatttatcatctgtctctttagtgtcagttaaattatgaactaacttgaaaataaaagttgtttgactgaaagtgattgttgaatgaacaacaaagttgaaagccatggcttgatcttgtaaatatataaatgtaaatgatattaaatctgtgattccttttccctccaaaggcttttgtgtacatggcgctgcatttggctattttctttggaaataaataatgtgatgtttctcttcctcttttg

SEQ ID NO: 34660 - DNA, 929 bp, Homo sapiens
  source 1..929: mol_type = unassigned DNA
gcagaggatgagtccatcccttcttcccaggaggagggaaaaggggtacaaatggggctcccactggcacaggaaccaggagcagtttgttgcctgcctgccttcccttctctccttgtgaattgcctgggtgccccaccgtgggcacaagaatggaagtcgtggcccagagcttccctcgcgaaaaatgagcaaggcgggtgccgggagggggcctttacaggaggctcaaagtcagaaaatgagatacaagacatccttggtgatgaggaaacgattacggctttaccgaaacactcttaaagagtcaagtagcagctctggacaccatggcccccagctcaccgccgcctccagcccctcggtgttcccgggcctccacgaggagcctccccaggcctcccccagccgtcctttgaatggactcctgcgtctggggctccctggagacatgtacgcgcggccggagcccttcccgccagggcctgcggcccgcagcgacgccctggcagctgccgcagccctgcatggctacgggggcatgaacctgacggtgaacctcgctgcgccccacggtcctggcgctttcttccgctacatgcgccagcccatcaaacaggagctcatctgcaagtggctggcggccgacggcaccgcgaccccgagcctctgctccaaaactttcagcaccatgcacgagctggtcacgcacgtcaccgtggagcacgtcggcggcccggaacaggccaaccacatttgcttctgggaggagtgtccgcgccagggaaagcccttcaaagccaaatacaaacttgtaaatcacatccgcgtgcacacgggcgagaagcccttcccttgtcctttcccggggtgtgggaaggtctttgctagatcagaaaatctcaaaatacacaaacgaactcacacag

SEQ ID NO: 34661 - DNA, 565 bp, Homo sapiens
  source 1..565: mol_type = unassigned DNA
gcttcatcatacattccctaactgcttcctgaaagctggaaaaggagaagtgaaggatgaccgcctcgctggaaccacaaaagagaggcttggaggggtttgtggtcccctctcagccaccccgaaatgatgtgcagaaatgaggcgatcctggcaacaggtggagtgggggtcaaagcgccaagttagcccagatggcagcaagacgatggaacttctccgccccaacctgacggcagatgccgcctgagtccacctcagggcggctccttgccctccctcaccctggtcctgcctcaggaagctgactgctgggatctgctctctgcgcgcggccagcagtgggctcaaagtcagaaaatgagatacaagacatccttggtgatgaggaaacgattacggctttaccgaaacactcttaaagagtcaagtagcagctctggacaccatggcccccagctcaccgccgcctccagcccctcggtgttcccgggcctccacgaggagcctccccaggcctcccccagccgtcctttgaatggactcctgcgtctggggctccctg

SEQ ID NO: 34662 - DNA, 1481 bp, Homo sapiens
  source 1..1481: mol_type = unassigned DNA
gaaagaaagctaggactggctcaaaggttggatctgaaagttggggttgatgaatggcccatgtcaaagtcttaggaaagcggaggggcttttggagggttgcacttcggccgtcaccgtcttcaggaaactccctttggattccaaggctcaaagtcagaaaatgagatacaagacatccttggtgatgaggaaacgattacggctttaccgaaacactcttaaagagtcaagtagcagctctggacaccatggcccccagctcaccgccgcctccagcccctcggtgttcccgggcctccacgaggagcctccccaggcctcccccagccgtcctttgaatggactcctgcgtctggggctccctggagacatgtacgcgcggccggagcccttcccgccagggcctgcggcccgcagcgacgccctggcagctgccgcagccctgcatggctacgggggcatgaacctgacggtgaacctcgctgcgccccacggtcctggcgctttcttccgctacatgcgccagcccatcaaacaggagctcatctgcaagtggctggcggccgacggcaccgcgaccccgagcctctgctccaaaactttcagcaccatgcacgagctggtcacgcacgtcaccgtggagcacgtcggcggcccggaacaggccaaccacatttgcttctgggaggagtgtccgcgccagggaaagcccttcaaagccaaatacaaacttgtaaatcacatccgcgtgcacacgggcgagaagcccttcccttgtcctttcccggggtgtgggaaggtctttgctagatcagaaaatctcaaaatacacaaacgaactcacacaggcgagaagcccttcagatgcgagttcgagggctgcgagcggcgcttcgccaacagcagcgaccgtaagaagcattcgcacgtgcacactagcgacaagccatacacgtgcaaggtgcggggctgcgacaagtgctacacgcaccccagctcgctgcgtaagcacatgaaggtgcacgggcgctcgccgccgcccagctctggctacgattcggctacaccgtctgccctcgtgtcgccctcgtcggactgcggccacaagtcccaggtggcctcctcggcggcggtggcggcgcgtaccgccgacttgagcgaatgatgtccaccgcgttgctcgcaaggtaatctcgctccgcgcagctgagcgccccgcatctcgcgcctgctacatcaaagggcccgcgcacaaagcagtgtttcttcgccacggtgcatcttcatggtaagttaggatttctatggcaatgtgcaagtcgcactgaaatcctgaaaggccaagcctggagcccgtccaggcttttcattaaggacataatatttacgtctaacagaccttttttcttgtgtatacaagtatatatttttgtttgacgcggactaaatcattttcatttaatttccggtaaacaaaa

SEQ ID NO: 34663 - DNA, 1774 bp, Homo sapiens
  source 1..1774: mol_type = unassigned DNA
gagaagtgatccagacctcttagaagttgggttggggctgccttatgggtggacagggatctctagggaacctcacacccatttcccccagaagcaaaagagtaaattctattattgccaaccaaccaggacttttccatgccagacatcctgccatgaggaaatttcagagcgaggacgcccagcatgccgcccttctgtaggaatgcaaagttaggcctcctttctttcctgatttgtgctggaaggagcttattacctttggggaagaatgccttttggttagaaagaattgaaaataataataccctctgggaaaaggctcaaagtcagaaaatgagatacaagacatccttggtgatgaggaaacgattacggctttaccgaaacactcttaaagagtcaagtagcagctctggacaccatggcccccagctcaccgccgcctccagcccctcggtgttcccgggcctccacgaggagcctccccaggcctcccccagccgtcctttgaatggactcctgcgtctggggctccctggagacatgtacgcgcggccggagcccttcccgccagggcctgcggcccgcagcgacgccctggcagctgccgcagccctgcatggctacgggggcatgaacctgacggtgaacctcgctgcgccccacggtcctggcgctttcttccgctacatgcgccagcccatcaaacaggagctcatctgcaagtggctggcggccgacggcaccgcgaccccgagcctctgctccaaaactttcagcaccatgcacgagctggtcacgcacgtcaccgtggagcacgtcggcggcccggaacaggccaaccacatttgcttctgggaggagtgtccgcgccagggaaagcccttcaaagccaaatacaaacttgtaaatcacatccgcgtgcacacgggcgagaagcccttcccttgtcctttcccggggtgtgggaaggtctttgctagatcagaaaatctcaaaatacacaaacgaactcacacaggcgagaagcccttcagatgcgagttcgagggctgcgagcggcgcttcgccaacagcagcgaccgtaagaagcattcgcacgtgcacactagcgacaagccatacacgtgcaaggtgcggggctgcgacaagtgctacacgcaccccagctcgctgcgtaagcacatgaaggtgcacgggcgctcgccgccgcccagctctggctacgattcggctacaccgtctgccctcgtgtcgccctcgtcggactgcggccacaagtcccaggtggcctcctcggcggcggtggcggcgcgtaccgccgacttgagcgaatgatgtccaccgcgttgctcgcaaggtaatctcgctccgcgcagctgagcgccccgcatctcgcgcctgctacatcaaagggcccgcgcacaaagcagtgtttcttcgccacggtgcatcttcatggtaagttaggatttctatggcaatgtgcaagtcgcactgaaatcctgaaaggccaagcctggagcccgtccaggcttttcattaaggacataatatttacgtctaacagaccttttttcttgtgtatacaagtatatatttttgtttgacgcggactaaatcattttcatttaatttccggtaaacaaaacccacgcgaatgggcacttgtacccgatcataataaaaatggataataatgtgaaggaagaaaagagccgcttgaatcgccgctcagccccctttgtttctgctttctgcggtgatcaga

SEQ ID NO: 34664 - DNA, 500 bp, Homo sapiens
  source 1..500: mol_type = unassigned DNA
ccacttggatttggcctgtggttcaacaagttaaacaactgcttgttctgtgggcagacatccccattgacagaggacttgctgtgtttgtccagcctgagaccttttcaatgactgtttttctttctaggccaaattgagggtgggggccggatagatgcttctgtctggctgctcaactgcctcagccttgcctgacagatgcagaggtcctcaggatggctttaagtatttaaggcggccaatggcttggctcaaagtcagaaaatgagatacaagacatccttggtgatgaggaaacgattacggctttaccgaaacactcttaaagagtcaagtagcagctctggacaccatggcccccagctcaccgccgcctccagcccctcggtgttcccgggcctccacgaggagcctccccaggcctcccccagccgtcctttgaatggactcctgcgtctggggctccctggagacatgtacgcgcggccggagccctt

SEQ ID NO: 34665 - DNA, 4152 bp, Homo sapiens
  source 1..4152: mol_type = unassigned DNA
gagaagtgatccagacctcttagaagttgggttggggctgccttatgggtggacagggatctctagggaacctcacacccatttcccccagaagcaaaagagtaaattctattattgccaaccaaccaggacttttccatgccagacatcctgccatgaggaaatttcagagcgaggacgcccagcatgccgcccttctgtaggaatgcaaagttaggcctcctttctttcctgatttgtgctggaaggagcttattacctttggggaagaatgccttttggttagaaagaattgaaaataataataccctctgggaaaaggctcaaagtcagaaaatgagatacaagacatccttggtgatgaggaaacgattacggctttaccgaaacactcttaaagagtcaagtagcagctctggacaccatggcccccagctcaccgccgcctccagcccctcggtgttcccgggcctccacgaggagcctccccaggcctcccccagccgtcctttgaatggactcctgcgtctggggctccctggagacatgtacgcgcggccggagcccttcccgccagggcctgcggcccgcagcgacgccctggcagctgccgcagccctgcatggctacgggggcatgaacctgacggtgaacctcgctgcgccccacggtcctggcgctttcttccgctacatgcgccagcccatcaaacaggagctcatctgcaagtggctggcggccgacggcaccgcgaccccgagcctctgctccaaaactttcagcaccatgcacgagctggtcacgcacgtcaccgtggagcacgtcggcggcccggaacaggccaaccacatttgcttctgggaggagtgtccgcgccagggaaagcccttcaaagccaaatacaaacttgtaaatcacatccgcgtgcacacgggcgagaagcccttcccttgtcctttcccggggtgtgggaaggtctttgctagatcagaaaatctcaaaatacacaaacgaactcacacaggcgagaagcccttcagatgcgagttcgagggctgcgagcggcgcttcgccaacagcagcgaccgtaagaagcattcgcacgtgcacactagcgacaagccatacacgtgcaaggtgcggggctgcgacaagtgctacacgcaccccagctcgctgcgtaagcacatgaaggtgcacgggcgctcgccgccgcccagctctggctacgattcggctacaccgtctgccctcgtgtcgccctcgtcggactgcggccacaagtcccaggtggcctcctcggcggcggtggcggcgcgtaccgccgacttgagcgaatgatgtccaccgcgttgctcgcaaggtaatctcgctccgcgcagctgagcgccccgcatctcgcgcctgctacatcaaagggcccgcgcacaaagcagtgtttcttcgccacggtgcatcttcatggtaagttaggatttctatggcaatgtgcaagtcgcactgaaatcctgaaaggccaagcctggagcccgtccaggcttttcattaaggacataatatttacgtctaacagaccttttttcttgtgtatacaagtatatatttttgtttgacgcggactaaatcattttcatttaatttccggtaaacaaaacccacgcgaatgggcacttgtacccgatcataataaaaatggataataatgtgaaggaagaaaagagccgcttgaatcgccgctcagccccctttgtttctgctttctgcggtgatcagagggcgcgtttgggtttgatggcgagtttctaaaggcgaggaaatggtttgtaagaggggaaagaaaaggagaaaggtctaatcaagctcgggttgttcaaagagtcgggttttggggttgaaagtgtgagtttgacggtgcatcagcatgccgcgttaggctcgccatggaaatacgcgcggggagcggccgcttcaaaggcggcacacttcactacagacactctattaagatacatttgcgctgacctttgctttcacgccatttaatactgtcactgcgctctccagtatatacttcctttctagaacccgacttgcccacgtttaggggttcactctgcaccctgatgtgggaggctttggcgcaggggacactttcaggaaagggaggagcacaaggactctgtgcatcttgactgcaccccaaagaggctccaggatcaggagtgaaagattttaaagcagcctccgaagcttaacaaatgagcattccaagctcagttttgtgcaaatcgcctttctgactcttgagtaggatggaggcttaaatttaatggcgacttggggggaagggagccaccctgggggagtctgaggagttcagactgtgcccttgggaatttccactctggctttccgtgccactcttcttcctttccatcccaaaagtctcttgcggcccctgaaacttgtttctttctaaggcagggtgtgtggtacccttaggcctggactagtcctagatgcaaactcaagagcccaaggccaaggggatgtggggaagatggcaggaaagttagaagtccatgttcccttaattgtcttgttgtttattttatccaagtaccccagtgaataggggaaaaataaacacagtgaaaaaaaaaatcaaacagtggagtcttctttagtgccagtccttgtggttgaataaaaaggatggtccgctttctattgagctgagaaatctttgaagtgggagttattatctgagacattcctgcttgtcgtcctaacaacgctgatgaaacgtaaaaggttctttgtcagcgatttgttctcctctctgtcaaactccctctgccccgttagtttcaaaccgtttctaaagagataaaaatcaaacttcttttaaaacaatatccacacactgcatcaatacataactttaggtctaagtcttgctaagggataaacaaaagcaatgcctagacatcagggtcagggcctggtctggtgaagtatgcagaagttggggggccctcgggacaagctttgggacatgaggaaaagaatgcagagagggtgcaagcagaatacataccctaagtccataattgtgtttctgcttctttctgctctggtttgcattcaatcagcccaagttgggtcacatagatgggtttcctttgggtacccctcaggctcctaatattcttgcccaggatccttggaacttaagaatgcagccaagcaattgttaatatctcctgctccttcaaagccacctctgctaaaaatagacccattgtgtgtttcttctcactagcagcaatcaacaagccctttctgccgttaataagaaggagaatagctgaaggagagagatattttattaatttcctgtttccttcagaatcttggcaattgaagtttagaaggtttggtctacaacacagtgatcgaaaatgcatgtaaatgcccatccttcccttcattcacgtgtgaagttgttcattttatattgtgcccagcaaagaaactttcacccagttcaggtttccccaaaactcctgtggtggttttaaaggtggtttaaataaataaggatgtgctggtccccctactctgtgtgtgctgaataaatggcttgtaaagaagtttttccaagctgtaacccatgctgttattatagttgctgcaaaatgttcttcctgatattgattttatttgttaactgaaggtctccatatgtttgtttatattgctaatttatgagaaaatgtaataattgcaatgaatgtgaattatacagacaggcaaacattttgtaatcataattcacatatacacaaaagcctggctgaaatctttagactatttgtaccctctctacccacactgtttgtgatttatcatctgtctctttagtgtcagttaaattatgaactaacttgaaaataaaagttgtttgactgaaagtgattgttgaatgaacaacaaagttgaaagccatggcttgatcttgtaaatatataaatgtaaatgatattaaatctgtgattccttttccctccaaaggcttttgtgtacatggcgctgcatttggctattttctttggaaataaataatgtgatgtttctcttcctcttttg

SEQ ID NO: 34666 - DNA, 4017 bp, Homo sapiens
  source 1..4017: mol_type = unassigned DNA
gctcccccggctttcggagcccgggggcggcctgtggcgcgcggagcccgcgccggactgcgcctctttggaccttgaggggaaacatgcgtttgccttggatcgtttgaaattctgagtttgggatccccgcccgcccgcctgcctcttccgccccgcgggttttttccttttttccttttgctttttttccttttctccctccgggtctcctttttgactccctccccctttatgctcgcccagccctccccctgctgctgagaagtgggggagggtctcggcctccaggttcccgccccaccggggcccgggcgagcatggggggcaagcagagcacggcggcccgctcccggggccccttcccgggggtctccaccgatgacagcgccgtgccgccgccgggaggggcgccccatttcgggcactaccggacgggcggcggggccatggggctgcgcagccgctcggtcagctcggtggcaggcatgggcatggaccccagcacggccgggggggtgccctttggcctctacacccccgcctcccggggcaccggcgactccgagagggcgcccggcggcggagggtctgcgtccgactccacctatgcccatggcaatggttaccaggagacgggcggcggtcaccatagagacgggatgctgtacctgggctcccgagcctcgctggcggatgctctacctctgcacatcgcacccaggtggttcagctcgcatagtggtttcaagtgccccatttgctccaagtctgtggcttctgacgagatggaaatgcactttataatgtgtttgagcaaacctcgcctctcctacaacgatgatgtgctgactaaagacgcgggtgagtgtgtgatctgcctggaggagctgctgcagggggacacgatagccaggctgccctgcctgtgcatctatcacaaaagctgcatagactcgtggtttgaagtgaacagatcttgtccggaacaccctgcggactgacctgcgggcttgcttgctgactcctctcaaagggacagagcgcccctgctccagggaggaggctcaccggaccctggggcagagctgagcttgggacaccagcgggaacagggcaccccttctgcactgacttccagatcatggttctcccttcctccctgaggacaccaaattggatgagagcaagtttgagagaagaatgaatcaactgctatccttcccctcacccctcagcccaggagggaaagggcattttctttttcatctttgaaaggcattgtgggtctgtctttaaagtgtttacaaaaaaaaattatataaaaaaaaagtctagtgtcgactggtgttttccctcgtgatgtttacagcttgctgtttgctgcccagccataacccactcagtgacagacgaacacagctaaggcctcgctgccagccttctgacggcgggcgagcacacggtctcttcccctgccccaactggccctctccaccaccaacttctctactttgggtttgtttggttttttccctctatttttctggctggttttttgctcttttctccccttgagaccctaatatcttgacttcattgccaaaaaacaacccattgagaactttcttcctactgatcccatctcttttcccttctttcctcctggttccggtcagttcagaggatttaacaatcacaagtgtcctgcaaaaatgcctgaacattattcttaggccctcgtggattttttttttcagaaaacttaaacaaaaaaagacttactaagaaatatgtacagctacccctgttttcaggcactatgtttgagaacattttagccattgatgttcacacgtggcatcagcccatgcaagataggtttctgtatttatatattaaaatacaaaaaaaaacttataaaatgtttaaaaaaatgttcaaagcttgggagaaaagctttcttcattagtcaaggtgttttgatatggtattaaaatgtctaataaaagatggcactgcgtgattttattttaatgaagtgttatacaatcaagaaatgggggcaagggcctgccccccactccctcacctacctccttagcattccttcaggctgctactcggggctccaggtgtgtgaattggtcctcagatagtcaggcctgggtggagggagtggcaagtcaggcgtgcctcctacaagcttcctaacctcttaagcatcatggaaccagtcagccctctgtggagtcattgtgctggacctctgaaaagatctgcaggggccaagatgttgcagccaccggaggctgcaaggatgtgggttcttccaggtgtgggcccagcccccctccttccagcctttgctccccatcccacgttccactcgccctgcctgttgttcagtttgcgtctcagtgctgactcacgggcatgcttcattgaggcccaggaagaggccctggtttggggctgtgccagctcagagcccttgaaccagaaccaactgctcaggctcacaaaagttggcaaaatgcgggctgggcaggcagctcggggcagggagcagcagtgcaggcctggcctgtgtccccgtgcccagcgggctcccggagcagcattccagagcctcctgcagagccagcgaaggaaagctctagagggagacgactccaccgcctctctgctctgacccttctcaggcccgcctgatgtgctggaccatccccctgctgccacggcccctggctccgcagtcaccctccatcagatgcttccagaagcacctactctgtgcaagggcattcacaacaggccagtgggcaaacgtgagccagggccagcggagaaacactaaagaagactcggtggttcagagcctgggtctcagcgcgggacccgtctggggtgaagaccttggggctgttgtgagtcggtggcaggaacgtgggctctagactgtgcattcaggctctcctacttggcagaatgatcttggggaaacgacttcatctgaacttcagatatttcacatgtgaagcggggacaaaaccatgcagctcagaggtccctgtgggggctgggggagctgccctgcaggtcttggcacatgcacagcaggctccccatagctttgtcaccacaaagggcactgttctattcacagcacctcctgcttctgcctggcaactgtgtctccctgtgctatatttaattccaccagcaaagctggcgaggcagggcccagccctgaaggagatctccttgcctgacccctggacctggaaatggaggcttcatgtgcccgccttggcggcttaagcctgctgctttggcagtgccatgggtgagccgagcagctgtgaggtgggtggggcagggctgtagcccacgccgggtgctattccaggctctaggggctggtgctcatccccacccccagcgacttccgtcctacctggcatgctgcagccctctgccggctgtggtgtcctctgaatttggacccaggttgcctgctcttgttgtgggggtgggattggggctgtctgtgtttcccaggtggagctcatgtttgtgatcctctatctggacagctctccagaatcctgtgttgcccctgttctgcctttctgggatgggagagaaggtgagggagccggcgagcaggttctaccctctctgctaagggcctagcacactttgatgaggttcctggacgtgagaccctcacaaagaccaaccattcctctaatagccatttaacggtactgcagttcatgggaaaatgtcctcattcttaggagatagatgctggattatataggtgaatgccttcaagaaatgtgtaatttaattccaaatagttccccccaaaatacacaaagcaaataaggccaaaatgttcattgttgaatctgcagtggctggtatttcagtgaacagtgtacttgttctttcaacttttctgtatgtttggaatttttcttaataaaagattgtgggaaatggtca

SEQ ID NO: 34667 - DNA, 2222 bp, Homo sapiens
  source 1..2222: mol_type = unassigned DNA
cagcgaggggtgcctgcagccgggaccccttcctctccgcgtctcctcgtctcccgctccctcggcggggccgtggggagcgtggcgtcgggggcccgcgcggcgcagtcccccttcagcatcccgaacagcagcagcggcccgtacggctcgcaggactcggtgcacagcagccctgaggacggcggcggcggccgggaccggccggtgggcgggagccccggcgggccgcgcctggtgatcggctccttaccagctcacctctcgccgcacatgtttggaggatttaagtgccctgtatgctcaaaatttgtatcctcagatgaaatggatttgcatcttgtaatgtgtttaacaaagccacgaataacctataatgaggatgtactgagtaaagatgctggggaatgtgcaatatgccttgaagaattgcagcagggagatactatagcacgactgccttgtctatgcatatatcataaaggctgcatagatgaatggtttgaagtaaatagatcttgccctgagcacccttcagattaagcgtcagcttcctgttttataggttttcttgtcttgacaagatgcttgaaaaaccaagaggatatgaaaatctgtctctggagaaacaaagacgcaggcatactcagccagaaatctgagttttgtgagacttggtaatacagagatggacaatcgtactggggtaaaaaaaccctgctgaagagaggacagtgaccacagaactcagtgtaccaaacatgcatacaaaggacacacagggattttgaaaatgctgcacatcccttaatagtcatctacataggtaatactgataaacattttgtattcagacgccaaagttaactgatttaaaagttgatttactttttattaagttctccagagctgcacaactagttatgttttgatttgttttgttttttaatttggggtctctttgttttccccaacataatgttcataatgtttctgcattcatctgttcttaaattgaaaaacatataatttacttcttataaattgaagtcttaaatgtgaaaccaagaaatgtaatcaagcagtaaaaacatctgaatgtagaccatgatctcaagttcttccattttctcccccacgagtggaaaatagacttctacataggaaagctaaaatatgttaatatttttaaattaaaggtttaatatcagaatgcagtccaaagagcaaatcatattacataattacattttaattaaatatagaatattctactgaattgcaatttattaaatattcttatcctcttaaataaaactgctcaacagttaatcagcagtgaatcatcttgcagctatgcaatttaaaaaaaatacagattaccaatttcaagtgctgccagctaaaataactgttttaacgggtatcttttgtttgttcttttcacttaattattttattgtgctttgcatctccaggcagttctctcacatttgggtaaaatgtttagcaggctgtaaacttaagaaaagggtaaaataaaattttctggagaggaacttggaatttgagggagattttatatacctttaaaaactgtaatttaattgggatgccaggtttatagcaatttgcaactttaattttccagataatctggaggttagcatttgataaatgattttttaaagtagatatgaagattttgttaatttataatttattcatgtgttattactgtaattgaaaatgttatagacacttttaaattcagtttgtgtagaaagaaatgtgttaaacaaaattatgttaataaatattcccacataatacatctgaatggttaaaaatactggaagagttgtcagggctacaatagtgaatgtccttttttttaatatcaaaaatatcgataagtaggttttgtgttttcaacgtagggaaaatgttatcagtgaataggtggtgtactttacttggtataatttaaagttgcacagtaagtactgtttccttattttaatctttctttactcataatgtatttaagaatttgctgttttatttaacgctgctactcttaatcttctctaaatttttccccctactttcttgcttctgtttcacattttttaaaagggcaagtacaggagcaactgctgctacccagaaaaatgtgtgtattataaataattaaagagtttttaattgctttctgtatg

SEQ ID NO: 34668 - DNA, 3460 bp, Homo sapiens
  source 1..3460: mol_type = unassigned DNA
gcgggccacgtgcgggaggaggggccgccttctggttggcgcccggtgtccgttcctcctatcggcgtaggccccgcgaggaagacaagggcgcgccctggctgggagggcgtggccagagacctgtccatcaccgagtccacgagtggcagcacctaccacaccgcagtaccttggcgaggcggagcaggggcaggcaggtcgcggaagggggaggcggagcaaggccggcgggagccaatcggcctggcggcacgagggggcgggggcggggtcaacgcgcgcgacccaaacacacgggccgggcgcaccctgcagccgcgccgctccgcggccttccggcgcggggccggggaacctcctccccatctgcgcaccccccgccttcgcggcccagatcctcccgccagcccggcccctccttcgcagggggagcgaggcgacggttgccgggaagcgcgcgccacctctccctcccatttttcgttctcccctcgcgcgccacccgtttttcctctttctccgttaataacagctgggtggctgggggaggagggaaggtggccccggcggagtctgggcgggcgcctcccactcagccgccagccgccgtgggagccggaggatggcggcggtagcagcggccgcccgagaggaggcggtgccgagatcgggggcgccgagcgcggcagcagagagcggtagcggcccgtcgtggcgcaccagaaccgaaaccagcggcagccgcacggccacttgagccgccccttcctgctggagccagcgaggggtgcctgcagccgggaccccttcctctccgcgtctcctcgtctcccgcgcccgcgtcaggccgtcggcctcgcccgccgccccaagaagagcgcgccgggcgccgactgcccctctggacgccgggcggcggccctggacgtgcgggggcctctctgggccggccgcggcgcctgggccctgccctctagctcccgcgctcgctcccgccctcccggctctcggggcgcagcgcgcgggcccggcccggggcagggcggacatgggcgccaaacagagcggcccggccgccgctaacggccgcacgcgcgcgtactcgggctcggatctaccttccagtagcagcggaggcgccaatgggaccgcgggcggcggcgggggcgctcgggccgccgccgcggggaggttcccggctcaggtgcccagcgcgcaccagcccagcgcctccggcggcgccgcggcggccgcggcggccccggcagccccggcggccccgcgcagccgctccctcggcggggccgtggggagcgtggcgtcgggggcccgcgcggcgcagtcccccttcagcatcccgaacagcagcagcggcccgtacggctcgcaggactcggtgcacagcagccctgaggacggcggcggcggccgggaccggccggtgggcgggagccccggcgggccgcgcctggtgatcggctccttaccagctcacctctcgccgcacatgtttggaggatttaagtgccctgtatgctcaaaatttgtatcctcagatgaaatggatttgcatcttgtaatgtgtttaacaaagccacgaataacctataatgaggatgtactgagtaaagatgctggggaatgtgcaatatgccttgaagaattgcagcagggagatactatagcacgactgccttgtctatgcatatatcataaaggctgcatagatgaatggtttgaagtaaatagatcttgccctgagcacccttcagattaagcgtcagcttcctgttttataggttttcttgtcttgacaagatgcttgaaaaaccaagaggatatgaaaatctgtctctggagaaacaaagacgcaggcatactcagccagaaatctgagttttgtgagacttggtaatacagagatggacaatcgtactggggtaaaaaaaccctgctgaagagaggacagtgaccacagaactcagtgtaccaaacatgcatacaaaggacacacagggattttgaaaatgctgcacatcccttaatagtcatctacataggtaatactgataaacattttgtattcagacgccaaagttaactgatttaaaagttgatttactttttattaagttctccagagctgcacaactagttatgttttgatttgttttgttttttaatttggggtctctttgttttccccaacataatgttcataatgtttctgcattcatctgttcttaaattgaaaaacatataatttacttcttataaattgaagtcttaaatgtgaaaccaagaaatgtaatcaagcagtaaaaacatctgaatgtagaccatgatctcaagttcttccattttctcccccacgagtggaaaatagacttctacataggaaagctaaaatatgttaatatttttaaattaaaggtttaatatcagaatgcagtccaaagagcaaatcatattacataattacattttaattaaatatagaatattctactgaattgcaatttattaaatattcttatcctcttaaataaaactgctcaacagttaatcagcagtgaatcatcttgcagctatgcaatttaaaaaaaatacagattaccaatttcaagtgctgccagctaaaataactgttttaacgggtatcttttgtttgttcttttcacttaattattttattgtgctttgcatctccaggcagttctctcacatttgggtaaaatgtttagcaggctgtaaacttaagaaaagggtaaaataaaattttctggagaggaacttggaatttgagggagattttatatacctttaaaaactgtaatttaattgggatgccaggtttatagcaatttgcaactttaattttccagataatctggaggttagcatttgataaatgattttttaaagtagatatgaagattttgttaatttataatttattcatgtgttattactgtaattgaaaatgttatagacacttttaaattcagtttgtgtagaaagaaatgtgttaaacaaaattatgttaataaatattcccacataatacatctgaatggttaaaaatactggaagagttgtcagggctacaatagtgaatgtccttttttttaatatcaaaaatatcgataagtaggttttgtgttttcaacgtagggaaaatgttatcagtgaataggtggtgtactttacttggtataatttaaagttgcacagtaagtactgtttccttattttaatctttctttactcataatgtatttaagaatttgctgttttatttaacgctgctactcttaatcttctctaaatttttccccctactttcttgcttctgtttcacattttttaaaagggcaagtacaggagcaactgctgctacccagaaaaatgtgtgtattataaataattaaagagtttttaattgctttctgtatga

SEQ ID NO: 34669 - DNA, 6541 bp, Homo sapiens
  source 1..6541: mol_type = unassigned DNA
gcggccgcggggcccggcgcggcgcgggccaaggagacggcgttcgtggaggtggtgctgttcgagtcgagcccaagcggcgattacaccacctacaccaccggcctcacgggccgcttctcgcgggccggggccacgctcagcgccgagggcgagatcgtgcagatgcacccactgggcctatgtaataacaatgacgaagaggacttgtatgaatatggctgggtaggagtggtgaagctggaacagccagaattggacccgaaaccatgcctcactgtcctaggcaaggccaagcgagcagtacagcggggagctactgcagtcatctttgatgtgtctgaaaacccagaagctattgatcagctgaaccagggctctgaagacccgctcaagaggccggtggtgtatgtgaagggtgcagatgccattaagctgatgaacatcgtcaacaagcagaaagtggctcgagcaaggatccagcaccgccctcctcgacaacccactgaatactttgacatggggattttcctggctttcttcgtcgtggtctccttggtctgcctcatcctccttgtcaaaatcaagctgaagcagcgacgcagtcagaattccatgaacaggctggctgtgcaggctctagagaagatggaaaccagaaagttcaactccaagagcaaggggcgccgggaggggagctgtggggccctggacacactcagcagcagctccacgtccgactgtgccatctgtctggagaagtacattgatggagaggagctgcgggtcatcccctgtactcaccggtttcacaggaagtgcgtggacccctggctgctgcagcaccacacctgcccccactgtcggcacaacatcatagaacaaaagggaaacccaagcgcggtgtgtgtggagaccagcaacctctcacgtggtcggcagcagagggtgaccctgccggtgcattaccccggccgcgtgcacaggaccaacgccatcccagcctaccctacgaggacaagcatggactcccacggcaaccccgtcaccttgctgaccatggaccggcacggggagcagagcctctattccccgcagacccccgcctacatccgcagctacccacccctccacctggaccacagcctggccgctcaccgctgcggcctggagcaccgggcctactccccagcccaccccttccgcaggcccaagttgagtggccgcagcttctccaaggcagcttgcttctcccagtatgagaccatgtaccagcactactacttccagggcctcagctacccggagcaggaggggcagtccccacctagcctcgcaccccggggcccggcccgtgcctttcctccgagcggcagtggcagcctgctcttccccaccgtggtgcacgtggccccgccctcccacctggagagcggcagcacgtccagcttcagctgctatcacggccaccgctcggtgtgcagtggctacctggccgactgcccaggcagcgacagcagcagcagcagcagctccggccagtgccactgttcctccagtgactctgtggtagactgcactgaggtcagcaaccagggcgtgtacgggagctgctccaccttccgcagctccctcagcagcgactatgaccccttcatctaccgcagccggagcccctgtcgtgccagtgaggcggggggctcgggcagctcgggccggggacctgccctgtgcttcgagggctccccgcctcccgaggagctcccggcggtgcacagtcatggtgctgggcggggcgagccttggccgggccctgcctctccctcgggggatcaggtgtccacctgcagcctggagatgaactacagcagcaactcctccctggagcacagggggcccaatagctctacctcagaagtggggctcgaggcttctcctggggccgcccctgacctcaggaggacctggaaggggggccacgagttgccgtcgtgtgcctgctgctgcgagccccagccctccccagccgggcctagcgccggagcagctggcagcagcaccttgttcctggggccccacctctacgagggctctggcccggcgggtggggagccccagtcaggaagctcccagggcttgtacggccttcaccccgaccatttgcccaggacagatggggtgaaatacgagggtctgccctgctgcttctatgaagagaagcaggtggcccgcgggggcggagggggcagcggctgctacactgaggactactcggtgagtgtgcagtacacgctcaccgaggaaccaccgcccggctgctaccccggggcccgggacctgagccagcgcatccccatcattccagaggatgtggactgtgatctgggcctgccctcggactgccaagggacccacagcctcggctcctggggtgggacgcgaggcccggataccccacggccccacaggggcctgggagcaacccgggaagaggagcgggctctgtgctgccaggctagggccctactgcggcctggctgccctccggaggaggcgggtgctgtcagggccaacttccctagtgccctccaggacactcaggagtccagcaccactgccactgaggctgcaggaccgagatctcactcagcagacagcagcagcccgggagcctgagctcaggaggaactcttacctggaaattgggaactgtatggagactccaaactgacttctttcaaaaaacaaaaacaaaaaatttttttagctttgacaaacacacaaaagtggtaataaagagagccctccttgtcaacccaaaatgtgagccccctgtggcaaaaccaccccctaccccattaacaaatcaacagacaaaattctccgagtcctttgcctcttttgataacatgttgttctgttttgtaaagtgtgtgtgcttggggttccgaggtgtgggattgagttctctgctttgtttttttttaagatattgtatgtaaatgtaaaaagttatttaaatatatattttaaagaaccctaactgccaacttttgctgaaaaagaaaaaaaaatcactgctgcattaaatgaaccacatcatgtgtagatactgttgtctccctgaagggagctcaggcctttgaaaagctcagggcttcacctgccttagaaaatgaaccagaaacttgaagtaaagctagttgataggggtacaggctctgaggagcagtgcaaaactgcctctttctttctcgtggcaaatcccaatgtacacgatttcaggtctcagacgccatgcctctccagcccacgcctttaggcaggtgatggcagcagctaggaatagggtgtacatgatccacagccctgcggagccaggtcaagccgctgctatgaaagctccagggtgatggggacgattctgcccagtgtcctcagtctgtcccctcaggtcatggtcccaagtgaaatgacagagttcacagccctggtcttggctgaggtccaggtcatagtaagggcatgttcttggggccctcgacctgaactctgaccctccgggcagggaagaggaggttgtcccctttggttgtcctggctttggagtcctttgcaaaaatattttgggccccctgccactggctgcagaaatggctcgacggggtgtgtggggacagacacccagaaggaatgtacttttgtggccttggtgtccgatggggctgggggagagtgctctccactgacccagcagcacacccatgtgcagtgcgcctgcatctgtgtgggggcagccacaccccttggctgctgcttccttgggctgcctttctgggggcatgtgactggacctacgaggtctgcactgagctccatttgaatgatacctttcctatcccatttcccccacggaagcaccgcttcagggttattcagtcctctgcctcatggctgaaattgctcatctcgtctgcagatgtctactatcctgtctacctaatgcactattatgtattgattctccatgagacagagagagagagagactatcagatagtttacacccaaagggtaggtttttgtatatttttccagccttttttattaaggggaaggggagagtttaaaaacccaaaccgttgtggttttaaggtgtttcatttttaaaagggagagagaatctatttaaagctatttcagatcagggattgtcatccttttttgtccaatgtattccttgttctttaaaaaaattttttttagaggaaactaatattagtctttgtgttcactaactcttctggtcacttgtatttatttattcattcattcatcagatatttgttgccatctgaaagaactggcccagtgggtctgaaagctcgcttgagaataggaaacttgagacctggccccctgtgggtaggagaacaaggaccacctgggttctccagtcttgaacgagaatctcactcttatcagaatgtttttcttaacctcagcgtatgatgaggaaatttacttatctctagctaggatttgacaaattccaacatcaaatgatcaaaacatttgccactgaggcttcactggtgagatccgttctccgtcctcgggtgcagtcccttgggggctgctcctcggactgcgccccgcacacctgttatcgagggtgtgagaagcgcctaagctggtgacatgtgatctgggacgccttcatttctcgggccaggagtagcagctgctaaggacagcagcttgcattgcgtggttttagggaagcagggtctggcttttaatatgaactgcaaaaagcagcttctcactgatatttttttgttgttgtttctggggggtttttttgttttgtttttaatgcctttgagtgcatattttcttcctcgtctgaaaccgaactcccaaagtggctttctttagccctggctggaaaaccacctctcaatagccttaagcaataaatagatgagtagagaatgtggcttcaactgggcttattaaagtaagtgtgtctagttttcacttgaacaagtgatagctgcagatggcgaaagaaacccatttaatttttgtagcttacaggtggtagaaacaaaaatgcaattttaaaaccttaaataccaaataccaaccattgccttttttttttttgagatggaattttgctcttgtcacccaggctggagtgcaatggcgcgatctcacctcactgcaacctctgcctcccgggtccaagtgattctcctgcctcagcctcccaagtagctgggattacaggcatgcgccaccacacccagctaattttgtatttttggtagagacagggtatctccatgttggtcaggctggtcttggattcccgacctcaggtgatccgcccacctcggcctcccaaagtgctgggattacaggcgtgagccaccatgcctgcccagcaataccaaccattgtcttttaaattcgtgttggcttctcagacagggagatcactggaataaaataaccgatggtcttattttgtcacacgtaaatcaaaagaaatgtcctctttgaagttgtaagactccaccaatgacagacacccttttcggtggactctgagtggtgtgtagtggttttatagccatggaaactaggagtatctcactttccactgagaacccctgcccccaatccctctaagttggggtgtggcagttgggcagggtcaagtgacccagccctggctgtaggacagccatatacagtgaagagttctagaaccagctaaaaatggaagtttgggtgtttaccaacaaggtacctctttatggatgcagccccagtaagctggctttaactctcagctccttccctgtctcctcctaatccaagcccttttataaaataaagccccttctgtcccactgctcacatacttatgtgctgctagtctctactcgaagttcgtgcaggactaatgcttttaaaatgaggtctaaaaaataattactagtcgagactattattctttaaacagaactgcctttttctactctttatgtaaactctttctattgtgttggtctaacaaggcactattttaaaattttttaatttttcccatagcacttaaaagagattttgtaaagaccttgctgtaaagattttgtaataaaatggtctaagggctctttttccaacattaccatttttaaaaaatgttttaaaagctagaagacaacttatgtatattctgtatatgtatagcagcacatttcatttatggaaatatgttctcagaatatttatttactaatatatttatcttaagccatgtcttatgttgagagtgtgacattgttggaataatcattgaaaatgactaacacaagaccctgtaaatacatgataattgcacacagattttacatatttgcagaccaaaaatgatttaaaacaagttgtagtcttctatggttttgtaacaaattgtacacatgactgtaaaaaaaaaatacaattttatcaagtatgtgtt

SEQ ID NO: 34670 - DNA, 2667 bp, Homo sapiens
  source 1..2667: mol_type = unassigned DNA
gcacagaagtttgctgcatcactggtgagctggggagtgtcctgtgtggtgtccacttaatcttactaggaaggatcccctcatttcaacaagatgcacccactgggcctatgtaataacaatgacgaagaggacttgtatgaatatggctgggtaggagtggtgaagctggaacagccagaattggacccgaaaccatgcctcactgtcctaggcaaggccaagcgagcagtacagcggggagctactgcagtcatctttgatgtgtctgaaaacccagaagctattgatcagctgaaccagggctctgaagacccgctcaagaggccggtggtgtatgtgaagggtgcagatgccattaagctgatgaacatcgtcaacaagcagaaagtggctcgagcaaggatccagcaccgccctcctcgacaacccactgaatactttgacatggggattttcctggctttcttcgtcgtggtctccttggtctgcctcatcctccttgtcaaaatcaagctgaagcagcgacgcagtcagaattccatgaacaggctggctgtgcaggctctagagaagatggaaaccagaaagttcaactccaagagcaaggggcgccgggaggggagctgtggggccctggacacactcagcagcagctccacgtccgactgtgccatctgtctggagaagtacattgatggagaggagctgcgggtcatcccctgtactcaccggtttcacaggaagtgcgtggacccctggctgctgcagcaccacacctgcccccactgtcggcacaacatcatagaacaaaagggaaacccaagcgcggtgtgtgtggagaccagcaacctctcacgtggtcggcagcagagggtgaccctgccggtgcattaccccggccgcgtgcacaggaccaacgccatcccagcctaccctacgaggacaagcatggactcccacggcaaccccgtcaccttgctgaccatggaccggcacggggagcagagcctctattccccgcagacccccgcctacatccgcagctacccacccctccacctggaccacagcctggccgctcaccgctgcggcctggagcaccgggcctactccccagcccaccccttccgcaggcccaagttgagtggccgcagcttctccaaggcagcttgcttctcccagtatgagaccatgtaccagcactactacttccagggcctcagctacccggagcaggaggggcagtccccacctagcctcgcaccccggggcccggcccgtgcctttcctccgagcggcagtggcagcctgctcttccccaccgtggtgcacgtggccccgccctcccacctggagagcggcagcacgtccagcttcagctgctatcacggccaccgctcggtgtgcagtggctacctggccgactgcccaggcagcgacagcagcagcagcagcagctccggccagtgccactgttcctccagtgactctgtggtagactgcactgaggtcagcaaccagggcgtgtacgggagctgctccaccttccgcagctccctcagcagcgactatgaccccttcatctaccgcagccggagcccctgtcgtgccagtgaggcggggggctcgggcagctcgggccggggacctgccctgtgcttcgagggctccccgcctcccgaggagctcccggcggtgcacagtcatggtgctgggcggggcgagccttggccgggccctgcctctccctcgggggatcaggtgtccacctgcagcctggagatgaactacagcagcaactcctccctggagcacagggggcccaatagctctacctcagaagtggggctcgaggcttctcctggggccgcccctgacctcaggaggacctggaaggggggccacgagttgccgtcgtgtgcctgctgctgcgagccccagccctccccagccgggcctagcgccggagcagctggcagcagcaccttgttcctggggccccacctctacgagggctctggcccggcgggtggggagccccagtcaggaagctcccagggcttgtacggccttcaccccgaccatttgcccaggacagatggggtgaaatacgagggtctgccctgctgcttctatgaagagaagcaggtggcccgcgggggcggagggggcagcggctgctacactgaggactactcggtgagtgtgcagtacacgctcaccgaggaaccaccgcccggctgctaccccggggcccgggacctgagccagcgcatccccatcattccagaggatgtggactgtgatctgggcctgccctcggactgccaagggacccacagcctcggctcctggggtgggacgcgaggcccggataccccacggccccacaggggcctgggagcaacccgggaagaggagcgggctctgtgctgccaggctagggccctactgcggcctggctgccctccggaggaggcgggtgctgtcagggccaacttccctagtgccctccaggacactcaggagtccagcaccactgccactgaggctgcaggaccgagatctcactcagcagacagcagcagcccgggagcctgagctcaggaggaactcttacctggaaattgggaactgtatggagactccaaactgacttctttc

SEQ ID NO: 34671 - DNA, 2878 bp, Homo sapiens
  source 1..2878: mol_type = unassigned DNA
ttttctttccattttatttcctagatgcacccactgggcctatgtaataacaatgacgaagaggacttgtatgaatatggctgggtaggagtggtgaagctggaacagccagaattggacccgaaaccatgcctcactgtcctaggcaaggccaagcgagcagtacagcggggagctactgcagtcatctttgatgtgtctgaaaacccagaagctattgatcagctgaaccagggctctgaagacccgctcaagaggccggtggtgtatgtgaagggtgcagatgccattaagctgatgaacatcgtcaacaagcagaaagtggctcgagcaaggatccagcaccgccctcctcgacaacccactgaatactttgacatggggattttcctggctttcttcgtcgtggtctccttggtctgcctcatcctccttgtcaaaatcaagctgaagcagcgacgcagtcagaattccatgaacaggctggctgtgcaggctctagagaagatggaaaccagaaagttcaactccaagagcaaggggcgccgggaggggagctgtggggccctggacacactcagcagcagctccacgtccgactgtgccatctgtctggagaagtacattgatggagaggagctgcgggtcatcccctgtactcaccggtttcacaggaagtgcgtggacccctggctgctgcagcaccacacctgcccccactgtcggcacaacatcatagaacaaaagggaaacccaagcgcggtgtgtgtggagaccagcaacctctcacgtggtcggcagcagagggtgaccctgccggtgcattaccccggccgcgtgcacaggaccaacgccatcccagcctaccctacgaggacaagcatggactcccacggcaaccccgtcaccttgctgaccatggaccggcacggggagcagagcctctattccccgcagacccccgcctacatccgcagctacccacccctccacctggaccacagcctggccgctcaccgctgcggcctggagcaccgggcctactccccagcccaccccttccgcaggcccaagttgagtggccgcagcttctccaaggcagcttgcttctcccagtatgagaccatgtaccagcactactacttccagggcctcagctacccggagcaggaggggcagtccccacctagcctcgcaccccggggcccggcccgtgcctttcctccgagcggcagtggcagcctgctcttccccaccgtggtgcacgtggccccgccctcccacctggagagcggcagcacgtccagcttcagctgctatcacggccaccgctcggtgtgcagtggctacctggccgactgcccaggcagcgacagcagcagcagcagcagctccggccagtgccactgttcctccagtgactctgtggtagactgcactgaggtcagcaaccagggcgtgtacgggagctgctccaccttccgcagctccctcagcagcgactatgaccccttcatctaccgcagccggagcccctgtcgtgccagtgaggcggggggctcgggcagctcgggccggggacctgccctgtgcttcgagggctccccgcctcccgaggagctcccggcggtgcacagtcatggtgctgggcggggcgagccttggccgggccctgcctctccctcgggggatcaggtgtccacctgcagcctggagatgaactacagcagcaactcctccctggagcacagggggcccaatagctctacctcagaagtggggctcgaggcttctcctggggccgcccctgacctcaggaggacctggaaggggggccacgagttgccgtcgtgtgcctgctgctgcgagccccagccctccccagccgggcctagcgccggagcagctggcagcagcaccttgttcctggggccccacctctacgagggctctggcccggcgggtggggagccccagtcaggaagctcccagggcttgtacggccttcaccccgaccatttgcccaggacagatggggtgaaatacgagggtctgccctgctgcttctatgaagagaagcaggtggcccgcgggggcggagggggcagcggctgctacactgaggactactcggtgagtgtgcagtacacgctcaccgaggaaccaccgcccggctgctaccccggggcccgggacctgagccagcgcatccccatcattccagaggatgtggactgtgatctgggcctgccctcggactgccaagggacccacagcctcggctcctggggtgggacgcgaggcccggataccccacggccccacaggggcctgggagcaacccgggaagaggagcgggctctgtgctgccaggctagggccctactgcggcctggctgccctccggaggaggcgggtgctgtcagggccaacttccctagtgccctccaggacactcaggagtccagcaccactgccactgaggctgcaggaccgagatctcactcagcagacagcagcagcccgggagcctgagctcaggaggaactcttacctggaaattgggaactgtatggagactccaaactgacttctttcaaaaaacaaaaacaaaaaatttttttagctttgacaaacacacaaaagtggtaataaagagagccctccttgtcaacccaaaatgtgagccccctgtggcaaaaccaccccctaccccattaacaaatcaacagacaaaattctccgagtcctttgcctcttttgataacatgttgttctgttttgtaaagtgtgtgtgcttggggttccgaggtgtgggattgagttctctgctttgtttttttttaagatattgtatgtaaatgtaaaaagttattta

SEQ ID NO: 34672 - DNA, 6539 bp, Homo sapiens
  source 1..6539: mol_type = unassigned DNA
gcggccgcggggcccggcgcggcgcgggccaaggagacggcgttcgtggaggtggtgctgttcgagtcgagcccaagcggcgattacaccacctacaccaccggcctcacgggccgcttctcgcgggccggggccacgctcagcgccgagggcgagatcgtgcagatgcacccactgggcctatgtaataacaatgacgaagaggacttgtatgaatatggctgggtaggagtggtgaagctggaacagccagaattggacccgaaaccatgcctcactgtcctaggcaaggccaagcgagcagtacagcggggagctactgcagtcatctttgatgtgtctgaaaacccagaagctattgatcagctgaaccagggctctgaagacccgctcaagaggccggtggtgtatgtgaagggtgcagatgccattaagctgatgaacatcgtcaacaagcagaaagtggctcgagcaaggatccagcaccgccctcctcgacaacccactgaatactttgacatggggattttcctggctttcttcgtcgtggtctccttggtctgcctcatcctccttgtcaaaatcaagctgaagcagcgacgcagtcagaattccatgaacaggctggctgtgcaggctctagagaagatggaaaccagaaagttcaactccaagagcaaggggcgccgggaggggagctgtggggccctggacacactcagcagcagctccacgtccgactgtgccatctgtctggagaagtacattgatggagaggagctgcgggtcatcccctgtactcaccggtttcacaggaagtgcgtggacccctctgctgcagcaccacacctgcccccactgtcggcacaacatcatagaacaaaagggaaacccaagcgcggtgtgtgtggagaccagcaacctctcacgtggtcggcagcagagggtgaccctgccggtgcattaccccggccgcgtgcacaggaccaacgccatcccagcctaccctacgaggacaagcatggactcccacggcaaccccgtcaccttgctgaccatggaccggcacggggagcagagcctctattccccgcagacccccgcctacatccgcagctacccacccctccacctggaccacagcctggccgctcaccgctgcggcctggagcaccgggcctactccccagcccaccccttccgcaggcccaagttgagtggccgcagcttctccaaggcagcttgcttctcccagtatgagaccatgtaccagcactactacttccagggcctcagctacccggagcaggaggggcagtccccacctagcctcgcaccccggggcccggcccgtgcctttcctccgagcggcagtggcagcctgctcttccccaccgtggtgcacgtggccccgccctcccacctggagagcggcagcacgtccagcttcagctgctatcacggccaccgctcggtgtgcagtggctacctggccgactgcccaggcagcgacagcagcagcagcagcagctccggccagtgccactgttcctccagtgactctgtggtagactgcactgaggtcagcaaccagggcgtgtacgggagctgctccaccttccgcagctccctcagcagcgactatgaccccttcatctaccgcagccggagcccctgtcgtgccagtgaggcggggggctcgggcagctcgggccggggacctgccctgtgcttcgagggctccccgcctcccgaggagctcccggcggtgcacagtcatggtgctgggcggggcgagccttggccgggccctgcctctccctcgggggatcaggtgtccacctgcagcctggagatgaactacagcagcaactcctccctggagcacagggggcccaatagctctacctcagaagtggggctcgaggcttctcctggggccgcccctgacctcaggaggacctggaaggggggccacgagttgccgtcgtgtgcctgctgctgcgagccccagccctccccagccgggcctagcgccggagcagctggcagcagcaccttgttcctggggccccacctctacgagggctctggcccggcgggtggggagccccagtcaggaagctcccagggcttgtacggccttcaccccgaccatttgcccaggacagatggggtgaaatacgagggtctgccctgctgcttctatgaagagaagcaggtggcccgcgggggcggagggggcagcggctgctacactgaggactactcggtgagtgtgcagtacacgctcaccgaggaaccaccgcccggctgctaccccggggcccgggacctgagccagcgcatccccatcattccagaggatgtggactgtgatctgggcctgccctcggactgccaagggacccacagcctcggctcctggggtgggacgcgaggcccggataccccacggccccacaggggcctgggagcaacccgggaagaggagcgggctctgtgctgccaggctagggccctactgcggcctggctgccctccggaggaggcgggtgctgtcagggccaacttccctagtgccctccaggacactcaggagtccagcaccactgccactgaggctgcaggaccgagatctcactcagcagacagcagcagcccgggagcctgagctcaggaggaactcttacctggaaattgggaactgtatggagactccaaactgacttctttcaaaaaacaaaaacaaaaaatttttttagctttgacaaacacacaaaagtggtaataaagagagccctccttgtcaacccaaaatgtgagccccctgtggcaaaaccaccccctaccccattaacaaatcaacagacaaaattctccgagtcctttgcctcttttgataacatgttgttctgttttgtaaagtgtgtgtgcttggggttccgaggtgtgggattgagttctctgctttgtttttttttaagatattgtatgtaaatgtaaaaagttatttaaatatatattttaaagaaccctaactgccaacttttgctgaaaaagaaaaaaaaatcactgctgcattaaatgaaccacatcatgtgtagatactgttgtctccctgaagggagctcaggcctttgaaaagctcagggcttcacctgccttagaaaatgaaccagaaacttgaagtaaagctagttgataggggtacaggctctgaggagcagtgcaaaactgcctctttctttctcgtggcaaatcccaatgtacacgatttcaggtctcagacgccatgcctctccagcccacgcctttaggcaggtgatggcagcagctaggaatagggtgtacatgatccacagccctgcggagccaggtcaagccgctgctatgaaagctccagggtgatggggacgattctgcccagtgtcctcagtctgtcccctcaggtcatggtcccaagtgaaatgacagagttcacagccctggtcttggctgaggtccaggtcatagtaagggcatgttcttggggccctcgacctgaactctgaccctccgggcagggaagaggaggttgtcccctttggttgtcctggctttggagtcctttgcaaaaatattttgggccccctgccactggctgcagaaatggctcgacggggtgtgtggggacagacacccagaaggaatgtacttttgtggccttggtgtccgatggggctgggggagagtgctctccactgacccagcagcacacccatgtgcagtgcgcctgcatctgtgtgggggcagccacaccccttggctgctgcttccttgggctgcctttctgggggcatgtgactggacctacgaggtctgcactgagctccatttgaatgatacctttcctatcccatttcccccacggaagcaccgcttcagggttattcagtcctctgcctcatggctgaaattgctcatctcgtctgcagatgtctactatcctgtctacctaatgcactattatgtattgattctccatgagacagagagagagagagactatcagatagtttacacccaaagggtaggtttttgtatatttttccagccttttttattaaggggaaggggagagtttaaaaacccaaaccgttgtggttttaaggtgtttcatttttaaaagggagagagaatctatttaaagctatttcagatcagggattgtcatccttttttgtccaatgtattccttgttctttaaaaaaattttttttagaggaaactaatattagtctttgtgttcactaactcttctggtcacttgtatttatttattcattcattcatcagatatttgttgccatctgaaagaactggcccagtgggtctgaaagctcgcttgagaataggaaacttgagacctggccccctgtgggtaggagaacaaggaccacctgggttctccagtcttgaacgagaatctcactcttatcagaatgtttttcttaacctcagcgtatgatgaggaaatttacttatctctagctaggatttgacaaattccaacatcaaatgatcaaaacatttgccactgaggcttcactggtgagatccgttctccgtcctcgggtgcagtcccttgggggctgctcctcggactgcgccccgcacacctgttatcgagggtgtgagaagcgcctaagctggtgacatgtgatctgggacgccttcatttctcgggccaggagtagcagctgctaaggacagcagcttgcattgcgtggttttagggaagcagggtctggcttttaatatgaactgcaaaaagcagcttctcactgatatttttttgttgttgtttctggggggtttttttgttttgtttttaatgcctttgagtgcatattttcttcctcgtctgaaaccgaactcccaaagtggctttctttagccctggctggaaaaccacctctcaatagccttaagcaataaatagatgagtagagaatgtggcttcaactgggcttattaaagtaagtgtgtctagttttcacttgaacaagtgatagctgcagatggcgaaagaaacccatttaatttttgtagcttacaggtggtagaaacaaaaatgcaattttaaaaccttaaataccaaataccaaccattgccttttttttttttgagatggaattttgctcttgtcacccaggctggagtgcaatggcgcgatctcacctcactgcaacctctgcctcccgggtccaagtgattctcctgcctcagcctcccaagtagctgggattacaggcatgcgccaccacacccagctaattttgtatttttggtagagacagggtatctccatgttggtcaggctggtcttggattcccgacctcaggtgatccgcccacctcggcctcccaaagtgctgggattacaggcgtgagccaccatgcctgcccagcaataccaaccattgtcttttaaattcgtgttggcttctcagacagggagatcactggaataaaataaccgatggtcttattttgtcacacgtaaatcaaaagaaatgtcctctttgaagttgtaagactccaccaatgacagacacccttttcggtggactctgagtggtgtgtagtggttttatagccatggaaactaggagtatctcactttccactgagaacccctgcccccaatccctctaagttggggtgtggcagttgggcagggtcaagtgacccagccctggctgtaggacagccatatacagtgaagagttctagaaccagctaaaaatggaagtttgggtgtttaccaacaaggtacctctttatggatgcagccccagtaagctggctttaactctcagctccttccctgtctcctcctaatccaagcccttttataaaataaagccccttctgtcccactgctcacatacttatgtgctgctagtctctactcgaagttcgtgcaggactaatgcttttaaaatgaggtctaaaaaataattactagtcgagactattattctttaaacagaactgcctttttctactctttatgtaaactctttctattgtgttggtctaacaaggcactattttaaaattttttaatttttcccatagcacttaaaagagattttgtaaagaccttgctgtaaagattttgtaataaaatggtctaagggctctttttccaacattaccatttttaaaaaatgttttaaaagctagaagacaacttatgtatattctgtatatgtatagcagcacatttcatttatggaaatatgttctcagaatatttatttactaatatatttatcttaagccatgtcttatgttgagagtgtgacattgttggaataatcattgaaaatgactaacacaagaccctgtaaatacatgataattgcacacagattttacatatttgcagaccaaaaatgatttaaaacaagttgtagtcttctatggttttgtaacaaattgtacacatgactgtaaaaaaaaaatacaattttatcaagtatgtgtt

SEQ ID NO: 34673 - DNA, 6851 bp, Homo sapiens
  source 1..6851: mol_type = unassigned DNA
agatgaaagggccgcggcgcgacggccgggggagccgagctgagcctgcgacccacaaagccgccgccgccgccgccgtgatggggctgtgaggcgtccgcccgcgttcggtcctcagccggcccgcgactatgcccggccgcgcccgccctccgcgccctcccgccgcaggaccatgaggccgcgctcgggcgggcgcccaggggccacgggccgccgccgccgccgcctgcgccgccgcccccgcggcctccggtgcagccgcctgccgccgccgccgccgctgccgctgctgctcgggctgctgctggcggccgcggggcccggcgcggcgcgggccaaggagacggcgttcgtggaggtggtgctgttcgagtcgagcccaagcggcgattacaccacctacaccaccggcctcacgggccgcttctcgcgggccggggccacgctcagcgccgagggcgagatcgtgcagatgcacccactgggcctatgtaataacaatgacgaagaggacttgtatgaatatggctgggtaggagtggtgaagctggaacagccagaattggacccgaaaccatgcctcactgtcctaggcaaggccaagcgagcagtacagcggggagctactgcagtcatctttgatgtgtctgaaaacccagaagctattgatcagctgaaccagggctctgaagacccgctcaagaggccggtggtgtatgtgaagggtgcagatgccattaagctgatgaacatcgtcaacaagcagaaagtggctcgagcaaggatccagcaccgccctcctcgacaacccactgaatactttgacatggggattttcctggctttcttcgtcgtggtctccttggtctgcctcatcctccttgtcaaaatcaagctgaagcagcgacgcagtcagaattccatgaacaggctggctgtgcaggctctagagaagatggaaaccagaaagttcaactccaagagcaaggggcgccgggaggggagctgtggggccctggacacactcagcagcagctccacgtccgactgtgccatctgtctggagaagtacattgatggagaggagctgcgggtcatcccctgtactcaccggtttcacaggaagtgcgtggacccctggctgctgcagcaccacacctgcccccactgtcggcacaacatcatagaacaaaagggaaacccaagcgcggtgtgtgtggagaccagcaacctctcacgtggtcggcagcagagggtgaccctgccggtgcattaccccggccgcgtgcacaggaccaacgccatcccagcctaccctacgaggacaagcatggactcccacggcaaccccgtcaccttgctgaccatggaccggcacggggagcagagcctctattccccgcagacccccgcctacatccgcagctacccacccctccacctggaccacagcctggccgctcaccgctgcggcctggagcaccgggcctactccccagcccaccccttccgcaggcccaagttgagtggccgcagcttctccaaggcagcttgcttctcccagtatgagaccatgtaccagcactactacttccagggcctcagctacccggagcaggaggggcagtccccacctagcctcgcaccccggggcccggcccgtgcctttcctccgagcggcagtggcagcctgctcttccccaccgtggtgcacgtggccccgccctcccacctggagagcggcagcacgtccagcttcagctgctatcacggccaccgctcggtgtgcagtggctacctggccgactgcccaggcagcgacagcagcagcagcagcagctccggccagtgccactgttcctccagtgactctgtggtagactgcactgaggtcagcaaccagggcgtgtacgggagctgctccaccttccgcagctccctcagcagcgactatgaccccttcatctaccgcagccggagcccctgtcgtgccagtgaggcggggggctcgggcagctcgggccggggacctgccctgtgcttcgagggctccccgcctcccgaggagctcccggcggtgcacagtcatggtgctgggcggggcgagccttggccgggccctgcctctccctcgggggatcaggtgtccacctgcagcctggagatgaactacagcagcaactcctccctggagcacagggggcccaatagctctacctcagaagtggggctcgaggcttctcctggggccgcccctgacctcaggaggacctggaaggggggccacgagttgccgtcgtgtgcctgctgctgcgagccccagccctccccagccgggcctagcgccggagcagctggcagcagcaccttgttcctggggccccacctctacgagggctctggcccggcgggtggggagccccagtcaggaagctcccagggcttgtacggccttcaccccgaccatttgcccaggacagatggggtgaaatacgagggtctgccctgctgcttctatgaagagaagcaggtggcccgcgggggcggagggggcagcggctgctacactgaggactactcggtgagtgtgcagtacacgctcaccgaggaaccaccgcccggctgctaccccggggcccgggacctgagccagcgcatccccatcattccagaggatgtggactgtgatctgggcctgccctcggactgccaagggacccacagcctcggctcctggggtgggacgcgaggcccggataccccacggccccacaggggcctgggagcaacccgggaagaggagcgggctctgtgctgccaggctagggccctactgcggcctggctgccctccggaggaggcgggtgctgtcagggccaacttccctagtgccctccaggacactcaggagtccagcaccactgccactgaggctgcaggaccgagatctcactcagcagacagcagcagcccgggagcctgagctcaggaggaactcttacctggaaattgggaactgtatggagactccaaactgacttctttcaaaaaacaaaaacaaaaaatttttttagctttgacaaacacacaaaagtggtaataaagagagccctccttgtcaacccaaaatgtgagccccctgtggcaaaaccaccccctaccccattaacaaatcaacagacaaaattctccgagtcctttgcctcttttgataacatgttgttctgttttgtaaagtgtgtgtgcttggggttccgaggtgtgggattgagttctctgctttgtttttttttaagatattgtatgtaaatgtaaaaagttatttaaatatatattttaaagaaccctaactgccaacttttgctgaaaaagaaaaaaaaatcactgctgcattaaatgaaccacatcatgtgtagatactgttgtctccctgaagggagctcaggcctttgaaaagctcagggcttcacctgccttagaaaatgaaccagaaacttgaagtaaagctagttgataggggtacaggctctgaggagcagtgcaaaactgcctctttctttctcgtggcaaatcccaatgtacacgatttcaggtctcagacgccatgcctctccagcccacgcctttaggcaggtgatggcagcagctaggaatagggtgtacatgatccacagccctgcggagccaggtcaagccgctgctatgaaagctccagggtgatggggacgattctgcccagtgtcctcagtctgtcccctcaggtcatggtcccaagtgaaatgacagagttcacagccctggtcttggctgaggtccaggtcatagtaagggcatgttcttggggccctcgacctgaactctgaccctccgggcagggaagaggaggttgtcccctttggttgtcctggctttggagtcctttgcaaaaatattttgggccccctgccactggctgcagaaatggctcgacggggtgtgtggggacagacacccagaaggaatgtacttttgtggccttggtgtccgatggggctgggggagagtgctctccactgacccagcagcacacccatgtgcagtgcgcctgcatctgtgtgggggcagccacaccccttggctgctgcttccttgggctgcctttctgggggcatgtgactggacctacgaggtctgcactgagctccatttgaatgatacctttcctatcccatttcccccacggaagcaccgcttcagggttattcagtcctctgcctcatggctgaaattgctcatctcgtctgcagatgtctactatcctgtctacctaatgcactattatgtattgattctccatgagacagagagagagagagactatcagatagtttacacccaaagggtaggtttttgtatatttttccagccttttttattaaggggaaggggagagtttaaaaacccaaaccgttgtggttttaaggtgtttcatttttaaaagggagagagaatctatttaaagctatttcagatcagggattgtcatccttttttgtccaatgtattccttgttctttaaaaaaattttttttagaggaaactaatattagtctttgtgttcactaactcttctggtcacttgtatttatttattcattcattcatcagatatttgttgccatctgaaagaactggcccagtgggtctgaaagctcgcttgagaataggaaacttgagacctggccccctgtgggtaggagaacaaggaccacctgggttctccagtcttgaacgagaatctcactcttatcagaatgtttttcttaacctcagcgtatgatgaggaaatttacttatctctagctaggatttgacaaattccaacatcaaatgatcaaaacatttgccactgaggcttcactggtgagatccgttctccgtcctcgggtgcagtcccttgggggctgctcctcggactgcgccccgcacacctgttatcgagggtgtgagaagcgcctaagctggtgacatgtgatctgggacgccttcatttctcgggccaggagtagcagctgctaaggacagcagcttgcattgcgtggttttagggaagcagggtctggcttttaatatgaactgcaaaaagcagcttctcactgatatttttttgttgttgtttctggggggtttttttgttttgtttttaatgcctttgagtgcatattttcttcctcgtctgaaaccgaactcccaaagtggctttctttagccctggctggaaaaccacctctcaatagccttaagcaataaatagatgagtagagaatgtggcttcaactgggcttattaaagtaagtgtgtctagttttcacttgaacaagtgatagctgcagatggcgaaagaaacccatttaatttttgtagcttacaggtggtagaaacaaaaatgcaattttaaaaccttaaataccaaataccaaccattgccttttttttttttgagatggaattttgctcttgtcacccaggctggagtgcaatggcgcgatctcacctcactgcaacctctgcctcccgggtccaagtgattctcctgcctcagcctcccaagtagctgggattacaggcatgcgccaccacacccagctaattttgtatttttggtagagacagggtatctccatgttggtcaggctggtcttggattcccgacctcaggtgatccgcccacctcggcctcccaaagtgctgggattacaggcgtgagccaccatgcctgcccagcaataccaaccattgtcttttaaattcgtgttggcttctcagacagggagatcactggaataaaataaccgatggtcttattttgtcacacgtaaatcaaaagaaatgtcctctttgaagttgtaagactccaccaatgacagacacccttttcggtggactctgagtggtgtgtagtggttttatagccatggaaactaggagtatctcactttccactgagaacccctgcccccaatccctctaagttggggtgtggcagttgggcagggtcaagtgacccagccctggctgtaggacagccatatacagtgaagagttctagaaccagctaaaaatggaagtttgggtgtttaccaacaaggtacctctttatggatgcagccccagtaagctggctttaactctcagctccttccctgtctcctcctaatccaagcccttttataaaataaagccccttctgtcccactgctcacatacttatgtgctgctagtctctactcgaagttcgtgcaggactaatgcttttaaaatgaggtctaaaaaataattactagtcgagactattattctttaaacagaactgcctttttctactctttatgtaaactctttctattgtgttggtctaacaaggcactattttaaaattttttaatttttcccatagcacttaaaagagattttgtaaagaccttgctgtaaagattttgtaataaaatggtctaagggctctttttccaacattaccatttttaaaaaatgttttaaaagctagaagacaacttatgtatattctgtatatgtatagcagcacatttcatttatggaaatatgttctcagaatatttatttactaatatatttatcttaagccatgtcttatgttgagagtgtgacattgttggaataatcattgaaaatgactaacacaagaccctgtaaatacatgataattgcacacagattttacatatttgcagaccaaaaatgatttaaaacaagttgtagtcttctatggttttgtaacaaattgtacacatgactgtaaaaaaaaaatacaattttatcaagtatgtgtt

SEQ ID NO: 34674 - DNA, 1442 bp, Homo sapiens
  source 1..1442: mol_type = unassigned DNA
tcctggtctccatgtcatctgccagaaaggccacctgcgccagcacctcctgagaccggccttcaaagacacgacgcatgccgctctgccgtccggagcacttaatgcctagagccagcagggtcccagtggccgcgtcactgcctctgagccacgcggtcattccaactcaactgccctcgcgtcctggccacaggccccctgggagaccccggagatgcccaaaggcctcatgcctgccgcctccagtgggacctagcagcacacagacagcgaagcgggtgaccatggggtggccacggccgggccgagccctcgtggcagtcaaagccttgctggtcttgtcgctgctccaggtgcccgcgcaggcagtggtacgggccgtgctggaagacaactcgagctcggtggactttgcggatctgccggcgctgttcggcgtccccctggcccccgagggcatacggggctacctgatggaggtcaagccagccaacgcgtgccatcccatcgaggccccgcgactgggcaaccgctctctgggcgccatcgtgctgatccgccgctacgactgcaccttcgacctcaaggtgctgaacgcccagcgcgccggcttcgaggcggccatcgtgcacaacgtccactccgacgacctcgtgagcatgacccacgtctacgaggacttgaggggccagatcgccatcccctcagtgttcgtgagcgaggccgcctcgcaggacctgcgggtcatcctgggctgcaacaagtcggcccacgcgctgctcctgcccgacgacccaccgtgccacgacctgggctgtcaccccgtgctgaccgtgtcctgggtgctgggctgtaccctggccctggtcgtatcagccttctttgtcctgaaccacctgtggctctgggcccaggcctgctgcagccacagacggccggtgaagacgtctacctgccagaaggcccaggtccgcaccttcacgtggcacaacgacctgtgtgccatctgcctggatgagtatgaggagggcgaccaactcaagatcctgccctgctcccacacctaccactgcaaatgcattgacccctggttctcccaagccccccggcgctcctgccccgtgtgcaaacagtcggtggccgccacagaagacagctttgactccaccacctacagcttcagggacgaggacccctccctaccgggccaccggccccccatctgggccattcaagtccagctacgctcccggaggctggagctgctgggccgcgccagtccccactgccactgcagcaccacgtccctggaggcagagtataccactgtctcctcagcccctcctgaggcccctggtcagtaaagatctagggcagggaggggggtgcaatgaggaatgtttctggtctgaaaagaataaagtgggtttgaaagcgga

SEQ ID NO: 34675 - DNA, 1479 bp, Homo sapiens
  source 1..1479: mol_type = unassigned DNA
gaggggtcaggcggtgctggcaagatggctgcacttgagaagatgacgtttcccaagaagatgacatttccagagaaaccaagccacaaaaagtacagggccgccctgaagaaggagaaacgaaagaaacgtcggcaggaacttgctcgactgagagactcaggactctcacaggaggaggaagaggacacttttattgaagaacaacaactagaagaagagaagctattggaaagagagagggaaagattacatgaggagtggttgctgagggagcagaaggcacaagaagaattcagaataaagaaggaaaaggaagaggcggctaaaaaatggctagaagaacaagagagaaagttaaaggaacaatggaaagaacagcagaggaaagagagagaagaggaggagcagaaacaacaggagaagaaagaaaaagaggaagctgtgcagaagatgctggatcaggctgaaaatgatttagaaaatagtaccacatggcaaaacccagaaccacccgtggatttcagagtaatggagaaggatcgagctaattgtcccttctacagtaaaacaggagcttgcagatttggagacagatgttcacgtaaacataatttcccaacatctagtcctacccttcttattaagagcatgtttacaacgtttggaatggagcagtgcaggagggatgactatgaccctgacgcaagcctggagtacagcgaggaagaaacctaccaacagttcctagatttctatgaggatgtgttgcccgagttcaagaacgtggggaaagtgattcagttcaaggtcagctgcaatttggaacctcacctgaggggcaatgtatatgttcagtaccagtcggaagaagaatgccaagcagccctttctctgtttaacggacgatggtatgcaggacgacagctgcaatgtgaattctgcccagtgacccggtggaaaatggcgatttgtggtttatttgaaatacaacaatgtccaagaggaaaacactgcaactttcttcatgtgttcagaaatcccaacaatgaattctgggaagctaatagagacatctacttgtcttcagatcagactggctcctcctttggcaagaactccgagaggagggagaagatgggccaccacgaccactactacagcaggcagcggggaaggagaaaccctagtccagaccacacctacaaaagaaatggggaatccgagagaaaaaagagtagtcatagggggaagaaatctcacaaacgcacatcaaagagtcgggagaggcacaattcaccaagcagaggaagaaataggcaccgcagctgggaccagggccgccggagccagagccgcaggagccaccgcagccggagccaaagttcctctaggtgccgaagtcgtgggaggaggaagtcgggtaatagagacagaactgttcagagtccccaatccaaataaactagttttgttctt

SEQ ID NO: 34676 - DNA, 1491 bp, Homo sapiens
  source 1..1491: mol_type = unassigned DNA
gaggggcggggcggtgccggcaagatggctgcgcccgagaagatgacgtttcccgagaaaccaagccacaaaaagtacagggccgccctgaagaaggagaaacgaaagaaacgtcggcaggaacttgctcgactgagagactcaggactctcacagaaggaggaagaggaggacacttttattgaagaacaacaactagaagaagagaagctattggaaagagagaggcaaagattacatgaggagtggttgctaagagagcagaaggcacaagaagaattcagaataaagaaggaaaaggaagaggcggctaaaaaacggcaagaagaacaagagagaaagttaaaggaacaatgggaagaacagcagaggaaagagagagaagaggaggagcagaaacgacaggagaagaaagaaaaagaggaagctttgcagaagatgctggatcaggctgaaaatgagttggaaaatggtaccacatggcaaaacccagaaccacccgtggatttcagagtaatggagaaggatcgagctaattgtcccttctacagtaaaacaggagcttgcagatttggagatagatgttcacgtaaacataatttcccaacatccagtcctacccttcttattaagagcatgtttacgacgtttggaatggagcagtgcaggagggatgactatgaccctgacgcaagcctggagtacagcgaggaagaaacctaccaacagttcctagacttctatgaggatgtgttgcccgagttcaagaacgtggggaaagtgattcagttcaaggtcagctgcaatttggaacctcacctgaggggcaatgtatatgttcagtaccagtcggaagaagaatgccaagcagccctttctctgtttaacggacgatggtatgcaggacgacagctgcagtgtgaattctgccccgtgacccggtggaaaatggcgatttgtggtttatttgaaatacaacaatgtccaagaggaaagcactgcaactttcttcatgtgttcagaaatcccaacaatgaattctgggaagctaatagagacatctacttgtctccagatcggactggctcctcctttgggaagaactccgaaaggagggagaggatgggccaccacgacgactactacagcaggctgcggggaaggagaaaccctagtccagaccactcctacaaaagaaatggggaatccgagaggaaaagtagtcgtcacagggggaagaaatctcacaaacgcacatcaaagagtcgggagaggcacaattcacgaagcagaggaagaaatagggaccgcagcagggaccgcagccggggccggggcagccggagccggagccggagccggagccgcaggagccgccgcagccggagccaaagttcctctaggtcccgaagtcgtggcaggaggaggtcgggtaatagagacagaactgttcagagtcccaaatccaaataaactagttttgttcttaaa

SEQ ID NO: 34677 - DNA, 744 bp, Homo sapiens
  source 1..744: mol_type = unassigned DNA
gaggggcggggcggtgccggcaagatggctgcgcccgagaagatgacgtttcccgagaaaccaagccacaaaaagtacagggccgccctgaagaaggagaaacgaaagaaacgtcggcaggaacttgctcgactgagagactcaggactctcacagaaggaggaagaggaggacacttttattgaagaacaacaactagaagaagagaagctattggaaagagagaggctggagtgcagtggtgtgatctccgctcaccgcaacctccacctcccaggttcacacgattctcctgcctcagcctcccgagtagccgggattacaggcacgcaccgccacacccagttaatttttttttgtacttttagtagagatggggtttcaccatgttggccaggatggtctcgatctcttgacctcatgatctgcccgcctcggcctcacaaagtgctgagattacaggtgtgagccaccgcgctcagccgaaatttcttaatgtctctaagcttctatttccttgtctgtaatatggagataaagtcaatcacagtatccacctcacagaattgtgaagattaaaggaggtgatggatgtatagtgtttaacacagtgtcagcagatgagaggtgctgtgatagctctagttcttattattatagatttctgttatgatgaagacaatagatacggtatgaaataagagagtaatttttttcctgtttatttgaaatgcttcttttaaa

SEQ ID NO: 34678 - DNA, 4273 bp, Homo sapiens
  source 1..4273: mol_type = unassigned DNA
gtgcaggagtctgagaagaaagggtgtagatggagaggcggtggcctcacctctgcatgctccgtgggaagcggcggaggcgcccagcatccctcctactctgcccttggtggaggtttacgagaaaacacggccatctttatgtgtaaatgttgtaacctcttctcaccaaatcagtcggaactcctctcccacgtttcagagaagcacatggaagaaggggttaatgttgatgagattattattccccttaggcctctgagtacacctgaaccccccaactcaagcaaaaccggagatgagtttttggtcatgaagaggaagagaggcaggcctaaggggtccacgaagaagtccagcacagaagaggagctggcagaaaacatcgtgagtccgactgaggacagcccgctggctccggaggaagggaacagcctgcctccaagcagcttggagtgtagcaagtgctgtcggaagttctccaacacgcgccagctgcggaagcacatctgcattatcgtgctgaatttgggtgaggaggaaggagaagcaggtaacgagtctgaccttgaactagaaaagaagtgtaaggaagatgatcgggaaaaagcctcgaaaagaccacggtcacagaaaacagagaaagtccagaagatctcaggaaaggaggccagacagctttctggggcgaagaaacccatcataagtgtggttttaactgcacacgaagcaattccaggtgctaccaagattgtgccagtggaggctgggccccctgaaacaggagctacaaattctgagaccacttcagcagacctggtgcctcggagaggctaccaggaatacgccattcagcagacaccttatgagcaaccaatgaagtcaagcaggctaggtcccactcagctcaaaatcttcacttgtgaatactgcaacaaggtcttcaagttcaagcactcgctgcaggcccacctgaggatccacaccaatgaaaagccatacaagtgcccccagtgcagctatgccagtgccatcaaggccaacctcaatgtgcacctgcgcaagcacactggagagaagttcgcctgcgactattgctcgttcacctgcctgagcaagggccacctcaaggtgcacatcgagcgagtgcacaagaagatcaagcagcactgccgcttctgcaagaagaagtactctgacgtcaagaacctcatcaagcacatccgagacgcgcatgacccacaggacaagaaggtcaaagaggccttggacgagctctgcctgatgacgagggagggcaagcggcagctgctctatgactgccacatctgtgagcgcaagttcaagaacgagctggaccgtgaccgccatatgctggtccacggagacaagtggccttttgcctgtgagctctgtggccatggggccaccaagtaccaggcgctggaactgcatgtcaggaagcaccccttcgtgtacgtctgtgccgtctgccgcaagaagttcgtcagctccatcaggctgcgcacccacatcaaagaggtgcacggggctgcccaggaggccttggtcttcaccagttccatcaaccagagcttctgcctcctggaacctggtggggacatccagcaagaagctctgggggaccagctacagctggtggaagaggagtttgccctccagggcgtgaatgcactcaaggaagaggcctgtcctggggacactcagctggaggagggccggaaggagccggaggcccctggggaaatgcctgccccagctgtgcacctggcctccccgcaggccgaaagcacagccctgccaccctgtgagctggaaaccaccgtggtctcctcctcagacctgcattctcaagaggtggtttcagatgattttttgttgaaaaatgatacctcctccgcagaggctcatgctgctcctgagaagcccccagacatgcagcacagaagctcagtccagacgcaaggtgaagtgatcacactactgctgtccaaggcccagagtgctgggtcagatcaggaaagccatggcgcccagagccccctaggggaagggcagaacatggctgtgctttcagctggtgacccagatcccagcaggtgtctcaggtcaaacccagctgaggcctcagacctcctccctccagtagctggtggtggggacaccatcacacatcagcctgactcttgcaaagctgcccctgagcaccggtcaggcatcaccgctttcatgaaggtcctgaacagtttacagaagaagcaaatgaacaccagcttgtgtgagcggatccggaaggtttatggagacctggagtgtgaatactgtggcaaacttttttggtaccaagtgcattttgatatgcatgtccgcacccacacccgggaacatctgtattattgctctcagtgtcattattcttccatcaccaaaaactgccttaaacgccacgtaattcagaaacacagtaacatcttgctgaagtgtcccaccgatggctgtgactactcaactccagataaatataagctacaggcacatcttaaagttcacacagcactggacaaaaggagttattcttgtcctgtttgtgaaaagtctttttcagaggatcgattgataaagtcacatatcaagaccaaccatcctgaggtctccatgagcaccatttctgaggttctcgggaggagggttcagctgaaagggctaattggaaagagagccatgaaatgcccatattgtgacttttatttcatgaagaatggctcagaccttcagcgtcatatttgggctcatgaaggtgtgaagcccttcaagtgttctttgtgtgagtatgcaactcgtagcaagagtaacctcaaggctcatatgaatcgtcacagcactgagaaaacccacctatgtgacatgtgtggcaagaaattcaaatcaaaagggacactgaaaagtcacaaactccttcacactgcagatgggaagcagtttaagtgcacggtgtgtgactacacagcggcccagaagccacagctgctgcggcacatggaacagcatgtctccttcaagcctttccgctgtgcccattgccattactcctgcaacatatctggctctctgaagcggcactacaacaggaagcaccctaatgaggagtatgccaacgtgggcaccggggagctggcagcggaggtgctcatccagcaaggtggtttgaagtgtcctgtttgcagctttgtatatggcaccaaatgggagttcaataggcacttgaagaacaaacatggcttgaaggtggtggaaattgatggagaccccaagtgggaggtcaccgaggaggagcccagctccaaccacacggtcatgatccaggagacggtccagcaagcgtccgtggagcttgccgagcagcaccacctggtggtgtcctccgacgacgtggagggcattgagacggtgactgtctacacgcagggcggggaggcctcggagttcatcgtctacgtgcaggaggccatgcagcctgtggaggagcaggctgtggagcagccggcccaggaactctagaggacatgtggcatcggatggccacagggcggggctgccaggctctgcaggcacccagggtggggaggccacccttcctgccctacccgcagaatggtgctctcctttgccctccctgcccagcagcctgataggactctcctagtccaacttggggtgggcaaggcagtcagcatcaccagcaataccacaggaccctcaccccagcatagacacacaccccctgacccttaccatctgcttcctgaaagacttcagtgtcagctcccctacacacaccccacaccttcaccccttgcttcaagattcaaacagagactcccagtccccctcagcatcttccctgaatcacagccccagctccttgacccccatctaggtgccaaatgttcatctgcaaccgctatgcagtctggtgagagggagacagccatcacatagaaagtgaccgtacgggtttttaatcactgctgggtggggtgggggtagggggattgtcctggctttgtcgacaaagtcccacttccccgagtattaagggcccttggtatcaagtgaggtaaattcacccatcacagggtctcgccctaccatcctggaattatttcacttttaagataaatgcactatttcactgttcgcctcccattctaaggaggtgaggtggttggaataaaaacagttcctgtctgaa

SEQ ID NO: 34679 - DNA, 3734 bp, Homo sapiens
  source 1..3734: mol_type = unassigned DNA
aaagcgaagcgtcagcagggcgccccgccccctcggtcggcacgggagggggcccggaagagcccgaggcttttttttcctccgcggtggggcgttgccatggagacgcgggcggcagaaaacacggccatctttatgtgtaaatgttgtaacctcttctcaccaaatcagtcggaactcctctcccacgtttcagagaagcacatggaagaaggggttaatgttgatgagattattattccccttaggcctctgagtacacctgaaccccccaactcaagcaaaaccggagatgagtttttggtcatgaagaggaagagaggcaggcctaaggggtccacgaagaagtccagcacagaagaggagctggcagaaaacatcgtgagtccgactgaggacagcccgctggctccggaggaagggaacagcctgcctccaagcagcttggagtgtagcaagtgctgtcggaagttctccaacacgcgccagctgcggaagcacatctgcattatcgtgctgaatttgggtgaggaggaaggagaagcaggtgctaccaagattgtgccagtggaggctgggccccctgaaacaggagctacaaattctgagaccacttcagcagacctggtgcctcggagaggctaccaggaatacgccattcagcagacaccttatgagcaaccaatgaagtcaagcaggctaggtcccactcagctcaaaatcttcacttgtgaatactgcaacaaggtcttcaagttcaagcactcgctgcaggcccacctgaggatccacaccaatgaaaagccatacaagtgcccccagtgcagctatgccagtgccatcaaggccaacctcaatgtgcacctgcgcaagcacactggagagaagttcgcctgcgactattgctcgttcacctgcctgagcaagggccacctcaaggtgcacatcgagcgagtgcacaagaagatcaagcagcactgccgcttctgcaagaagaagtactctgacgtcaagaacctcatcaagcacatccgagacgcgcatgacccacaggacaagaaggtcaaagaggccttggacgagctctgcctgatgacgagggagggcaagcggcagctgctctatgactgccacatctgtgagcgcaagttcaagaacgagctggaccgtgaccgccatatgctggtccacggagacaagtggccttttgcctgtgagctctgtggccatggggccaccaagtaccaggcgctggaactgcatgtcaggaagcaccccttcgtgtacgtctgtgccgtctgccgcaagaagttcgtcagctccatcaggctgcgcacccacatcaaagaggtgcacggggctgcccaggaggccttggtcttcaccagttccatcaaccagagcttctgcctcctggaacctggtggggacatccagcaagaagctctgggggaccagctacagctggtggaagaggagtttgccctccagggcgtgaatgcactcaaggaagaggcctgtcctggggacactcagctggaggagggccggaaggagccggaggcccctggggaaatgcctgccccagctgtgcacctggcctccccgcaggccgaaagcacagccctgccaccctgtgagctggaaaccaccgtggtctcctcctcagacctgcattctcaagaggtggtttcagatgattttttgttgaaaaatgatacctcctccgcagaggctcatgctgctcctgagaagcccccagacatgcagcacagaagctcagtccagacgcaaggtgaagtgatcacactactgctgtccaaggcccagagtgctgggtcagatcaggaaagccatggcgcccagagccccctaggggaagggcagaacatggctgtgctttcagctggtgacccagatcccagcaggtgtctcaggtcaaacccagctgaggcctcagacctcctccctccagtagctggtggtggggacaccatcacacatcagcctgactcttgcaaagctgcccctgagcaccggtcaggcatcaccgctttcatgaaggtcctgaacagtttacagaagaagcaaatgaacaccagcttgtgtgagcggatccggaaggtttatggagacctggagtgtgaatactgtggcaaacttttttggtaccaagtgcattttgatatgcatgtccgcacccacacccgggaacatctgtattattgctctcagtgtcattattcttccatcaccaaaaactgccttaaacgccacgtaattcagaaacacagtaacatcttgctgaagtgtcccaccgatggctgtgactactcaactccagataaatataagctacaggcacatcttaaagttcacacagcactggacaaaaggagttattcttgtcctgtttgtgaaaagtctttttcagaggatcgattgataaagtcacatatcaagaccaaccatcctgaggtctccatgagcaccatttctgaggttctcgggaggagggttcagctgaaagggctaattggaaagagagccatgaaatgcccatattgtgacttttatttcatgaagaatggctcagaccttcagcgtcatatttgggctcatgaaggtgtgaagcccttcaagtgttctttgtgtgagtatgcaactcgtagcaagagtaacctcaaggctcatatgaatcgtcacagcactgagaaaacccacctatgtgacatgtgtggcaagaaattcaaatcaaaagggacactgaaaagtcacaaactccttcacactgcagatgggaagcagtttaagtgcacggtgtgtgactacacagcggcccagaagccacagctgctgcggcacatggaacagcatgtctccttcaagcctttccgctgtgcccattgccattactcctgcaacatatctggctctctgaagcggcactacaacaggaagcaccctaatgaggagtatgccaacgtgggcaccggggagctggcagcggaggtgctcatccagcaaggtggtttgaagtgtcctgtttgcagctttgtatatggcaccaaatgggagttcaataggcacttgaagaacaaacatggcttgaaggtggtggaaattgatggagaccccaagtgggagacagcaacagaagctcctgaggagccctccacccagtatctccacatcacagaggccgaagaagacgttcaagggacacaggcagcggtggccgcgctccaggacctgagatacacctctgagagtggcgaccgactggaccccacggccgtgaacatcctgcagcagatcattgagctgggcgccgagacccatgacgccactgcccttgcctcggtggttgccatggcaccagggacggtgactgtggttaagcaggtcaccgaggaggagcccagctccaaccacacggtcatgatccaggagacggtccagcaagcgtccgtggagcttgccgagcagcaccacctggtggtgtcctccgacgacgtggagggcattgagacggtgactgtctacacgcagggcggggaggcctcggagttcatcgtctacgtgcaggaggccatgcagcctgtggaggagcaggctgtggagcagccggcccaggaactctagaggacatgtggcatcggatggccacagggcggggctgccaggctctgcaggcacccagggtggggaggccacccttcctgccctacccg

SEQ ID NO: 34680 - DNA, 4756 bp, Homo sapiens
  source 1..4756: mol_type = unassigned DNA
agactccatccgccatgttggatgccgcagattcgccataacctcgccggctcttttcttaaaaaaataaaaataaaaagcgaagcgtcagcagggcgccccgccccctcggtcggcacgggagggggcccggaagagcccgaggcttttttttcctccgcggtggggcgttgccatggagacgcgggcggcaggtctgctggagtttgctggaggtccgctccataccctgtttgcctgggtatcaccagtggaggctgcagaacaacaaagattgctgcctgttcctgcctctggaagcttcgtcccagaggggcacctgccagatgccagccagagctctcctgtatgagaaaacacggccatctttatgtgtaaatgttgtaacctcttctcaccaaatcagtcggaactcctctcccacgtttcagagaagcacatggaagaaggggttaatgttgatgagattattattccccttaggcctctgagtacacctgaaccccccaactcaagcaaaaccggagatgagtttttggtcatgaagaggaagagaggcaggcctaaggggtccacgaagaagtccagcacagaagaggagctggcagaaaacatcgtgagtccgactgaggacagcccgctggctccggaggaagggaacagcctgcctccaagcagcttggagtgtagcaagtgctgtcggaagttctccaacacgcgccagctgcggaagcacatctgcattatcgtgctgaatttgggtgaggaggaaggagaagcaggtaacgagtctgaccttgaactagaaaagaagtgtaaggaagatgatcgggaaaaagcctcgaaaagaccacggtcacagaaaacagagaaagtccagaagatctcaggaaaggaggccagacagctttctggggcgaagaaacccatcataagtgtggttttaactgcacacgaagcaattccaggtgctaccaagattgtgccagtggaggctgggccccctgaaacaggagctacaaattctgagaccacttcagcagacctggtgcctcggagaggctaccaggaatacgccattcagcagacaccttatgagcaaccaatgaagtcaagcaggctaggtcccactcagctcaaaatcttcacttgtgaatactgcaacaaggtcttcaagttcaagcactcgctgcaggcccacctgaggatccacaccaatgaaaagccatacaagtgcccccagtgcagctatgccagtgccatcaaggccaacctcaatgtgcacctgcgcaagcacactggagagaagttcgcctgcgactattgctcgttcacctgcctgagcaagggccacctcaaggtgcacatcgagcgagtgcacaagaagatcaagcagcactgccgcttctgcaagaagaagtactctgacgtcaagaacctcatcaagcacatccgagacgcgcatgacccacaggacaagaaggtcaaagaggccttggacgagctctgcctgatgacgagggagggcaagcggcagctgctctatgactgccacatctgtgagcgcaagttcaagaacgagctggaccgtgaccgccatatgctggtccacggagacaagtggccttttgcctgtgagctctgtggccatggggccaccaagtaccaggcgctggaactgcatgtcaggaagcaccccttcgtgtacgtctgtgccgtctgccgcaagaagttcgtcagctccatcaggctgcgcacccacatcaaagaggtgcacggggctgcccaggaggccttggtcttcaccagttccatcaaccagagcttctgcctcctggaacctggtggggacatccagcaagaagctctgggggaccagctacagctggtggaagaggagtttgccctccagggcgtgaatgcactcaaggaagaggcctgtcctggggacactcagctggaggagggccggaaggagccggaggcccctggggaaatgcctgccccagctgtgcacctggcctccccgcaggccgaaagcacagccctgccaccctgtgagctggaaaccaccgtggtctcctcctcagacctgcattctcaagaggtggtttcagatgattttttgttgaaaaatgatacctcctccgcagaggctcatgctgctcctgagaagcccccagacatgcagcacagaagctcagtccagacgcaaggtgaagtgatcacactactgctgtccaaggcccagagtgctgggtcagatcaggaaagccatggcgcccagagccccctaggggaagggcagaacatggctgtgctttcagctggtgacccagatcccagcaggtgtctcaggtcaaacccagctgaggcctcagacctcctccctccagtagctggtggtggggacaccatcacacatcagcctgactcttgcaaagctgcccctgagcaccggtcaggcatcaccgctttcatgaaggtcctgaacagtttacagaagaagcaaatgaacaccagcttgtgtgagcggatccggaaggtttatggagacctggagtgtgaatactgtggcaaacttttttggtaccaagtgcattttgatatgcatgtccgcacccacacccgggaacatctgtattattgctctcagtgtcattattcttccatcaccaaaaactgccttaaacgccacgtaattcagaaacacagtaacatcttgctgaagtgtcccaccgatggctgtgactactcaactccagataaatataagctacaggcacatcttaaagttcacacagcactggacaaaaggagttattcttgtcctgtttgtgaaaagtctttttcagaggatcgattgataaagtcacatatcaagaccaaccatcctgaggtctccatgagcaccatttctgaggttctcgggaggagggttcagctgaaagggctaattggaaagagagccatgaaatgcccatattgtgacttttatttcatgaagaatggctcagaccttcagcgtcatatttgggctcatgaaggtgtgaagcccttcaagtgttctttgtgtgagtatgcaactcgtagcaagagtaacctcaaggctcatatgaatcgtcacagcactgagaaaacccacctatgtgacatgtgtggcaagaaattcaaatcaaaagggacactgaaaagtcacaaactccttcacactgcagatgggaagcagtttaagtgcacggtgtgtgactacacagcggcccagaagccacagctgctgcggcacatggaacagcatgtctccttcaagcctttccgctgtgcccattgccattactcctgcaacatatctggctctctgaagcggcactacaacaggaagcaccctaatgaggagtatgccaacgtgggcaccggggagctggcagcggaggtgctcatccagcaaggtggtttgaagtgtcctgtttgcagctttgtatatggcaccaaatgggagttcaataggcacttgaagaacaaacatggcttgaaggtggtggaaattgatggagaccccaagtgggagacagcaacagaagctcctgaggagccctccacccagtatctccacatcacagaggccgaagaagacgttcaagggacacaggcagcggtggccgcgctccaggacctgagatacacctctgagagtggcgaccgactggaccccacggccgtgaacatcctgcagcagatcattgagctgggcgccgagacccatgacgccactgcccttgcctcggtggttgccatggcaccagggacggtgactgtggttaagcaggtcaccgaggaggagcccagctccaaccacacggtcatgatccaggagacggtccagcaagcgtccgtggagcttgccgagcagcaccacctggtggtgtcctccgacgacgtggagggcattgagacggtgactgtctacacgcagggcggggaggcctcggagttcatcgtctacgtgcaggaggccatgcagcctgtggaggagcaggctgtggagcagccggcccaggaactctagaggacatgtggcatcggatggccacagggcggggctgccaggctctgcaggcacccagggtggggaggccacccttcctgccctacccgcagaatggtgctctcctttgccctccctgcccagcagcctgataggactctcctagtccaacttggggtgggcaaggcagtcagcatcaccagcaataccacaggaccctcaccccagcatagacacacaccccctgacccttaccatctgcttcctgaaagacttcagtgtcagctcccctacacacaccccacaccttcaccccttgcttcaagattcaaacagagactcccagtccccctcagcatcttccctgaatcacagccccagctccttgacccccatctaggtgccaaatgttcatctgcaaccgctatgcagtctggtgagagggagacagccatcacatagaaagtgaccgtacgggtttttaatcactgctgggtggggtgggggtagggggattgtcctggctttgtcgacaaagtcccacttccccgagtattaagggcccttggtatcaagtgaggtaaattcacccatcacagggtctcgccctaccatcctggaattatttcacttttaagataaatgcactatttcactgttcgcctcccattctaaggaggtgaggtggttggaataaaaacagttcctgtc

SEQ ID NO: 34681 - DNA, 1728 bp, Homo sapiens
  source 1..1728: mol_type = unassigned DNA
atggatctgacaaaaatgggcatgatccagctgcagaaccctagccaccccacggggctactgtgcaaggccaaccagatgcggctggccgggactttgtgcgatgtggtcatcatggtggacagccaggagttccacgcccaccggacggtgctggcctgcaccagcaagatgtttgagatcctcttccaccgcaatagtcaacactatactttggacttcctctcgccaaagaccttccagcagattctggagtatgcatatacagccacgctgcaagccaaggcggaggacctggatgacctgctgtatgcggccgagatcctggagatcgagtacctggaggaacagtgcctgaagatgctggagaccatccaggcctcagacgacaatgacacggaggccaccatggccgatggcggggccgaggaagaagaggaccgcaaggctcggtacctcaagaacatcttcatctcgaagcattccagcgaggagagtgggtatgccagtgtggctggacagagcctccctgggcccatggtggaccagagcccttcagtctccacttcatttggtctttcagccatgagtcccaccaaggctgcagtggacagtttgatgaccataggacagtctctcctgcagggaactcttcagccacctgcagggcccgaggagccaactctggctgggggtgggcggcaccctggggtggctgaggtgaagacggagatgatgcaggtggatgaggtgcccagccagggcttcatccagagggagctgttcagcaagctgggggagctggctgtgggcatgaagtcagagagccggaccatcggagagcagtgcagcgtgtgtggggtcgagcttcctgataacgaggctgtggagcagcacaggaagctgcacagtgggatgaagacgtacgggtgcgagctctgcgggaagcggttcctggatagtttgcggctgagaatgcacttactggctcattcagcgggtgccaaagcctttgtctgtgatcagtgcggtgcacagttttcgaaggaggatgccctggagacacacaggcagacccatactggcactgacatggccgtcttctgtctgctgtgtgggaagcgcttccaggcgcagagcgcactgcagcagcacatggaggtccacgcgggcgtgcgcagctacatctgcagtgagtgcaaccgcaccttccccagccacacggctctcaaacgccacctgcgctcacatacaggcgaccacccctacgagtgtgagttctgtggcagctgcttccgggatgagagcacactcaagagccacaaacgcatccacacgggtgagaaaccctacgagtgcaatggctgtggcaagaagttcagcctcaagcatcagctggagacgcactatagggtgcacacaggtgagaagccctttgagtgtaagctctgccaccagcgctcccgggactactcggccatgatcaagcacctgagaacgcacaacggcgcctcgccctaccagtgcaccatctgcacagagtactgccccagcctctcctccatgcagaagcacatgaagggccacaagcccgaggagatcccgcccgactggaggatagagaagacgtacctctacctgtgctatgtgtgaagggaggcccgcggcggtggagccgagcggggagccaggaaagaagagttggagtgagatgaaggaaggactatg

SEQ ID NO: 34682 - DNA, 2523 bp, Homo sapiens
  source 1..2523: mol_type = unassigned DNA
gggctcggccgccagcactaaagatggagaggcgccggggccttgcaggggagggggctcggcgttgacgtgggacgcggcggaggcgcagcagccggtggtgatttgctaacctcgcagcagagaggagttgagggcgatgagagcgggtactgcgaactgccgggcgatgctgtcgctgccgccgtgatacggagagcaacagttccccagcaacacccctccccgacacaggcacacaccccccgacaggcacgcacacccaccccacagtgcccggctcggctgcgcctcctctattggcccaggaagcccacccagccccgccacgcagagcccagaaggaaagaaagcctcatgcctgagccgaggggagcaccatggatctgacaaaaatgggcatgatccagctgcagaaccctagccaccccacggggctactgtgcaaggccaaccagatgcggctggccgggactttgtgcgatgtggtcatcatggtggacagccaggagttccacgcccaccggacggtgctggcctgcaccagcaagatgtttgagatcctcttccaccgcaatagtcaacactatactttggacttcctctcgccaaagaccttccagcagattctggagtatgcatatacagccacgctgcaagccaaggcggaggacctggatgacctgctgtatgcggccgagatcctggagatcgagtacctggaggaacagtgcctgaagatgctggagaccatccaggcctcagacgacaatgacacggaggccaccatggccgatggcggggccgaggaagaagaggaccgcaaggctcggtacctcaagaacatcttcatctcgaagcattccagcgaggagagtgggtatgccagtgtggctggacagagcctccctgggcccatggtggaccagagcccttcagtctccacttcatttggtctttcagccatgagtcccaccaaggctgcagtggacagtttgatgaccataggacagtctctcctgcagggaactcttcagccacctgcagggcccgaggagccaactctggctgggggtgggcggcaccctggggtggctgaggtgaagacggagatgatgcaggtggatgaggtgcccagccaggacagccctggggcagccgagtccagcatctcaggagggatgggggacaaggttgaggaaagaggcaaagaggggcctgggaccccgactcgaagcagcgtcatcaccagtgctagggagctacactatgggcgagaggagagtgccgagcaggtgccacccccagctgaggctggccaggcccccactggccgacctgagcacccagcacccccgcctgagaagcatctgggcatctactccgtgttgcccaaccacaaggctgacgctgtattgagcatgccgtcttccgtgacctctggcctccacgtgcagcctgccctggctgtctccatggacttcagcacctatggggggctgctgccccagggcttcatccagagggagctgttcagcaagctgggggagctggctgtgggcatgaagtcagagagccggaccatcggagagcagtgcagcgtgtgtggggtcgagcttcctgataacgaggctgtggagcagcacaggaagctgcacagtgggatgaagacgtacgggtgcgagctctgcgggaagcggttcctggatagtttgcggctgagaatgcacttactggctcattcagcgggtgccaaagcctttgtctgtgatcagtgcggtgcacagttttcgaaggaggatgccctggagacacacaggcagacccatactggcactgacatggccgtcttctgtctgctgtgtgggaagcgcttccaggcgcagagcgcactgcagcagcacatggaggtccacgcgggcgtgcgcagctacatctgcagtgagtgcaaccgcaccttccccagccacacggctctcaaacgccacctgcgctcacatacaggcgaccacccctacgagtgtgagttctgtggcagctgcttccgggatgagagcacactcaagagccacaaacgcatccacacgggtgagaaaccctacgagtgcaatggctgtggcaagaagttcagcctcaagcatcagctggagacgcactatagggtgcacacaggtgagaagccctttgagtgtaagctctgccaccagcgctcccgggactactcggccatgatcaagcacctgagaacgcacaacggcgcctcgccctaccagtgcaccatctgcacagagtactgccccagcctctcctccatgcagaagcacatgaagggccacaagcccgaggagatcccgcccgactggaggatagagaagacgtacctctacctgtgctatgtgtgaagggaggcccgcggcggtggagccgagcggggagccaggaaagaagagttggagtgagatgaaggaaggactatgacaaataaaaaaggaaaagaaaaaaaaaaacagaaggaaaaggaaa

SEQ ID NO: 34683 - DNA, 2287 bp, Homo sapiens
  source 1..2287: mol_type = unassigned DNA
agcgctgcgggccctcctcggctctcggcgggaccggcggtgacaccggagctcgccgtgcgctcccggccgctctcgcctcctctattggcccaggaagcccacccagccccgccacgcagagcccagaaggaaagaaagcctcatgcctgagccgaggggagcaccatggatctgacaaaaatgggcatgatccagctgcagaaccctagccaccccacggggctactgtgcaaggccaaccagatgcggctggccgggactttgtgcgatgtggtcatcatggtggacagccaggagttccacgcccaccggacggtgctggcctgcaccagcaagatgtttgagatcctcttccaccgcaatagtcaacactatactttggacttcctctcgccaaagaccttccagcagattctggagtatgcatatacagccacgctgcaagccaaggcggaggacctggatgacctgctgtatgcggccgagatcctggagatcgagtacctggaggaacagtgcctgaagatgctggagaccatccaggcctcagacgacaatgacacggaggccaccatggccgatggcggggccgaggaagaagaggaccgcaaggctcggtacctcaagaacatcttcatctcgaagcattccagcgaggagagtgggtatgccagtgtggctggacagagcctccctgggcccatggtggaccagagcccttcagtctccacttcatttggtctttcagccatgagtcccaccaaggctgcagtggacagtttgatgaccataggacagtctctcctgcagggaactcttcagccacctgcagggcccgaggagccaactctggctgggggtgggcggcaccctggggtggctgaggtgaagacggagatgatgcaggtggatgaggtgcccagccaggacagccctggggcagccgagtccagcatctcaggagggatgggggacaaggttgaggaaagaggcaaagaggggcctgggaccccgactcgaagcagcgtcatcaccagtgctagggagctacactatgggcgagaggagagtgccgagcaggtgccacccccagctgaggctggccaggcccccactggccgacctgagcacccagcacccccgcctgagaagcatctgggcatctactccgtgttgcccaaccacaaggctgacgctgtattgagcatgccgtcttccgtgacctctggcctccacgtgcagcctgccctggctgtctccatggacttcagcacctatggggggctgctgccccagggcttcatccagagggagctgttcagcaagctgggggagctggctgtgggcatgaagtcagagagccggaccatcggagagcagtgcagcgtgtgtggggtcgagcttcctgataacgaggctgtggagcagcacaggaagctgcacagtgggatgaagacgtacgggtgcgagctctgcgggaagcggttcctggatagtttgcggctgagaatgcacttactggctcattcagcgggtgccaaagcctttgtctgtgatcagtgcggtgcacagttttcgaaggaggatgccctggagacacacaggcagacccatactggcactgacatggccgtcttctgtctgctgtgtgggaagcgcttccaggcgcagagcgcactgcagcagcacatggaggtccacgcgggcgtgcgcagctacatctgcagtgagtgcaaccgcaccttccccagccacacggctctcaaacgccacctgcgctcacatacaggcgaccacccctacgagtgtgagttctgtggcagctgcttccgggatgagagcacactcaagagccacaaacgcatccacacgggtgagaaaccctacgagtgcaatggctgtggcaagaagttcagcctcaagcatcagctggagacgcactatagggtgcacacaggtgagaagccctttgagtgtaagctctgccaccagcgctcccgggactactcggccatgatcaagcacctgagaacgcacaacggcgcctcgccctaccagtgcaccatctgcacagagtactgccccagcctctcctccatgcagaagcacatgaagggccacaagcccgaggagatcccgcccgactggaggatagagaagacgtacctctacctgtgctatgtgtgaagggaggcccgcggcggtggagccgagcggggagccaggaaagaagagttggagtgagatgaaggaaggactatgacaaataaaaaaggaaaagaaa

SEQ ID NO: 34684 - DNA, 572 bp, Homo sapiens
  source 1..572: mol_type = unassigned DNA
tcttatgtatgcggaccggtgcgcgggcgcaagataagcctcctctattggcccaggaagcccacccagccccgccacgcagagcccagaaggaaagaaagcctcatgcctgagccgaggggagcaccatggatctgacaaaaatgggcatgatccagctgcagaaccctagccaccccacggggctactgtgcaaggccaaccagatgcggctggccgggactttgtgcgatgtggtcatcatggtggacagccaggagttccacgcccaccggacggtgctggcctgcaccagcaagatgtttgagatcctcttccaccgcaatagtcaacactatactttggacttcctctcgccaaagaccttccagcagattctggagtatgcatatacagccacgctgcaagccaaggcggaggacctggatgacctgctgtatgcggccgagatcctggagatcgagtacctggaggaacagtgcctgaagatgctggagaccatccaggcctcagacgacaatgacacggaggccaccatggccgatggcggggccgaggaagaagaggaccgc

SEQ ID NO: 34685 - DNA, 773 bp, Homo sapiens
  source 1..773: mol_type = unassigned DNA
agcgggtactgcgaactgccgggcgatgctgtcgctgccgccgtgatacggagagcaacagttccccagcaacacccctccccgacacaggcacacaccccccgacaggcacgcacacccaccccacagtgcccggctcggctgcgttctcagaaaccccgatgtctgcgggaaagcacgcggtggctcggctcggctgaatgctcatcccaaccttgacggcctccgtccccaccccggggcgggcagcaaaaatgtcttgaccagccgtcctgtgaatcctttctgcgtgagcttggtggctcctgaactgatagagctccttctgggggtggagcctcctctattggcccaggaagcccacccagccccgccacgcagagcccagaaggaaagaaagcctcatgcctgagccgaggggagcaccatggatctgacaaaaatgggcatgatccagctgcagaaccctagccaccccacggggctactgtgcaaggccaaccagatgcggctggccgggactttgtgcgatgtggtcatcatggtggacagccaggagttccacgcccaccggacggtgctggcctgcaccagcaagatgtttgagatcctcttccaccgcaatagtcaacactatactttggacttcctctcgccaaagaccttccagcagattctggagtatgcatatacagccacgctgcaagccaaggcggaggacctggatgacctgctgtatgcggccgagatcctggagatcgagtacctggagg

SEQ ID NO: 34686 - DNA, 2661 bp, Homo sapiens
  source 1..2661: mol_type = unassigned DNA
atgcgccggaagttgcagccgggaagcctgcgaggtcggttccgcccgactctaacatggcggcgccctttgtctgctctggagtgccgtccccggccttctcgcggccgtgatgcacctccctctgcggtggggtccgggacatggcaggtaatgagccggacgaggggagccaagctggagtttacacaggcaaactgtcagaaaagagtagcctgggctgtctggaaatctgagccatggactttccccagcacagccagcatgtcttggaacagctgaaccagcagcggcagctggggcttctctgtgactgcacctttgtggtggacggtgttcactttaaggctcataaagcagtgctggcggcctgcagcgagtacttcaagatgctcttcgtggaccagaaggacgtggtgcacctggacatcagtaacgcggcaggcctggggcaggtgctggagtttatgtacacggccaagctgagcctgagccctgagaacgtggatgatgtgctggccgtggccactttcctccaaatgcaggacatcatcacggcctgccatgccctcaagtcacttgctgagccggctaccagccctgggggaaatgcggaggccttggccacagaaggaggggacaagagagccaaagaggagaaggtggccaccagcacgctgagcaggctggagcaggcaggacgcagcacacccataggccccagcagggacctcaaggaggagcgcggcggtcaggcccagagtgcggccagcggtgcagagcagacagagaaagccgatgcgccccgggagccgccgcctgtggagctcaagccagaccccacgagtggcatggctgctgcagaagctgaggccgctttgtccgagagctcggagcaagaaatggaggtggagcccgcccggaaaggggaagaggagcaaaaggagcaagaggagcaagaggaggagggcgcagggccagctgaggtcaaggaggagggttcccagctggagaacggagaggcccccgaggagaacgagaatgaggagtcagcgggcacagactcggggcaggagctcggctccgaggcccggggcctgcgctcaggcacctacggcgaccgcacggagtccaaggcctacggctccgtcatccacaagtgcgaggactgtgggaaggagttcacgcacacggggaacttcaagcggcacatccgcatccacacgggggagaagcccttctcgtgccgggagtgcagcaaggccttttccgacccggccgcgtgcaaggcccatgagaagacgcacagccctctgaagccctacggctgcgaggagtgcgggaagagctaccgcctcatcagcctgctgaacctgcacaagaagcggcactcgggcgaggcgcgctaccgctgcgaggactgcggcaagctcttcaccacctcgggcaacctcaagcgccaccagctggtgcacagcggcgagaagccctaccagtgcgactactgcggccgctccttctccgaccccacttccaagatgcgccacctggagacccacgacacggacaaggagcacaagtgcccacactgcgacaagaagttcaaccagggaacctgaagcggcaccttcggatccacagcggggagaagccctacgtgtgcatccactgccagcgacagtttgcagaccccggcgctctgcagcggcacgtccgcattcacacaggtgagaagccatgccagtgtgtgatgtgcggtaaggccttcacccaggccagctccctcatcgcccacgtgcgccagcacaccggggagaagccctacgtctgcgagcgctgcggcaagagattcgtccagtccagccagttggccaatcatattcgccaccacgacaacatccgcccacacaagtgcagcgtgtgcagcaaggccttcgtgaacgtgggggacctgtccaagcacatcatcattcacactggagagaagccttacctgtgtgataagtgtgggcgtggcttcaaccgggtagacaacctgcgctcccacgtgaagaccgtgcaccagggcaaggcaggcatcaagatcctggagcccgaggagggcagtgaggtcagcgtggtcactgtggatgacatggtcacgctggctaccgaggcactggcagcgacagccgtcactcagctcacagtggtgccggtgggagctgcagtgacagccgatgagacggaagtcctgaaggccgagatcagcaaagctgtgaagcaagtgcaggaagaagaccccaacactcacatcctctacgcctgtgactcctgtggggacaagtttctggatgccaacagcctggctcagcatgtgcgaatccacacagcccaggcactggtcatgttccagacagacgcggacttctatcagcagtatgggccaggtggcacgtggcctgccgggcaggtgctgcaggctggggagctggtcttccgccctcgcgacggggctgagggccagcccgcactggcagagacctcccctacagctcctgaatgtcccccgcctgccgagtgagctggcggcccttctgactgtttatttaaggatggatggcaccctggaaccgggaagggtggcctgttccctagagagaataaattggattattttct

SEQ ID NO: 34687 - DNA, 2770 bp, Homo sapiens
  source 1..2770: mol_type = unassigned DNA
atgcgccggaagttgcagccgggaagcctgcgaggtcggttccgcccgactctaacatggcggcgccctttgtctgctctggagtgccgtccccggccttctcgcggccgtgatgcacctccctctgcggtggggtccgggacatggcaggtaatgagccggacgaggggagccaagctggagtttacacaggcaaactgtcagaaaagagtagcctgggctgtctggaaatctgagccatggactttccccagcacagccagcatgtcttggaacagctgaaccagcagcggcagctggggcttctctgtgactgcacctttgtggtggacggtgttcactttaaggctcataaagcagtgctggcggcctgcagcgagtacttcaagatgctcttcgtggaccagaaggacgtggtgcacctggacatcagtaacgcggcaggcctggggcaggtgctggagtttatgtacacggccaagctgagcctgagccctgagaacgtggatgatgtgctggccgtggccactttcctccaaatgcaggacatcatcacggcctgccatgccctcaagtcacttgctgagccggctaccagccctgggggaaatgcggaggccttggccacagaaggaggggacaagagagccaaagaggagaaggtggccaccagcacgctgagcaggctggagcaggcaggacgcagcacacccataggccccagcagggacctcaaggaggagcgcggcggtcaggcccagagtgcggccagcggtgcagagcagacagagaaagccgatgcgccccgggagccgccgcctgtggagctcaagccagaccccacgagtggcatggctgctgcagaagctgaggccgctttgtccgagagctcggagcaagaaatggaggtggagcccgcccggaaaggggaagaggagcaaaaggagcaagaggagcaagaggaggagggcgcagggccagctgaggtcaaggaggagggttcccagctggagaacggagaggcccccgaggagaacgagaatgaggagtcagcgggcacagactcggggcaggagctcggctccgaggcccggggcctgcgctcaggcacctacggcgaccgcacggagtccaaggcctacggctccgtcatccacaagtgcgaggactgtgggaaggagttcacgcacacggggaacttcaagcggcacatccgcatccacacgggggagaagcccttctcgtgccgggagtgcagcaaggccttttccgacccggccgcgtgcaaggcccatgagaagacgcacagccctctgaagccctacggctgcgaggagtgcgggaagagctaccgcctcatcagcctgctgaacctgcacaagaagcggcactcgggcgaggcgcgctaccgctgcgaggactgcggcaagctcttcaccacctcgggcaacctcaagcgccaccagctggtgcacagcggcgagaagccctaccagtgcgactactgcggccgctccttctccgaccccacttccaagatgcgccacctggagacccacgacacggacaaggagcacaagtgcccacactgcgacaagaagttcaaccaggtagggaacctgaaggcccacctgaagatccacatcgctgacgggcccctcaagtgccgagagtgtgggaagcagttcaccacctcagggaacctgaagcggcaccttcggatccacagcggggagaagccctacgtgtgcatccactgccagcgacagtttgcagaccccggcgctctgcagcggcacgtccgcattcacacaggtgagaagccatgccagtgtgtgatgtgcggtaaggccttcacccaggccagctccctcatcgcccacgtgcgccagcacaccggggagaagccctacgtctgcgagcgctgcggcaagagattcgtccagtccagccagttggccaatcatattcgccaccacgacaacatccgcccacacaagtgcagcgtgtgcagcaaggccttcgtgaacgtgggggacctgtccaagcacatcatcattcacactggagagaagccttacctgtgtgataagtgtgggcgtggcttcaaccgggtagacaacctgcgctcccacgtgaagaccgtgcaccagggcaaggcaggcatcaagatcctggagcccgaggagggcagtgaggtcagcgtggtcactgtggatgacatggtcacgctggctaccgaggcactggcagcgacagccgtcactcagctcacaggccctgcgactctgcccgcagtggtgccggtgggagctgcagtgacagccgatgagacggaagtcctgaaggccgagatcagcaaagctgtgaagcaagtgcaggaagaagaccccaacactcacatcctctacgcctgtgactcctgtggggacaagtttctggatgccaacagcctggctcagcatgtgcgaatccacacagcccaggcactggtcatgttccagacagacgcggacttctatcagcagtatgggccaggtggcacgtggcctgccgggcaggtgctgcaggctggggagctggtcttccgccctcgcgacggggctgagggccagcccgcactggcagagacctcccctacagctcctgaatgtcccccgcctgccgagtgagctggcggcccttctgactgtttatttaaggatggatggcaccctggaaccgggaagggtggcctgttccctagagagaataaattggattattttct

SEQ ID NO: 34688 - DNA, 2745 bp, Homo sapiens
  source 1..2745: mol_type = unassigned DNA
cggaagttgcagccgggaagcctgcgaggtcggttccgcccgactctaacatggcggcgccctttgtctgctctggagtgccgtccccggccttctcgcggccgtgatgcacctccctctgcggtggggtccgggacatggcaggtaatgagccggacgaggggagccaagctggagtttacacaggcaaactgtcagaaaagagtagcctgggctgtctggaaatctgagccatggactttccccagcacagccagcatgtcttggaacagctgaaccagcagcggcagctggggcttctctgtgactgcacctttgtggtggacggtgttcactttaaggctcataaagcagtgctggcggcctgcagcgagtacttcaagatgctcttcgtggaccagaaggacgtggtgcacctggacatcagtaacgcggcaggcctggggcaggtgctggagtttatgtacacggccaagctgagcctgagccctgagaacgtggatgatgtgctggccgtggccactttcctccaaatgcaggacatcatcacggcctgccatgccctcaagtcacttgctgagccggctaccagccctgggggaaatgcggaggccttggccacagaaggaggggacaagagagccaaagaggagaaggtggccaccagcacgctgagcaggctggagcaggcaggacgcagcacacccataggccccagcagggacctcaaggaggagcgcggcggtcaggcccagagtgcggccagcggtgcagagcagacagagaaagccgatgcgccccgggagccgccgcctgtggagctcaagccagaccccacgagtggcatggctgctgcagaagctgaggccgctttgtccgagagctcggagcaagaaatggaggtggagcccgcccggaaaggggaagaggagcaaaaggagcaagaggagcaagaggaggagggcgcagggccagctgaggtcaaggaggagggttcccagctggagaacggagaggcccccgaggagaacgagaatgaggagtcagcgggcacagactcggggcaggagctcggctccgaggcccggggcctgcgctcaggcacctacggcgaccgcacggagtccaaggcctacggctccgtcatccacaagtgcgaggactgtgggaaggagttcacgcacacggggaacttcaagcggcacatccgcatccacacgggggagaagcccttctcgtgccgggagtgcagcaaggccttttccgacccggccgcgtgcaaggcccatgagaagacgcacagccctctgaagccctacggctgcgaggagtgcgggaagagctaccgcctcatcagcctgctgaacctgcacaagaagcggcactcgggcgaggcgcgctaccgctgcgaggactgcggcaagctcttcaccacctcgggcaacctcaagcgccaccagctggtgcacagcggcgagaagccctaccagtgcgactactgcggccgctccttctccgaccccacttccaagatgcgccacctggagacccacgacacggacaaggagcacaagtgcccacactgcgacaagaagttcaaccaggtagggaacctgaaggcccacctgaagatccacatcgctgacgggcccctcaagtgccgagagtgtgggaagcagttcaccacctcagggaacctgaagcggcaccttcggatccacagcggggagaagccctacgtgtgcatccactgccagcgacagtttgcagaccccggcgctctgcagcggcacgtccgcattcacacaggtgagaagccatgccagtgtgtgatgtgcggtaaggccttcacccaggccagctccctcatcgcccacgtgcgccagcacaccggggagaagccctacgtctgcgagcgctgcggcaagagattcgtccagtccagccagttggccaatcatattcgccaccacgacaacatccgcccacacaagtgcagcgtgtgcagcaaggccttcgtgaacgtgggggacctgtccaagcacatcatcattcacactggagagaagccttacctgtgtgataagtgtgggcgtggcttcaaccgggtagacaacctgcgctcccacgtgaagaccgtgcaccagggcaaggcaggcatcaagatcctggagcccgaggagggcagtgaggtcagcgtggtcactgtggatgacatggtcacgctggctaccgaggcactggcagcgacagccgtcactcagctcacagtggtgccggtgggagctgcagtgacagccgatgagacggaagtcctgaaggccgagatcagcaaagctgtgaagcaagtgcaggaagaagaccccaacactcacatcctctacgcctgtgactcctgtggggacaagtttctggatgccaacagcctggctcagcatgtgcgaatccacacagcccaggcactggtcatgttccagacagacgcggacttctatcagcagtatgggccaggtggcacgtggcctgccgggcaggtgctgcaggctggggagctggtcttccgccctcgcgacggggctgagggccagcccgcactggcagagacctcccctacagctcctgaatgtcccccgcctgccgagtgagctggcggcccttctgactgtttatttaaggatggatggcaccctggaaccgggaagggtggcctgttccctagagagaataaattggattattttctaa

SEQ ID NO: 34689 - DNA, 731 bp, Homo sapiens
  source 1..731: mol_type = unassigned DNA
gtccaagcacatcatcattcacactggagagaagccttacctgtgtgataagtgtgggcgtggcttcaaccgggtagacaacctgcgctcccacgtgaagaccgtgcaccagggcaaggcaggcatcaagatcctggagcccgaggagggcagtgaggtcagcgtggtcactgtggatgacatggtcacgctggctaccgaggcactggcagcgacagccgtcactcagctcacaggccctgcgactctgcccgcagtggtgccggtgggagctgcagtgacagccgatgagacggaagtcctgaaggccgagatcagcaaagctgtgaagcaagtgcaggaagaagaccccaacactcacatcctctacgcctgtgactcctgtggggacaagtttctggatgccaacagcctggctcagcatgtgcgaatccacacagcccaggcactggtcatgttccagacagacgcggacttctatcagcagtatgggccaggtggcacgtggcctgccgggcaggtgctgcaggctggggagctggtcttccgccctcgcgacggggctgagggccagcccgcactggcagagacctcccctacagctcctgaatgtcccccgcctgccgagtgagctggcggcccttctgactgtttatttaaggatggatggcaccctggaaccgggaagggtggcctgttccctagagagaataaattggattattttctaa

SEQ ID NO: 34690 - DNA, 722 bp, Homo sapiens
  source 1..722: mol_type = unassigned DNA
gagaagccctaccagtgcgactactgcggccgctccttctccgaccccacttccaagatgcgccacctggagacccacgacacggacaaggagcacaagtgcccacactgcgacaagaagttcaaccagggaacctgaagcggcaccttcggatccacagcggggagaagccctacgtgtgcatccactgccagcgacagtttgcagaccccggcgctctgcagcggcacgtccgcattcacacaggtgagaagccatgccagtgtgtgatgtgcggtaaggccttcacccaggccagctccctcatcgcccacgtgcgccagcacaccggggagaagccctacgtctgcgagcgctgcggcaagagattcgtccagtccagccagttggccaatcatattcgccaccacgacaacatccgcccacacaagtgcagcgtgtgcagcaaggccttcgtgaacgtgggggacctgtccaagcacatcatcattcacactggagagaagccttacctgtgtgataagtgtgggcgtggcttcaaccgggtagacaacctgcgctcccacgtgaagaccgtgcaccagggcaaggcaggcatcaagatcctggagcccgaggagggcagtgaggtcagcgtggtcactgtggatgacatggtcacgctggctaccgaggcactggcagcgacagccgtcactcagctcacagtggtgccggtggga

SEQ ID NO: 34691 - DNA, 2506 bp, Homo sapiens
  source 1..2506: mol_type = unassigned DNA
atgcgccggaagttgcagccgggaagcctgcgaggtcggttccgcccgactctaacatggcggcgccctttgtctgctctggagtgccgtccccggccttctcgcggccgtgatgcacctccctctgcggtggggtccgggacatggcaggtaatgagccggacgaggggagccaagctggagtttacacaggcaaactgtcagaaaagagtagcctgggctgtctggaaatctgagccatggactttccccagcacagccagcatgtcttggaacagctgaaccagcagcggcagctggggcttctctgtgactgcacctttgtggtggacggtgttcactttaaggctcataaagcagtgctggcggcctgcagcgagtacttcaagatgctcttcgtggaccagaaggacgtggtgcacctggacatcagtaacgcggcaggcctggggcaggtgctggagtttatgtacacggccaagctgagcctgagccctgagaacgtggatgatgtgctggccgtggccccaggtgcagagcagacagagaaagccgatgcgccccgggagccgccgcctgtggagctcaagccagaccccacgagtggcatggctgctgcagaagctgaggccgctttgtccgagagctcggagcaagaaatggaggtggagcccgcccggaaaggggaagaggagcaaaaggagcaagaggagcaagaggaggagggcgcagggccagctgaggtcaaggaggagggttcccagctggagaacggagaggcccccgaggagaacgagaatgaggagtcagcgggcacagactcggggcaggagctcggctccgaggcccggggcctgcgctcaggcacctacggcgaccgcacggagtccaaggcctacggctccgtcatccacaagtgcgaggactgtgggaaggagttcacgcacacggggaacttcaagcggcacatccgcatccacacgggggagaagcccttctcgtgccgggagtgcagcaaggccttttccgacccggccgcgtgcaaggcccatgagaagacgcacagccctctgaagccctacggctgcgaggagtgcgggaagagctaccgcctcatcagcctgctgaacctgcacaagaagcggcactcgggcgaggcgcgctaccgctgcgaggactgcggcaagctcttcaccacctcgggcaacctcaagcgccaccagctggtgcacagcggcgagaagccctaccagtgcgactactgcggccgctccttctccgaccccacttccaagatgcgccacctggagacccacgacacggacaaggagcacaagtgcccacactgcgacaagaagttcaaccaggtagggaacctgaaggcccacctgaagatccacatcgctgacgggcccctcaagtgccgagagtgtgggaagcagttcaccacctcagggaacctgaagcggcaccttcggatccacagcggggagaagccctacgtgtgcatccactgccagcgacagtttgcagaccccggcgctctgcagcggcacgtccgcattcacacaggtgagaagccatgccagtgtgtgatgtgcggtaaggccttcacccaggccagctccctcatcgcccacgtgcgccagcacaccggggagaagccctacgtctgcgagcgctgcggcaagagattcgtccagtccagccagttggccaatcatattcgccaccacgacaacatccgcccacacaagtgcagcgtgtgcagcaaggccttcgtgaacgtgggggacctgtccaagcacatcatcattcacactggagagaagccttacctgtgtgataagtgtgggcgtggcttcaaccgggtagacaacctgcgctcccacgtgaagaccgtgcaccagggcaaggcaggcatcaagatcctggagcccgaggagggcagtgaggtcagcgtggtcactgtggatgacatggtcacgctggctaccgaggcactggcagcgacagccgtcactcagctcacagtggtgccggtgggagctgcagtgacagccgatgagacggaagtcctgaaggccgagatcagcaaagctgtgaagcaagtgcaggaagaagaccccaacactcacatcctctacgcctgtgactcctgtggggacaagtttctggatgccaacagcctggctcagcatgtgcgaatccacacagcccaggcactggtcatgttccagacagacgcggacttctatcagcagtatgggccaggtggcacgtggcctgccgggcaggtgctgcaggctggggagctggtcttccgccctcgcgacggggctgagggccagcccgcactggcagagacctcccctacagctcctgaatgtcccccgcctgccgagtgagctggcggcccttctgactgtttatttaaggatggatggcaccctggaaccgggaagggtggcctgttccctagagagaataaattggattattttct

SEQ ID NO: 34692 - DNA, 1851 bp, Homo sapiens
  source 1..1851: mol_type = unassigned DNA
gcccgactctaacatggcggcgccctttgtctgctctggagtgccgtccccggccttctcgcggccgtgatgcacctccctctgcggtggggtccgggacatggcaggtaatgagccggacgaggggagccaagctggagtttacacaggcaaactgtcagaaaagagtagcctgggctgtctggaaatctgagccatggactttccccagcacagccagcatgtcttggaacagctgaaccagcagcggcagctggggcttctctgtgactgcacctttgtggtggacggtgttcactttaaggctcataaagcagtgctggcggcctgcagcgagtacttcaagatgctcttcgtggaccagaaggacgtggtgcacctggacatcagtaacgcggcaggaggggacaagagagccaaagaggagaaggtggccaccagcacgctgagcaggctggagcaggcaggacgcagcacacccataggccccagcagggacctcaaggaggagcgcggcggtcaggcccagagtgcggccagcggtgcagagcagacagagaaagccgatgcgccccgggagccgccgcctgtggagctcaagccagaccccacgagtggcatggctgctgcagaagctgaggccgctttgtccgagagctcggagcaagaaatggaggtggagcccgcccggaaaggggaagaggagcaaaaggagcaagaggagcaagaggaggagggcgcagggccagctgaggtcaaggaggagggttcccagctggagaacggagaggcccccgaggagaacgagaatgaggagtcagcgggcacagactcggggcaggagctcggctccgaggcccggggcctgcgctcaggcacctacggcgaccgcacggagtccaaggcctacggctccgtcatccacaagtgcgaggactgtgggaaggagttcacgcacacggggaacttcaagcggcacatccgcatccacacgggggagaagcccttctcgtgccgggagtgcagcaaggccttttccgacccggccgcgtgcaaggcccatgagaagacgcacagccctctgaagccctacggctgcgaggagtgcgggaagagctaccgcctcatcagcctgctgaacctgcacaagaagcggcactcgggcgaggcgcgctaccgctgcgaggactgcggcaagctcttcaccacctcgggcaacctcaagcgccaccagctggtgcacagcggcgagaagccctaccagtgcgactactgcggccgctccttctccgaccccacttccaagatgcgccacctggagacccacgacacggacaaggagcacaagtgcccacactgcgacaagaagttcaaccaggtgtgcggacccctcccggaaccagcgcctggcagccgccggtggccgcagccgcatgcatgccacgtggtggggcgggcggggagcacagccccggcctccaggagctcatcagcttgttcacccaggaaacaggcgcagcgagagccacttccgcgggggagctcccggttgctctgcggagggcaggccgactcagggcggggtttggtcctgaaaaaatggggtggggcggcttacctctcaccgctgggacctgggacctctcctgacccaggagagatagagcccttcacggaccctggcaagcctgagagtcaattgttcctttgtgggaggggcaggtgagggggcccggggccgagctctgtggggtggcccccctgacccctccctgggcacaggtagggaacctgaaggcccacctgaagatccacatcgctgacgggcccctcaagtgccgagagtgtggg

SEQ ID NO: 34693 - DNA, 2511 bp, Homo sapiens
  source 1..2511: mol_type = unassigned DNA
aacatggcggcgccctttgtctgctctggagtgccgtccccggccttctcgcggccgtgatgcacctccctctgcggtggggtccgggacatggcaggtaatgagccggacgaggggagccaagctggagtttacacaggcaaactgtcagaaaagagtagcctgggctgtctggaaatctgaggcctggggcaggtgctggagtttatgtacacggccaagctgagcctgagccctgagaacgtggatgatgtgctggccgtggccactttcctccaaatgcaggacatcatcacggcctgccatgccctcaagtcacttgctgagccggctaccagccctgggggaaatgcggaggccttggccacagaaggtctgccctgttccatctccaggaggggacaagagagccaaagaggagaaggtggccaccagcacgctgagcaggctggagcaggcaggacgcagcacacccataggccccagcagggacctcaaggaggagcgcggcggtcaggcccagagtgcggccagcggtgcagagcagacagagaaagccgatgcgccccgggagccgccgcctgtggagctcaagccagaccccacgagtggcatggctgctgcagaagctgaggccgctttgtccgagagctcggagcaagaaatggaggtggagcccgcccggaaaggggaagaggagcaaaaggagcaagaggagcaagaggaggagggcgcagggccagctgaggtcaaggaggagggttcccagctggagaacggagaggcccccgaggagaacgagaatgaggagtcagcgggcacagactcggggcaggagctcggctccgaggcccggggcctgcgctcaggcacctacggcgaccgcacggagtccaaggcctacggctccgtcatccacaagtgcgaggactgtgggaaggagttcacgcacacggggaacttcaagcggcacatccgcatccacacgggggagaagcccttctcgtgccgggagtgcagcaaggccttttccgacccggccgcgtgcaaggcccatgagaagacgcacagccctctgaagccctacggctgcgaggagtgcgggaagagctaccgcctcatcagcctgctgaacctgcacaagaagcggcactcgggcgaggcgcgctaccgctgcgaggactgcggcaagctcttcaccacctcgggcaacctcaagcgccaccagctggtgcacagcggcgagaagccctaccagtgcgactactgcggccgctccttctccgaccccacttccaagatgcgccacctggagacccacgacacggacaaggagcacaagtgcccacactgcgacaagaagttcaaccaggtagggaacctgaaggcccacctgaagatccacatcgctgacgggcccctcaagtgccgagagtgtgggaagcagttcaccacctcagggaacctgaagcggcaccttcggatccacagcggggagaagccctacgtgtgcatccactgccagcgacagtttgcagaccccggcgctctgcagcggcacgtccgcattcacacaggtgagaagccatgccagtgtgtgatgtgcggtaaggccttcacccaggccagctccctcatcgcccacgtgcgccagcacaccggggagaagccctacgtctgcgagcgctgcggcaagagattcgtccagtccagccagttggccaatcatattcgccaccacgacaacatccgcccacacaagtgcagcgtgtgcagcaaggccttcgtgaacgtgggggacctgtccaagcacatcatcattcacactggagagaagccttacctgtgtgataagtgtgggcgtggcttcaaccgggtagacaacctgcgctcccacgtgaagaccgtgcaccagggcaaggcaggcatcaagatcctggagcccgaggagggcagtgaggtcagcgtggtcactgtggatgacatggtcacgctggctaccgaggcactggcagcgacagccgtcactcagctcacagtggtgccggtgggagctgcagtgacagccgatgagacggaagtcctgaaggccgagatcagcaaagctgtgaagcaagtgcaggaagaagaccccaacactcacatcctctacgcctgtgactcctgtggggacaagtttctggatgccaacagcctggctcagcatgtgcgaatccacacagcccaggcactggtcatgttccagacagacgcggacttctatcagcagtatgggccaggtggcacgtggcctgccgggcaggtgctgcaggctggggagctggtcttccgccctcgcgacggggctgagggccagcccgcactggcagagacctcccctacagctcctgaatgtcccccgcctgccgagtgagctggcggcccttctgactgtttatttaaggatggatggcaccctggaaccgggaagggtggcctgttccctagagagaataaattggattattttct

SEQ ID NO: 34694 - DNA, 2956 bp, Homo sapiens
  source 1..2956: mol_type = unassigned DNA
ggggcggggggaagtttaggagttgaggaaagaagattaaagagcgcgaggagacaaataaaaagaagtgttaagaattgcctttgggactctgaaggctgaagaattgatgaattgcaagtttgtgccccatagctgcacagactgcctgaagttacatttagagactgaaatcactgcaccttaaaaacaaaagattgagctgcactgtattcctaatgtttcatcattactaacaggatattcctcatgacattgctgtctgatctttgaccatcagtctgtgacctgccccttctctttacatgcagccgctctctgctccctgccccaatgaacatctgcactaggcccaagccttggagtaatttacctgaagagtgacaccattgattttgaaactactgaagaaacccaagacagctgaaaaccagaaggcatctgaggagaatgagattactcagccgggtggatccagcgccaagccgggccttccctgcctgaactttgaagctgttttgtctccagacccagccctcatccactcaacacattcactgacaaactctcacgctcacaccgggtcatctgattgtgacatcagttgcaaggggatgaccgagcgcattcacagcatcaaccttcacaacttcagcaattccgtgctcgagaccctcaacgagcagcgcaaccgtggccacttctgtgacgtaacggtgcgcatccacgggagcatgctgcgcgcacaccgctgcgtgctggcagccggcagccccttcttccaggacaaactgctgcttggctacagcgacatcgagatcccgtcggtggtgtcagtgcagtcagtgcaaaagctcattgacttcatgtacagcggcgtgctacgggtctcgcagtcggaagctctgcagatcctcacggccgccagcatcctgcagatcaaaacagtcatcgacgagtgcacgcgcatcgtgtcacagaacgtgggcgatgtgttcccggggatccaggactcgggccaggacacgccgcggggcactcccgagtcaggcacgtcaggccagagcagcgacacggagtcgggctacctgcagagccacccacagcacagcgtggacaggatctactcggcactctacgcgtgctccatgcagaatggcagcggcgagcgctctttttacagcggcgcagtggtcagccaccacgagactgcgctcggcctgccccgcgaccaccacatggaagaccccagctggatcacacgcatccatgagcgctcgcagcagatggagcgctacctgtccaccacccccgagaccacgcactgccgcaagcagccccggcctgtgcgcatccagaccctagtgggcaacatccacatcaagcaggagatggaggacgattacgactactacgggcagcaaagggtgcagatcctggaacgcaacgaatccgaggagtgcacggaagacacagaccaggccgagggcaccgagagtgagcccaaaggtgaaagcttcgactcgggcgtcagctcctccataggcaccgagcctgactcggtggagcagcagtttgggcctggggcggcgcgggacagccaggctgaacccacccaacccgagcaggctgcagaagcccccgctgagggtggtccgcagacaaaccagctagaaacaggtgcttcctctccggagagaagcaatgaagtggagatggacagcactgttatcactgtcagcaacagctccgacaagagcgtcctacaacagccttcggtcaacacgtccatcgggcagccattgccaagtacccagctctacttacgccagacagaaaccctcaccagcaacctgaggatgcctctgaccttgaccagcaacacgcaggtcattggcacagctggcaacacctacctgccagccctcttcactacccagcccgcgggcagtggccccaagcctttcctcttcagcctgccacagcccctggcaggccagcagacccagtttgtgacagtgtcccagcccggtctgtcgacctttactgcacagctgccagcgccacagcccctggcctcatccgcaggccacagcacagccagtgggcaaggcgaaaaaaagccttatgagtgcactctctgcaacaagactttcaccgccaaacagaactacgtcaagcacatgttcgtacacacaggtgagaagccccaccaatgcagcatctgttggcgctccttctccttaaaggattaccttatcaagcacatggtgacacacacaggagtgagggcataccagtgtagtatctgcaacaagcgcttcacccagaagagctccctcaacgtgcacatgcgcctccaccggggagagaagtcctacgagtgctacatctgcaaaaagaagttctctcacaagaccctcctggagcgacacgtggccctgcacagtgccagcaatgggaccccccctgcaggcacacccccaggtgcccgcgctggccccccaggcgtggtggcctgcacggaggggaccacttacgtctgctccgtctgcccagcaaagtttgaccaaatcgagcagttcaacgaccacatgaggatgcatgtgtctgacggataagtagtatctttctctctttcttatgaacaaaacaaaacaacaacaaaaaacaaacaaacaaaaaagctatggcactagaatttaagaaatgttttggtttcatttttactttctgtttttgtttttgtttcgtttcattttgtactacatgaagaactgttttttgcctgctggtacattacatttccggaggcttgggtgaataatagttttcccagtctccctcggatggtggccttaaggcctggtagtgcttcaagaggtccactggttggatctctagctactggcctctaaatacaacccttctttacaaaaaaatcttttaaaaaaaa

SEQ ID NO: 34695 - DNA, 3323 bp, Homo sapiens
  source 1..3323: mol_type = unassigned DNA
acttgttgcttacggtacagtccagcatgagctggaaatgtaggaacctcagcctcccgagcagaaagaatctttgaccatcagtctgtgacctgccccttctctttacatgcagccgctctctgctccctgccccaatgaacatctgcactaggcccaagccttggagtaatttacctgaagagtgacaccattgattttgaaactactgaagaaacccaagacagctgaaaaccagaaggcatctgaggagaatgagattactcagccgggtggatccagcgccaagccgggccttccctgcctgaactttgaagctgttttgtctccagacccagccctcatccactcaacacattcactgacaaactctcacgctcacaccgggtcatctgattgtgacatcagttgcaaggggatgaccgagcgcattcacagcatcaaccttcacaacttcagcaattccgtgctcgagaccctcaacgagcagcgcaaccgtggccacttctgtgacgtaacggtgcgcatccacgggagcatgctgcgcgcacaccgctgcgtgctggcagccggcagccccttcttccaggacaaactgctgcttggctacagcgacatcgagatcccgtcggtggtgtcagtgcagtcagtgcaaaagctcattgacttcatgtacagcggcgtgctacgggtctcgcagtcggaagctctgcagatcctcacggccgccagcatcctgcagatcaaaacagtcatcgacgagtgcacgcgcatcgtgtcacagaacgtgggcgatgtgttcccggggatccaggactcgggccaggacacgccgcggggcactcccgagtcaggcacgtcaggccagagcagcgacacggagtcgggctacctgcagagccacccacagcacagcgtggacaggatctactcggcactctacgcgtgctccatgcagaatggcagcggcgagcgctctttttacagcggcgcagtggtcagccaccacgagactgcgctcggcctgccccgcgaccaccacatggaagaccccagctggatcacacgcatccatgagcgctcgcagcagatggagcgctacctgtccaccacccccgagaccacgcactgccgcaagcagccccggcctgtgcgcatccagaccctagtgggcaacatccacatcaagcaggagatggaggacgattacgactactacgggcagcaaagggtgcagatcctggaacgcaacgaatccgaggagtgcacggaagacacagaccaggccgagggcaccgagagtgagcccaaaggtgaaagcttcgactcgggcgtcagctcctccataggcaccgagcctgactcggtggagcagcagtttgggcctggggcggcgcgggacagccaggctgaacccacccaacccgagcaggctgcagaagcccccgctgagggtggtccgcagacaaaccagctagaaacaggtgcttcctctccggagagaagcaatgaagtggagatggacagcactgttatcactgtcagcaacagctccgacaagagcgtcctacaacagccttcggtcaacacgtccatcgggcagccattgccaagtacccagctctacttacgccagacagaaaccctcaccagcaacctgaggatgcctctgaccttgaccagcaacacgcaggtcattggcacagctggcaacacctacctgccagccctcttcactacccagcccgcgggcagtggccccaagcctttcctcttcagcctgccacagcccctggcaggccagcagacccagtttgtgacagtgtcccagcccggtctgtcgacctttactgcacagctgccagcgccacagcccctggcctcatccgcaggccacagcacagccagtgggcaaggcgaaaaaaagccttatgagtgcactctctgcaacaagactttcaccgccaaacagaactacgtcaagcacatgttcgtacacacaggtgagaagccccaccaatgcagcatctgttggcgctccttctccttaaaggattaccttatcaagcacatggtgacacacacaggagtgagggcataccagtgtagtatctgcaacaagcgcttcacccagaagagctccctcaacgtgcacatgcgcctccaccggggagagaagtcctacgagtgctacatctgcaaaaagaagttctctcacaagaccctcctggagcgacacgtggccctgcacagtgccagcaatgggaccccccctgcaggcacacccccaggtgcccgcgctggccccccaggcgtggtggcctgcacggaggggaccacttacgtctgctccgtctgcccagcaaagtttgaccaaatcgagcagttcaacgaccacatgaggatgcatgtgtctgacggataagtagtatctttctctctttcttatgaacaaaacaaaacaacaacaaaaaacaaacaaacaaaaaagctatggcactagaatttaagaaatgttttggtttcatttttactttctgtttttgtttttgtttcgtttcattttgtactacatgaagaactgttttttgcctgctggtacattacatttccggaggcttgggtgaataatagttttcccagtctccctcggatggtggccttaaggcctggtagtgcttcaagaggtccactggttggatctctagctactggcctctaaatacaacccttctttacaaaaaaatcttttaaaaaaaagtaaaaaaaaaaaaaaaatttccacttgtgaagagcactacaaaaaatatataacaaaatctaaaaggcctactgtctttaagtacaccgcttgcagtgtttcagtggacattttcacaattctggccgcttggacttcacagtaaccagttaaaactgtggaatatcacttctggttgaaaacccagaggaaaggccctgctgttttccacctaccacgttgtctgatttcataaaagggctgtgggggtgggaagggcagtgggttcggtggtgtgggaaagaaagacgaatggcaggcttcttccccagattctgcccgggtccacacaccctggcccaccttctccatatccccctcttgcagcagaagccaggaagacttggacaagcaacaagcaacagtggctatcgtatttattcagtgtcttcgctgagccacagcctcagcacaatcaagagggactttcatgaaaggcaggaatgcagataaaacaaagatatcagaaatttgcacctatgtttctaggtacaagagaaggattatttccaacaatctttgc

SEQ ID NO: 34696 - DNA, 3740 bp, Homo sapiens
  source 1..3740: mol_type = unassigned DNA
ggaattttatctctgctcacagtctacattacaacattagttcattctgggcactttagcttccttgaatctccagttgatctcacacccatgcctatgatattcttctcctggttaatcaagaattctctatttctgctccgtcatccatgccactacaaataaaaagaagtgttaagaattgcctttgggactctgaaggctgaagaattgatgaattgcaagtttgtgccccatagctgcacagcctatgtctaagcacagctcatcttcacaaactgaagtggatcttgatttctggaaatgtccaaataatgacaacaaccccatggaggtggatacatcagagtcagctggaggtggtcagaattatttgcaatgtttgggaaagcacctaccaaggcttcctattacctatttcacagaatgtttcatcattactaacaggatattcctcatgacattgctgtctgatctttgaccatcagtctgtgacctgccccttctctttacatgcagccgctctctgctccctgccccaatgaacatctgcactaggcccaagccttggagtaatttacctgaagagtgacaccattgattttgaaactactgaagaaacccaagacagctgaaaaccagaaggcatctgaggagaatgagattactcagccgggtggatccagcgccaagccgggccttccctgcctgaactttgaagctgttttgtctccagacccagccctcatccactcaacacattcactgacaaactctcacgctcacaccgggtcatctgattgtgacatcagttgcaaggggatgaccgagcgcattcacagcatcaaccttcacaacttcagcaattccgtgctcgagaccctcaacgagcagcgcaaccgtggccacttctgtgacgtaacggtgcgcatccacgggagcatgctgcgcgcacaccgctgcgtgctggcagccggcagccccttcttccaggacaaactgctgcttggctacagcgacatcgagatcccgtcggtggtgtcagtgcagtcagtgcaaaagctcattgacttcatgtacagcggcgtgctacgggtctcgcagtcggaagctctgcagatcctcacggccgccagcatcctgcagatcaaaacagtcatcgacgagtgcacgcgcatcgtgtcacagaacgtgggcgatgtgttcccggggatccaggactcgggccaggacacgccgcggggcactcccgagtcaggcacgtcaggccagagcagcgacacggagtcgggctacctgcagagccacccacagcacagcgtggacaggatctactcggcactctacgcgtgctccatgcagaatggcagcggcgagcgctctttttacagcggcgcagtggtcagccaccacgagactgcgctcggcctgccccgcgaccaccacatggaagaccccagctggatcacacgcatccatgagcgctcgcagcagatggagcgctacctgtccaccacccccgagaccacgcactgccgcaagcagccccggcctgtgcgcatccagaccctagtgggcaacatccacatcaagcaggagatggaggacgattacgactactacgggcagcaaagggtgcagatcctggaacgcaacgaatccgaggagtgcacggaagacacagaccaggccgagggcaccgagagtgagcccaaaggtgaaagcttcgactcgggcgtcagctcctccataggcaccgagcctgactcggtggagcagcagtttgggcctggggcggcgcgggacagccaggctgaacccacccaacccgagcaggctgcagaagcccccgctgagggtggtccgcagacaaaccagctagaaacaggtgcttcctctccggagagaagcaatgaagtggagatggacagcactgttatcactgtcagcaacagctccgacaagagcgtcctacaacagccttcggtcaacacgtccatcgggcagccattgccaagtacccagctctacttacgccagacagaaaccctcaccagcaacctgaggatgcctctgaccttgaccagcaacacgcaggtcattggcacagctggcaacacctacctgccagccctcttcactacccagcccgcgggcagtggccccaagcctttcctcttcagcctgccacagcccctggcaggccagcagacccagtttgtgacagtgtcccagcccggtctgtcgacctttactgcacagctgccagcgccacagcccctggcctcatccgcaggccacagcacagccagtgggcaaggcgaaaaaaagccttatgagtgcactctctgcaacaagactttcaccgccaaacagaactacgtcaagcacatgttcgtacacacaggtgagaagccccaccaatgcagcatctgttggcgctccttctccttaaaggattaccttatcaagcacatggtgacacacacaggagtgagggcataccagtgtagtatctgcaacaagcgcttcacccagaagagctccctcaacgtgcacatgcgcctccaccggggagagaagtcctacgagtgctacatctgcaaaaagaagttctctcacaagaccctcctggagcgacacgtggccctgcacagtgccagcaatgggaccccccctgcaggcacacccccaggtgcccgcgctggccccccaggcgtggtggcctgcacggaggggaccacttacgtctgctccgtctgcccagcaaagtttgaccaaatcgagcagttcaacgaccacatgaggatgcatgtgtctgacggataagtagtatctttctctctttcttatgaacaaaacaaaacaacaacaaaaaacaaacaaacaaaaaagctatggcactagaatttaagaaatgttttggtttcatttttactttctgtttttgtttttgtttcgtttcattttgtactacatgaagaactgttttttgcctgctggtacattacatttccggaggcttgggtgaataatagttttcccagtctccctcggatggtggccttaaggcctggtagtgcttcaagaggtccactggttggatctctagctactggcctctaaatacaacccttctttacaaaaaaatcttttaaaaaaaagtaaaaaaaaaaaaaaaatttccacttgtgaagagcactacaaaaaatatataacaaaatctaaaaggcctactgtctttaagtacaccgcttgcagtgtttcagtggacattttcacaattctggccgcttggacttcacagtaaccagttaaaactgtggaatatcacttctggttgaaaacccagaggaaaggccctgctgttttccacctaccacgttgtctgatttcataaaagggctgtgggggtgggaagggcagtgggttcggtggtgtgggaaagaaagacgaatggcaggcttcttccccagattctgcccgggtccacacaccctggcccaccttctccatatccccctcttgcagcagaagccaggaagacttggacaagcaacaagcaacagtggctatcgtatttattcagtgtcttcgctgagccacagcctcagcacaatcaagagggactttcatgaaaggcaggaatgcagataaaacaaagatatcagaaatttgcacctatgtttctaggtacaagagaaggattatttccaacaatctttgcaaaaaaaaaaaaa

SEQ ID NO: 34697 - DNA, 2816 bp, Homo sapiens
  source 1..2816: mol_type = unassigned DNA
acatttcaaaaaaaatacatagactgatgtttcagacttgtgcagcataagcctacagggtacgaagaatgaactctgagaatgtttggagaatgtttcatcattactaacaggatattcctcatgacattgctgtctgatctttgaccatcagtctgtgacctgccccttctctttacatgcagccgctctctgctccctgccccaatgaacatctgcactaggcccaagccttggagtaatttacctgaagagtgacaccattgattttgaaactactgaagaaacccaagacagctgaaaaccagaaggcatctgaggagaatgagattactcagccgggtggatccagcgccaagccgggccttccctgcctgaactttgaagctgttttgtctccagacccagccctcatccactcaacacattcactgacaaactctcacgctcacaccgggtcatctgattgtgacatcagttgcaaggggatgaccgagcgcattcacagcatcaaccttcacaacttcagcaattccgtgctcgagaccctcaacgagcagcgcaaccgtggccacttctgtgacgtaacggtgcgcatccacgggagcatgctgcgcgcacaccgctgcgtgctggcagccggcagccccttcttccaggacaaactgctgcttggctacagcgacatcgagatcccgtcggtggtgtcagtgcagtcagtgcaaaagctcattgacttcatgtacagcggcgtgctacgggtctcgcagtcggaagctctgcagatcctcacggccgccagcatcctgcagatcaaaacagtcatcgacgagtgcacgcgcatcgtgtcacagaacgtgggcgatgtgttcccggggatccaggactcgggccaggacacgccgcggggcactcccgagtcaggcacgtcaggccagagcagcgacacggagtcgggctacctgcagagccacccacagcacagcgtggacaggatctactcggcactctacgcgtgctccatgcagaatggcagcggcgagcgctctttttacagcggcgcagtggtcagccaccacgagactgcgctcggcctgccccgcgaccaccacatggaagaccccagctggatcacacgcatccatgagcgctcgcagcagatggagcgctacctgtccaccacccccgagaccacgcactgccgcaagcagccccggcctgtgcgcatccagaccctagtgggcaacatccacatcaagcaggagatggaggacgattacgactactacgggcagcaaagggtgcagatcctggaacgcaacgaatccgaggagtgcacggaagacacagaccaggccgagggcaccgagagtgagcccaaaggtgaaagcttcgactcgggcgtcagctcctccataggcaccgagcctgactcggtggagcagcagtttgggcctggggcggcgcgggacagccaggctgaacccacccaacccgagcaggctgcagaagcccccgctgagggtggtccgcagacaaaccagctagaaacaggtgcttcctctccggagagaagcaatgaagtggagatggacagcactgttatcactgtcagcaacagctccgacaagagcgtcctacaacagccttcggtcaacacgtccatcgggcagccattgccaagtacccagctctacttacgccagacagaaaccctcaccagcaacctgaggatgcctctgaccttgaccagcaacacgcaggtcattggcacagctggcaacacctacctgccagccctcttcactacccagcccgcgggcagtggccccaagcctttcctcttcagcctgccacagcccctggcaggccagcagacccagtttgtgacagtgtcccagcccggtctgtcgacctttactgcacagctgccagcgccacagcccctggcctcatccgcaggccacagcacagccagtgggcaaggcgaaaaaaagccttatgagtgcactctctgcaacaagactttcaccgccaaacagaactacgtcaagcacatgttcgtacacacaggtgagaagccccaccaatgcagcatctgttggcgctccttctccttaaaggattaccttatcaagcacatggtgacacacacaggagtgagggcataccagtgtagtatctgcaacaagcgcttcacccagaagagctccctcaacgtgcacatgcgcctccaccggggagagaagtcctacgagtgctacatctgcaaaaagaagttctctcacaagaccctcctggagcgacacgtggccctgcacagtgccagcaatgggaccccccctgcaggcacacccccaggtgcccgcgctggccccccaggcgtggtggcctgcacggaggggaccacttacgtctgctccgtctgcccagcaaagtttgaccaaatcgagcagttcaacgaccacatgaggatgcatgtgtctgacggataagtagtatctttctctctttcttatgaacaaaacaaaacaacaacaaaaaacaaacaaacaaaaaagctatggcactagaatttaagaaatgttttggtttcatttttactttctgtttttgtttttgtttcgtttcattttgtactacatgaagaactgttttttgcctgctggtacattacatttccggaggcttgggtgaataatagttttcccagtctccctcggatggtggccttaaggcctggtagtgcttcaagaggtccactggttggatctctagctactggcctctaaatacaacccttctttacaaaaaaa

SEQ ID NO: 34698 - DNA, 587 bp, Homo sapiens
  source 1..587: mol_type = unassigned DNA
aaggtttttcaaagaggcagtggaggaggttctaataaatttggaaggaaacagttccctgtcttgggaaaaggagaactcctgactgattagcattcacaccagatgcagccgctctctgctccctgccccaatgaacatctgcactaggcccaagccttggagtaatttacctgaagagtgacaccattgattttgaaactactgaagaaacccaagacagctgaaaaccagaaggcatctgaggagaatgagattactcagccgggtggatccagcgccaagccgggccttccctgcctgaactttgaagctgttttgtctccagacccagccctcatccactcaacacattcactgacaaactctcacgctcacaccgggtcatctgattgtgacatcagttgcaaggggatgaccgagcgcattcacagcatcaaccttcacaacttcagcaattccgtgctcgagaccctcaacgagcagcgcaaccgtggccacttctgtgacgtaacggtgcgcatccacgggagcatgctgcgcgcacaccgctgcgtgctggcagccggcagccccttcttccagga

SEQ ID NO: 34699 - DNA, 3133 bp, Homo sapiens
  source 1..3133: mol_type = unassigned DNA
atctagcctcccagcctcactgcattatttgtgaaaatggccagtgtgaggaattattaattaaagctaacaaatcaccctgacaagctgtgccctggcatggctgaaggttgattggcgaaagtcttctcctttggagaaaagactttttgtgctcgtgacgcagtcagggacggattattgaatatgcaagttagaagaaaaatcacaggacaagcaaattgagtatttactggcaaataattgcactcttaagctgtggctctcttcctaaattcttaacattctcgagggttagaaagaaacacagaaaaatgcatcggtacagagtacatttcaaaaaaaatacatagactgatgtttcagacttgtgcagaatgtttcatcattactaacaggatattcctcatgacattgctgtctgatctttgaccatcagtctgtgacctgccccttctctttacatgcagccgctctctgctccctgccccaatgaacatctgcactaggcccaagccttggagtaatttacctgaagagtgacaccattgattttgaaactactgaagaaacccaagacagctgaaaaccagaaggcatctgaggagaatgagattactcagccgggtggatccagcgccaagccgggccttccctgcctgaactttgaagctgttttgtctccagacccagccctcatccactcaacacattcactgacaaactctcacgctcacaccgggtcatctgattgtgacatcagttgcaaggggatgaccgagcgcattcacagcatcaaccttcacaacttcagcaattccgtgctcgagaccctcaacgagcagcgcaaccgtggccacttctgtgacgtaacggtgcgcatccacgggagcatgctgcgcgcacaccgctgcgtgctggcagccggcagccccttcttccaggacaaactgctgcttggctacagcgacatcgagatcccgtcggtggtgtcagtgcagtcagtgcaaaagctcattgacttcatgtacagcggcgtgctacgggtctcgcagtcggaagctctgcagatcctcacggccgccagcatcctgcagatcaaaacagtcatcgacgagtgcacgcgcatcgtgtcacagaacgtgggcgatgtgttcccggggatccaggactcgggccaggacacgccgcggggcactcccgagtcaggcacgtcaggccagagcagcgacacggagtcgggctacctgcagagccacccacagcacagcgtggacaggatctactcggcactctacgcgtgctccatgcagaatggcagcggcgagcgctctttttacagcggcgcagtggtcagccaccacgagactgcgctcggcctgccccgcgaccaccacatggaagaccccagctggatcacacgcatccatgagcgctcgcagcagatggagcgctacctgtccaccacccccgagaccacgcactgccgcaagcagccccggcctgtgcgcatccagaccctagtgggcaacatccacatcaagcaggagatggaggacgattacgactactacgggcagcaaagggtgcagatcctggaacgcaacgaatccgaggagtgcacggaagacacagaccaggccgagggcaccgagagtgagcccaaaggtgaaagcttcgactcgggcgtcagctcctccataggcaccgagcctgactcggtggagcagcagtttgggcctggggcggcgcgggacagccaggctgaacccacccaacccgagcaggctgcagaagcccccgctgagggtggtccgcagacaaaccagctagaaacaggtgcttcctctccggagagaagcaatgaagtggagatggacagcactgttatcactgtcagcaacagctccgacaagagcgtcctacaacagccttcggtcaacacgtccatcgggcagccattgccaagtacccagctctacttacgccagacagaaaccctcaccagcaacctgaggatgcctctgaccttgaccagcaacacgcaggtcattggcacagctggcaacacctacctgccagccctcttcactacccagcccgcgggcagtggccccaagcctttcctcttcagcctgccacagcccctggcaggccagcagacccagtttgtgacagtgtcccagcccggtctgtcgacctttactgcacagctgccagcgccacagcccctggcctcatccgcaggccacagcacagccagtgggcaaggcgaaaaaaagccttatgagtgcactctctgcaacaagactttcaccgccaaacagaactacgtcaagcacatgttcgtacacacaggtgagaagccccaccaatgcagcatctgttggcgctccttctccttaaaggattaccttatcaagcacatggtgacacacacaggagtgagggcataccagtgtagtatctgcaacaagcgcttcacccagaagagctccctcaacgtgcacatgcgcctccaccggggagagaagtcctacgagtgctacatctgcaaaaagaagttctctcacaagaccctcctggagcgacacgtggccctgcacagtgccagcaatgggaccccccctgcaggcacacccccaggtgcccgcgctggccccccaggcgtggtggcctgcacggaggggaccacttacgtctgctccgtctgcccagcaaagtttgaccaaatcgagcagttcaacgaccacatgaggatgcatgtgtctgacggataagtagtatctttctctctttcttatgaacaaaacaaaacaacaacaaaaaacaaacaaacaaaaaagctatggcactagaatttaagaaatgttttggtttcatttttactttctgtttttgtttttgtttcgtttcattttgtactacatgaagaactgttttttgcctgctggtacattacatttccggaggcttgggtgaataatagttttcccagtctccctcggatggtggccttaaggcctggtagtgcttcaagaggtccactggttggatctctagctactggcctctaaatacaacccttctttacaaaaaaatcttttaaaaaaaagtaaaaaaaaaaaaaaaa

SEQ ID NO: 34700 - DNA, 2757 bp, Homo sapiens
  source 1..2757: mol_type = unassigned DNA
ttgggaaacagcccagtggtataaggatgaggaaactgaagcccagagaggtgaagtgaggtgcccaaggccacacagcaagttagaggcacagctagtacggtagctcaagtctcctgactcccagtccagtgctcctcccattactccacgagtcctgtctctaagcttcctgacaaatgctagaacggaagaaacccaagacagctgaaaaccagaaggcatctgaggagaatgagattactcagccgggtggatccagcgccaagccgggccttccctgcctgaactttgaagctgttttgtctccagacccagccctcatccactcaacacattcactgacaaactctcacgctcacaccgggtcatctgattgtgacatcagttgcaaggggatgaccgagcgcattcacagcatcaaccttcacaacttcagcaattccgtgctcgagaccctcaacgagcagcgcaaccgtggccacttctgtgacgtaacggtgcgcatccacgggagcatgctgcgcgcacaccgctgcgtgctggcagccggcagccccttcttccaggacaaactgctgcttggctacagcgacatcgagatcccgtcggtggtgtcagtgcagtcagtgcaaaagctcattgacttcatgtacagcggcgtgctacgggtctcgcagtcggaagctctgcagatcctcacggccgccagcatcctgcagatcaaaacagtcatcgacgagtgcacgcgcatcgtgtcacagaacgtgggcgatgtgttcccggggatccaggactcgggccaggacacgccgcggggcactcccgagtcaggcacgtcaggccagagcagcgacacggagtcgggctacctgcagagccacccacagcacagcgtggacaggatctactcggcactctacgcgtgctccatgcagaatggcagcggcgagcgctctttttacagcggcgcagtggtcagccaccacgagactgcgctcggcctgccccgcgaccaccacatggaagaccccagctggatcacacgcatccatgagcgctcgcagcagatggagcgctacctgtccaccacccccgagaccacgcactgccgcaagcagccccggcctgtgcgcatccagaccctagtgggcaacatccacatcaagcaggagatggaggacgattacgactactacgggcagcaaagggtgcagatcctggaacgcaacgaatccgaggagtgcacggaagacacagaccaggccgagggcaccgagagtgagcccaaaggtgaaagcttcgactcgggcgtcagctcctccataggcaccgagcctgactcggtggagcagcagtttgggcctggggcggcgcgggacagccaggctgaacccacccaacccgagcaggctgcagaagcccccgctgagggtggtccgcagacaaaccagctagaaacaggtgcttcctctccggagagaagcaatgaagtggagatggacagcactgttatcactgtcagcaacagctccgacaagagcgtcctacaacagccttcggtcaacacgtccatcgggcagccattgccaagtacccagctctacttacgccagacagaaaccctcaccagcaacctgaggatgcctctgaccttgaccagcaacacgcaggtcattggcacagctggcaacacctacctgccagccctcttcactacccagcccgcgggcagtggccccaagcctttcctcttcagcctgccacagcccctggcaggccagcagacccagtttgtgacagtgtcccagcccggtctgtcgacctttactgcacagctgccagcgccacagcccctggcctcatccgcaggccacagcacagccagtgggcaaggcgaaaaaaagccttatgagtgcactctctgcaacaagactttcaccgccaaacagaactacgtcaagcacatgttcgtacacacaggtgagaagccccaccaatgcagcatctgttggcgctccttctccttaaaggattaccttatcaagcacatggtgacacacacaggagtgagggcataccagtgtagtatctgcaacaagcgcttcacccagaagagctccctcaacgtgcacatgcgcctccaccggggagagaagtcctacgagtgctacatctgcaaaaagaagttctctcacaagaccctcctggagcgacacgtggccctgcacagtgccagcaatgggaccccccctgcaggcacacccccaggtgcccgcgctggccccccaggcgtggtggcctgcacggaggggaccacttacgtctgctccgtctgcccagcaaagtttgaccaaatcgagcagttcaacgaccacatgaggatgcatgtgtctgacggataagtagtatctttctctctttcttatgaacaaaacaaaacaacaacaaaaaacaaacaaacaaaaaagctatggcactagaatttaagaaatgttttggtttcatttttactttctgtttttgtttttgtttcgtttcattttgtactacatgaagaactgttttttgcctgctggtacattacatttccggaggcttgggtgaataatagttttcccagtctccctcggatggtggccttaaggcctggtagtgcttcaagaggtccactggttggatctctagctactggcctctaaatacaacccttctttacaaaaaaatcttttaaaaaaaagtaaaaaaaaaaaaaaa

SEQ ID NO: 34701 - DNA, 2800 bp, Homo sapiens
  source 1..2800: mol_type = unassigned DNA
gcagggagcttaacagccaggcctggacaccctcaagagactgtgtgctgattctcagtcgtcactccttggatcaggaaccatagtcctgatctttgaccatcagtctgtgacctgccccttctctttacatgcagccgctctctgctccctgccccaatgaacatctgcactaggcccaagccttggagtaatttacctgaagagtgacaccattgattttgaaactactgaagaaacccaagacagctgaaaaccagaaggcatctgaggagaatgagattactcagccgggtggatccagcgccaagccgggccttccctgcctgaactttgaagctgttttgtctccagacccagccctcatccactcaacacattcactgacaaactctcacgctcacaccgggtcatctgattgtgacatcagttgcaaggggatgaccgagcgcattcacagcatcaaccttcacaacttcagcaattccgtgctcgagaccctcaacgagcagcgcaaccgtggccacttctgtgacgtaacggtgcgcatccacgggagcatgctgcgcgcacaccgctgcgtgctggcagccggcagccccttcttccaggacaaactgctgcttggctacagcgacatcgagatcccgtcggtggtgtcagtgcagtcagtgcaaaagctcattgacttcatgtacagcggcgtgctacgggtctcgcagtcggaagctctgcagatcctcacggccgccagcatcctgcagatcaaaacagtcatcgacgagtgcacgcgcatcgtgtcacagaacgtgggcgatgtgttcccggggatccaggactcgggccaggacacgccgcggggcactcccgagtcaggcacgtcaggccagagcagcgacacggagtcgggctacctgcagagccacccacagcacagcgtggacaggatctactcggcactctacgcgtgctccatgcagaatggcagcggcgagcgctctttttacagcggcgcagtggtcagccaccacgagactgcgctcggcctgccccgcgaccaccacatggaagaccccagctggatcacacgcatccatgagcgctcgcagcagatggagcgctacctgtccaccacccccgagaccacgcactgccgcaagcagccccggcctgtgcgcatccagaccctagtgggcaacatccacatcaagcaggagatggaggacgattacgactactacgggcagcaaagggtgcagatcctggaacgcaacgaatccgaggagtgcacggaagacacagaccaggccgagggcaccgagagtgagcccaaaggtgaaagcttcgactcgggcgtcagctcctccataggcaccgagcctgactcggtggagcagcagtttgggcctggggcggcgcgggacagccaggctgaacccacccaacccgagcaggctgcagaagcccccgctgagggtggtccgcagacaaaccagctagaaacaggtgcttcctctccggagagaagcaatgaagtggagatggacagcactgttatcactgtcagcaacagctccgacaagagcgtcctacaacagccttcggtcaacacgtccatcgggcagccattgccaagtacccagctctacttacgccagacagaaaccctcaccagcaacctgaggatgcctctgaccttgaccagcaacacgcaggtcattggcacagctggcaacacctacctgccagccctcttcactacccagcccgcgggcagtggccccaagcctttcctcttcagcctgccacagcccctggcaggccagcagacccagtttgtgacagtgtcccagcccggtctgtcgacctttactgcacagctgccagcgccacagcccctggcctcatccgcaggccacagcacagccagtgggcaaggcgaaaaaaagccttatgagtgcactctctgcaacaagactttcaccgccaaacagaactacgtcaagcacatgttcgtacacacaggtgagaagccccaccaatgcagcatctgttggcgctccttctccttaaaggattaccttatcaagcacatggtgacacacacaggagtgagggcataccagtgtagtatctgcaacaagcgcttcacccagaagagctccctcaacgtgcacatgcgcctccaccggggagagaagtcctacgagtgctacatctgcaaaaagaagttctctcacaagaccctcctggagcgacacgtggccctgcacagtgccagcaatgggaccccccctgcaggcacacccccaggtgcccgcgctggccccccaggcgtggtggcctgcacggaggggaccacttacgtctgctccgtctgcccagcaaagtttgaccaaatcgagcagttcaacgaccacatgaggatgcatgtgtctgacggataagtagtatctttctctctttcttatgaacaaaacaaaacaacaacaaaaaacaaacaaacaaaaaagctatggcactagaatttaagaaatgttttggtttcatttttactttctgtttttgtttttgtttcgtttcattttgtactacatgaagaactgttttttgcctgctggtacattacatttccggaggcttgggtgaataatagttttcccagtctccctcggatggtggccttaaggcctggtagtgcttcaagaggtccactggttggatctctagctactggcctctaaatacaacccttctttacaaaaaaatcttttaaaaaaaagtaaaaaaaaaaaaaaaa

SEQ ID NO: 34702 - DNA, 551 bp, Homo sapiens
  source 1..551: mol_type = unassigned DNA
actcagaagagacacagacaggagagaggaggaggggtggggggagagagagagaatcaatatcaagaatagaaggagctccgaagccattttttttttaaagaagtatcgggacttgggagagggtgacaaagaaggtttttcaaagaggcagtggaggaggttctaataaatttggaaggaaacagttccctgtcttgggaaaaggagaactcctgactgattagcattcacaccagatgcagccgctctctgctccctgccccaatgaacatctgcactaggcccaagccttggagtaatttacctgaagagtgacaccattgattttgaaactactatgaggaaactgaagcccagagaggtgaagtgaggtgcccaaggccacacagcaagttagaggcacagctagtacggtagctcaagtctcctgactcccagtccagtgctcctcccattactccacgagtcctgtctctaagcttcctgacaaatgctagaacggaagaaacccaagacagctgaaaaccagaaggcatctgaggagaatg

SEQ ID NO: 34703 - DNA, 5519 bp, Homo sapiens
  source 1..5519: mol_type = unassigned DNA
cgcgcttccgggttggctgtggctgtggctgcggcggcggcgcaggagcagaaaccggtgcggcgcagaagccccagaggcgggcggggcggagcggagggccagcgggccccggcgtgggtctcccgccaggccgccggatttaacccttagtggcttctgaagaaaatggcagaaacatcgccagagccttctgggcagcttgttgtacactcagacgctcacagtgacactgtgctggccagttttgaggatcagaggaagaaaggcttcctctgtgacattactttaatcgtggagaatgtacatttccgggcccacaaagccttacttgctgccagtagtgaatacttctcaatgatgtttgcagaagagggggaaatcggccaatccatttatatgctggaaggcatggttgcagacacctttggtatcctgctggaatttatctacacaggttatctccatgccagtgagaaaagtacagaacaaatcctggctactgctcagttcttaaaagtctatgacctggtaaaggcttacacagacttccaaaataatcatagctccccaaagccaacaactttgaacactgctggtgccccagtggttgttatctctaataagaaaaacgatcctccaaagcggaaacggggaagaccaaaaaaagtcaatacattgcaggaggagaaatcagaactggctgcagaggaagaaatacagttaagagtgaacaattcagttcagaatagacaaaactttgtggttaaaggagacagtggtgtactgaatgagcaaattgcagcaaaagaaaaggaagaatcggagcctacttgtgagccaagtagagaggaggaaatgccagttgaaaaagatgagaactatgatcccaagaccgaggatggccaggcaagccagagtcgatacagcaagcggaggatttggagatccgtcaaacttaaagattacaaacttgttggggatcaagaggaccatggttcagccaagaggatctgtggaaggagaaagcgccctggaggccctgaggcccgctgtaaagactgtggcaaggtctttaagtacaatcactttttagcaatccaccagaggagccacacaggggagcgacctttcaaatgtaatgagtgtggaaaaggctttgcccagaagcactcgctacaggtccacaccaggatgcacacaggcgagcggccgtacacctgcaccgtgtgcagcaaggctctgaccaccaagcactcactgctggagcacatgagcctgcactcaggacagaagtcttttacctgtgatcaatgcggaaaatatttcagccagaacagacagctaaagagccattaccgagttcatacaggccactcattaccggaatgcaaagactgccatcgcaaattcatggatgtgtctcagctaaagaaacatctgcgaacacacacaggtgagaagccatttacttgtgaaatctgtggcaaatctttcacagcaaagagttctcttcagacccacatcagaatccatcgaggagaaaagccatactcctgtggcatttgtggcaaatccttctctgactccagtgccaaaaggagacactgcattctacacactggcaagaagcctttctcctgccctgagtgtaacttacagtttgctcgcttagacaacttgaaggctcacttgaaaattcatagcaaggagaagcatgcttcagatgccagcagcatttctggcagtagtaatacagaagaggtcaggaatattcttcagctacagccatatcaactctctacctcgggagagcaggaaattcagcttctcgtaaccgattctgtacataacatcaatttcatgcccggtcctagccagggaatcagcattgtgactgcagagagttcccaaaacatgactgcagaccaggctgctaatcttaccctgctcacgcagcagccagagcaactgcagaatttaattctttcagctcaacaggagcaaacagaacacattcagagcctcaatatgattgaaagccagatggggccctcacaaacagagccagtgcacgtgatcactctgtccaaggaaacactggaacatcttcatgcccatcaagagcaaacagaggagctccatttagctacaagtacttcagatccagctcagcacctgcagctgacacaggagcctggtccgccaccacccactcaccacgtgccccagccaacgccacttggccaggagcagagctgacctgtaaacacgtttgactgcttgattgggctcttcttataagccagctctgactggattttgaacgcttgaaatcaggctctccacaccattgacttgcagatgcttctgtgagagctgtgatggctaactgatgtttataatgccctccatccaggtagcaagatgtgtgtatgtcttgtctaaggtactgatttgtattgagcatttcaatattattgaatggttttcattttaatctgcaatgtctcataaagactcgggtagtttttctttgggggcattgatctcagtttttctgtaaggtttaaatgttcacagccataggttatggtcttgccaacctccccagttatgtttttttgttttctaggacaaagggagtcattttggttgaactgggcagaatggtttgttctattttcttatttttcttaggcaacacagttgttaccacaagacaagtcagggctaaatatgacagatcacaatgtatggggaatttgcccttttaataatttccagtcccctaagacaaagtaaccctcaacgttttatctttatgcagtacagtgggcttattgtgttaacacttcagaaagattcaaactcataaactcagtattttaactcaaaattcatgtaacaagatagccaaaagcataggatttcttaaaattctgaattcgtcttttctgagaaacataaatttacatatttttcaacagaaggctatcaaaattttaattaagtttaaaatacaaaattggatcaagacattcaccctaaattctgaatttttgtcagaaaagagatttgattttcatgaaggtaaagctttcttcactattctggaacataaaactttattcagtgtaatttaagtcttatatatactctactgaattctaactgatctcctgaaaatgttgatctacgtgttgtgtctgataactttctggagatggaagcttataattcatttttattgcagactagttaaatcccacaaagtgaatatcttctcctaatctttccttttttagagacagggtctcactgtatcacccaggccagagtgtagtggcacaatcattgctcactgtaacctcgaattcctgggctcaagcaaccctcccaccttagcctccctagtagctgggactacagggatgtaccaccacacccagctaatcttcatctaatcttaaaactttgagcctcagagactttgtagccagcatgtgtctgtaattgtatgatttttaaatcatcatcaaaagattaaattatgtttgggttaggttttcaagctaagcttattgaattcttttaccactttcatgtaagctggtaggggatttttgagaaaagaaggtgggcactagtatatctaaattaacaatgctgatggggagtagggggtaatctactctaaaattaatagagcctttccatcaattgttttgttttagacatccttgatttctccctaaatcaaataagttatttggaggttagagtaatagagaattcttcaggtttgagagaagataaaaacattttggttgcatatttgctaagctatattttattatatgtaattcacaaaacttccaaaatgatatatatcttatatgtatcaaccaaactaatgttaaatcaggcctgactagagcaaagataacaattttttacaaacactgttaagccctaagtattatttcaggttctcgtttaaactgtttaattttattcttaaaacacaaagtttttaccaacttttcaaagcccaccaatccacattttctccaggaaattaaatatttaagtaagtgagtgtttactcactctggatagctaggtgattattcagaaaatacggttacatagctatttataagtcaagtttcactggctctataacagtctacctctacactaagagaactataacatgaacaacataggtcactttaaatgttctagtagcaacttttaaaaacataaaaagaagcaggtgaaaatgttaataaaagtttatttaatccaacatttgccaaatatttcaacatataaaaatatattagtgagacattttacattctctttttcatactaagctttcgaaatctggtgtgtattttacactttctgcacatctccatttggatgctaatgttcattggacatacttgatctgtatttagatttcatacaacttacagttgaaaacagattctcatatcaagtagctaagacaaaagtttttttcaagaattgaaataagtatcagtttaaaaatttatattaaatttattaaaattaaaatccagttccttgttgcatgggacacagtgcaaatgcttgataagcacatgtggctagtggctgctatattggacagcatgggccacctgtttctaacttgagcatcagtcctagctatgcctgaattatttgaccagctgtcaaagagaaacaaggaaatgatagctttgttaatctagcctctttctttgtcccacatatacattctacccctttgaataaaaaagttcaatgacgccgggcgtggaggctcatgcctgtaatcccagcactttgggaggccaaggtgggcggatcacgaggtcaggagttcgagggcagcctgaccaacatagtgaaaccccatctctactaaaaatacaaaaattagctgggcgtggtggtgtacccctgtaatcccagctactcgggaggctgagacaggagaatcacttgaacccaggaggcggaggctgcagtgagctgagatcacgccattgcactcaagcctggcgacagagcgagactccgtctcaaaaaaaaaagttaaatgacttgagtacccaaaagaaatgtcgtgaacatgaaagtacttctcatgtgtccttgagaaatgatgttgctagtgcagtgtttcacaattcattttctactaaatgtgtaccattttttaaattgttttaacagaaatatagagtgtgtttcttaggaaatagaatgttatgctttggggctcctgaaacacctcgttttgaaggtgaatctttggttttctcccagaagagggtctgccttgggatgattggagctcttaccatcaaaatcagttattcaagtgcttgcccagtgcttcttgaaactcacctctactctgtattttctacagttggttcttgtgttataaatgttgtgagcaacagattaaatgatgctgaggaatgaaaaaa

SEQ ID NO: 34704 - DNA, 1586 bp, Homo sapiens
  source 1..1586: mol_type = unassigned DNA
ggcgcccctctttcccctgctaccagacacgcggtcacgtggggccatcgcgggctgccggcgcgggaagccgcgcgagaggcggccgaggggtgcgtgagccggcgccactgcttgcagtgcgcggcttgggagcccgcccctcctgcacggaggagtcggcctgccgccgcggcggcatctggaaccacaatggacactgccagccatagccttgttcttctccagcagctgaacatgcagcgagaatttggttttctgtgtgattgcacagttgcaattggagatgtttacttcaaagcccacagagcagtgcttgctgctttttctaactatttcaagatgatatttattcaccaaacaagtgaatgcataaaaatacaaccaactgacatccaacctgacatattcagctatttgttgcacattatgtacacggggaaagggccaaaacagattgtggatcatagtcgtttggaggaagggattcgatttcttcacgccgactacctttctcacattgcaactgaaatgaatcaagtgttctcaccagagactgtgcagtcctcaaatttatatggcattcagatctcaacaacccaaaaaacagttgtcaaacaaggactggaggtcaaagaagctccttccagtaacagtggaaacagagctgctgtccagggtgaccacccccagttgcagttgtctcttgctattggtctggatgatggcactgcagaccagcagagggcctgtcctgccacccaggccctggaggagcaccagaagcccccagtttccatcaagcaggagagatgtgacccagaatctgtgatctcccagagccacccctcaccctcatcagaggtgacaggccccacttttactgaaaacagtgtcaaaatacacttatgccattactgtggggaacgttttgattcccgtagtaacctaaggcaacatctccatacacatgtgtctggatccctgccattcggtgtccctgcttccattctggaaagtaatgaccttggtgaagtgcatccccttaatgaaaacagcgaggcccttgaatgccgcaggctcagctccttcattgttaaggagaatgaacagcagccagaccacaccaaccggggtaccacagagcctttgcagatcagtcaagtatctttgatctccaaagacacagagccagtagaattaaactgtaatttttctttttcaaggaaaagaaaaatgagctgtaccatctgtggtcataaattccctcgaaagagccaattgttggaacacatgtatacacacaaaggtaaatcttacagatataaccgatgccaaaggtttggtaatgcattggcccagagatttcagccatactgtgacagctggtctgatgtctccctgaaaagttctcgcttgtcacaagaacacttagacttgccttgtgccttagagtcagagctcacacaagaaaatgtggatactatcctagttgagtagcagcttctctttcagaatttttataccaattctgaaaaagaaaatttgcgtggcatttttaattcataaattattttcctcctcaa

SEQ ID NO: 34705 - DNA, 2094 bp, Homo sapiens
  source 1..2094: mol_type = unassigned DNA
aagtttctgcgtcgagctccgaggaggctggcgcaacccgcaccgcgggggccgtcgcggcggcggcggcttgaccacccctcttgcccctctcaaggcttgacccatcttatcaccgtcttctctggcactcagtatttggagtaatcagttgttaccagttgcggaggcagcgcatagcacaacgtagtacctggaacctgacggcacctagcatgtttcaacagttagcgcccgcatcaccccaagggattaaatttggcattctttctcttgagactcaagtcctggcagagctgttgatcctctcacaagattctgtcatagaagacaccaggcctgaagagcgtgatgtagctggagctagctacacctcttgatagctaagactccaaggctccagacaccttggtgattgcactctccaccatgccaggaccgcagtgccagtttaccccactcacctgtagagaatgtatccggcggaggtcattatatatacttggcttgattcaggttatggagaagtcaggcatggccactgtgtgggtttgatggtatttctaggtgagatggagtttcactcttgttgcccagactggagtgcaatgacacaatctcagctcaccacaacctctgcctcctgggttcaagcgattctcccgcctcagcctcccgagtagccgggattatagaaccacaatggacactgccagccatagccttgttcttctccagcagctgaacatgcagcgagaatttggttttctgtgtgattgcacagttgcaattggagatgtttacttcaaagcccacagagcagtgcttgctgctttttctaactatttcaagatgatatttattcaccaaacaagtgaatgcataaaaatacaaccaactgacatccaacctgacatattcagctatttgttgcacattatgtacacggggaaagggccaaaacagattgtggatcatagtcgtttggaggaagggattcgatttcttcacgccgactacctttctcacattgcaactgaaatgaatcaagtgttctcaccagagactgtgcagtcctcaaatttatatggcattcagatctcaacaacccaaaaaacagttgtcaaacaaggactggaggtcaaagaagctccttccagtaacagtggaaacagagctgctgtccagggtgaccacccccagttgcagttgtctcttgctattggtctggatgatggcactgcagaccagcagagggcctgtcctgccacccaggccctggaggagcaccagaagcccccagtttccatcaagcaggagagatgtgacccagaatctgtgatctcccagagccacccctcaccctcatcagaggtgacaggccccacttttactgaaaacagtgtcaaaatacacttatgccattactgtggggaacgttttgattcccgtagtaacctaaggcaacatctccatacacatgtgtctggatccctgccattcggtgtccctgcttccattctggaaagtaatgaccttggtgaagtgcatccccttaatgaaaacagcgaggcccttgaatgccgcaggctcagctccttcattgttaaggagaatgaacagcagccagaccacaccaaccggggtaccacagagcctttgcagatcagtcaagtatctttgatctccaaagacacagagccagtagaattaaactgtaatttttctttttcaaggaaaagaaaaatgagctgtaccatctgtggtcataaattccctcgaaagagccaattgttggaacacatgtatacacacaaaggtaaatcttacagatataaccgatgccaaaggtttggtaatgcattggcccagagatttcagccatactgtgacagctggtctgatgtctccctgaaaagttctcgcttgtcacaagaacacttagacttgccttgtgccttagagtcagagctcacacaagaaaatgtggatactatcctagttgagtagcagcttctctttcagaatttttataccaattctgaaaaagaaaatttgcgtggcatttttaattcataaattattttcctcctc

SEQ ID NO: 34706 - DNA, 1960 bp, Homo sapiens
  source 1..1960: mol_type = unassigned DNA
gccgtcatctctaagaaacaaccataccactgaatgctactgtgtacttacaaaccacactcatattcgtcacgtcatttcatcttcacccccacctccaaatgaggcttgaaatgagatgagatgttcctccctcccctttcaaccatggacctcacactgtggacttcctcttagagcctctgagttaggtacccaagccaaggcacaatgtccctgccccccataagactgcccagcccctatggctctgatcggctggtacagctagcagccaggctccggccagcactctgtgatactctgatcaccgtagggagccaggagttccccgcccacagcctggtgctagcaggtgtcagccagcagctgggccgcaggggccagtgggctctgggagaaggcatcagcccttctacctttgcccagctcctgaactttgtgtatggggagagtgtagagctgcagcctggagagctaaggccccttcaggaggcggccagggccttgggagtgcagtccctggaagaggcatgctggagggctcgaggggacagggctaaaaagccagatccaggcctgaagaaacatcaggaggagccagagaaaccctcaaggaatcctgagagagaactgggggaccctggagagaagcagaaaccagaacaggtttctagaactggtgggagagaacaggagatgttgcacaagcactcgccaccaagaggcagacccgagatggcaggagcaacgcaggaggctcagcaggaacagaccaggtcaaaggagaaacgcctccaagcccctgttggccaaaggggagcagatgggaagcatggagtgctcacgtggttgagggaaaatccagggggctctgaggaaagtctgcgcaagctccctggcccccttcccccagcaggctccctgcaaaccagcgtcacccctaggccctcgtgggctgaggccccttggttggtggggggccagcctgccctgtggagcatcctgctgatgccgcccagatatggcattcccttctaccatagcacccccaccactggagcctggcaggaggtctggcgggaacagaggatcccactgtccctaaatgcccccaaagggctctggagccagaaccagttggcctcctccagccctaccccaggttccctcccccagggccccgcacagctcagccctggggagatggaagagtctgatcaggggcacacaggcgcacttgcaacctgtgcgggtcatgaggacaaggcaggctgcccacctcgcccgcaccctcccccggcccctcctgctcggtctcggccctatgcgtgctctgtctgtggaaagaggttttcactcaagcatcagatggagacgcactaccgagtccacacaggagagaagcccttctcctgtagcctttgtcctcagcgctcccgggacttctcggccatgaccaagcacctgcggacacacggggccgctccgtaccgctgctccctgtgcggggccggctgtcccagcctggcctccatgcaggcgcacatgcgcggtcactcgcccagccaactcccgcccggatggaccatccgctccaccttcctctactcctcctcgaggccgtctcggccctcgacctctccctgttgtccttcttcctccaccacctgacggggtgtcggtagcgtcttagccaagagtccaattaaagaacgaaaagcgggccggctcggcttctgacctggcaccgctgctacggcggcctagcaaattccgccccagaagcgccccaggaagggcgccgagtgccctctcctggacgatcgcgggtcgcagaagcccaggccagcgagccctacagagtgaggacactgaagtgtgcaggagcgaaggttaacagtaggggagattgtcgatctcatcaccataataaagagtttcctgtgccctcccttca

SEQ ID NO: 34707 - DNA, 1464 bp, Homo sapiens
  source 1..1464: mol_type = unassigned DNA
atgtccctgccccccataagactgcccagcccctatggctctgatcggctggtacagctagcagccaggctccggccagcactctgtgatactctgatcaccgtagggagccaggagttccccgcccacagcctggtgctagcaggtgtcagccagcagctgggccgcaggggccagtgggctctgggagaaggcatcagcccttctacctttgcccagctcctgaactttgtgtatggggagagtgtagagctgcagcctggagagctaaggccccttcaggaggcggccagggccttgggagtgcagtccctggaagaggcatgctggagggctcgaggggacagggctaaaaagccagatccaggcctgaagaaacatcaggaggagccagagaaaccctcaaggaatcctgagagagaactgggggaccctggagagaagcagaaaccagaacaggtttctagaactggtgggagagaacaggagatgttgcacaagcactcgccaccaagaggcagacccgagatggcaggagcaacgcaggaggctcagcaggaacagaccaggtcaaaggagaaacgcctccaagcccctgttggccaaaggggagcagatgggaagcatggagtgctcacgtggttgagggaaaatccagggggctctgaggaaagtctgcgcaagctccctggcccccttcccccagcaggctccctgcaaaccagcgtcacccctaggccctcgtgggctgaggccccttggttggtggggggccagcctgccctgtggagcatcctgctgatgccgcccagatatggcattcccttctaccatagcacccccaccactggagcctggcaggaggtctggcgggaacagaggatcccactgtccctaaatgcccccaaagggctctggagccagaaccagttggcctcctccagccctaccccaggttccctcccccagggccccgcacagctcagccctggggagatggaagagtctgatcaggggcacacaggcgcacttgcaacctgtgcgggtcatgaggacaaggcaggctgcccacctcgcccgcaccctcccccggcccctcctgctcggtctcggccctatgcgtgctctgtctgtggaaagaggttttcactcaagcatcagatggagacgcactaccgagtccacacaggagagaagcccttctcctgtagcctttgtcctcagcgctcccgggacttctcggccatgaccaagcacctgcggacacacggggccgctccgtaccgctgctccctgtgcggggccggctgtcccagcctggcctccatgcaggcgcacatgcgcggtcactcgcccagccaactcccgcccggatggaccatccgctccaccttcctctactcctcctcgaggccgtctcggccctcgacctctccctgttgtccttcttcctccaccacctga

SEQ ID NO: 34708 - DNA, 5211 bp, Homo sapiens
  source 1..5211: mol_type = unassigned DNA
gcctttggcttcagcgcttcgcccccgcgctgtgccctctgtcggcggcgtggggcagctgtagcagcgttggcggcaggaggcggcggccgcgtcgacgtcgacccagactggagcgacgtttaaagaaggggcagaatcgctggggagtgcggcttcttcttgttgggggactcccagccttccgcgcgtccggaggaggagaagcggcggcgccgggaagcaggcatggagagtagaaaactgatttctgctacagacattcagtactctggcagtctgctgaactccttgaatgagcaacgtggccatggactcttctgtgatgttaccgttattgtggaagaccgaaaattccgggctcacaagaatattctttcagcttctagtacctacttccatcagctcttctctgttgctgggcaagttgttgaactgagctttataagagcagagatctttgcagaaattctcaattatatctatagttctaaaattgttcgtgttagatcagatttgcttgatgagttaattaaatcagggcagttattaggagtgaaatttatagcagagcttggtgtcccattgtcacaggttaaaagcatctcaggtacagcgcaggatggtaatactgagcctttacctcctgattctggtgacaagaaccttgtaatacagaaatcaaaagatgaagcccaagataatggggctactataatgcctattataacagagtctttttcattatctgccgaagattatgaaatgaaaaagatcattgttaccgattctgatgatgatgatgatgatgtcattttttgctccgagattctgcccacaaaggagactttgccgagtaataacacagtggcacaggtccaatctaacccaggccctgttgctatttcagatgttgcacctagtgctagcaataactcgccccctttaacaaatatcacacctactcagaaacttcctactcctgtgaatcaggcaactttgagccaaacacaaggaagtgaaaaattgttggtatcttcagctccaacacatctgactcccaatattattttgttaaatcagacaccactttctacaccaccaaatgtcagttcttcacttccaaatcatatgccctcttcaatcaatttacttgtgcagaatcagcagacaccaaacagtgctattttaacaggaaacaaggccaatgaagaggaggaggaggaaataatagatgatgatgatgacactattagctccagtcctgactcggccgtcagtaatacatctttggtcccacaggctgatacctcccaaaataccagttttgatggatcattaatacagaagatgcagattcctacacttcttcaagaaccactttccaattccttaaaaatttcagatataattactagaaatactaatgatccaggcgtaggatcaaaacatctaatggagggtcagaagatcattactttagatacagctactgaaattgaaggcttatcgactggttgcaaggtttatgcaaatatcggtgaagatacttatgatatagtgatccctgtcaaagatgaccctgatgaaggggaggccagacttgagaatgaaataccaaaaacgtctggcagcgagatggcaaacaaacgtatgaaagtaaaacatgatgatcactatgagttaatagtagatggaagggtctattatatctgtattgtatgcaaaaggtcatatgtctgtctgacaagcttgcggagacattttaacattcattcttgggagaagaagtatccgtgccgttactgtgagaaggtatttcctcttgcagaatatcgcacaaagcatgaaattcatcacacaggggagcgaaggtatcagtgtttggcctgtggcaaatctttcatcaactatcagtttatgtcttcacatataaagtcagttcatagtcaagatccttctggggactcaaagctttatcgtttacatccatgcaggtctttacaaatcagacaatatgcatatctttccgatagatcaagcactattcctgcaatgaaggatgatggtattgggtataaggttgacactggaaaagaacctccagtagggaccactacatctactcagaacaagccaatgacctgggaagatatttttattcagcaggaaaatgattcaatttttaaacaaaatgtaacagatggcagtactgagtttgaatttataataccagagtcttactaaactcctttgaaatactagaaagttttgttttggatgatggggcaggggtttcagaagatctgtaaaacaaattaaggtgcgaacaagttaatttgatctgccacattatctgaaggaagtgtagtgggatttttgttgataatttttagaagcaaattttcctgaaagttttgagtagaggtgagaccccctccccaagtatctgtttatatagttagttttcagctcatttaaaagaggcaaaaattaaaagcttggagagatagtttcctgaatagaatttgaagcagtctgaatgttctttgaaaataactggagttattagcataccctagtacatcttacagctttccccttccatgttagcactttactgctgaattctcaattttcttaacattgagacaataaatgtgtgttttgtcttgtatatggcataaagagtaaataagttttagagttgttctggaaaatgtcagaataagtcagtacttgggttgtgtaatctgctagtccaagcgaacagcaacctcctgctaccctccctctatgaaaatagccatgcagacaagtctctcatctgaagaacaaattagatttagctaattagaattaatcctggctttcattgccatagtctgtaaaagactttggtggctagaccactttataccttcgcagtgtggtctctgggggcaaaaaactaatgaaaacaatctctgtaatggcagataggaggagatgaaaagttctgttgcatggatttttaattctctggctaccacatagtagagaatggaatgaagatttccttttggcttcttaaggttaaaaatattcccatgaacatgaaaattttcaaattttgaatctgaaagccaccaaatgtatctttatgtataaatccttgtaaatgatagattccatgggtgagactttacatattttgggtgggaggctactggcatatatttttaaatgttcatattgcgtagaatctccactaggaagtctttatttgaaatagttgaatcagtgatctagtattttcctttcggcaagatttgttaggtttttaccccttctaaaataagttttattccatctgcaaattgctgcaatattatagtaatcagaaactacataaggaatgttatataggcttgtcagttcccatttttcttgacaacaataaataccacttttaaaaatgacacatatttaaacacttagaaaataaagttaacacttactgaagtgctagtactaaactgtgctagtactaaaagaaaacaggttggaacatacatatagcctagcatttataacagaattgttgaacgtctgtaaatgattttttttttttttgcaaaggaaaaaattgatactggaaaagattgttgtgcatagttattagtcatttgtaaccttgcttaagtatttcttagtccaacatagatattttctttctcctgaccatgtattttaaaatatagtctatttcttgactttgaacttaaagctttaatcataatttctcatgtatacatcgttcttctgatggtaagctggatttgaaggtagtggtttcagtgtttcttaagttggtagctgagggtatcaggcatcagttcatgcaataatacaagaaaaaaaatcctttgcttgccaagaggtagagtgatgtgcatttatctgttttctgttctgtaagtctagaccttcaaaccatttgtaaactaacccctgggaaatttgaaattacctgataacttaagactctgtgatctctggaatcaccatatgtttcttttttgtgtagatattaataacattactctttgactatagtgtgcactctgaaatgtactcagtgaaaatttgttttgagtttcattaatgctatttcaccagttagacataattacttctaccgatgtgaatgatacggatgccggcagagcttccagatctttcagactcaactgctaggtcaattagtttgtcataataaaacttggcagattctacaagtctattatgacaaaccaggaactaattctataatggaaaactatccattctgaataataggtatgtaattatttgctgctgctgctgtgctctgtaaattctgaatatgacatttaaactctgtgcctactaaaggtatcttctggagtttttgggaggagagaaactggaaaattaaattgtatttttgccagaagactcttacttgcatgtgtctcagggtcttcagtttttctataagtttccatatccaaagttcagaattcatgtgaaatacttctttggggcaaaagtccttcattcctggtatttattggattggaaatctgtagcaagatgctgtttaaaattaccatattgtttttttatcttatacttagctctctggctattgaacttccttttcttgtttgaagttagcttcaaatttgctcctatgctaaattacctgtaaatattctggataggaactacttgaaatagtaatttgttaaaagatatgacaaaatgaaaatgcttaaactacagaaatttaaaaatgccataacaatcttgcgagactaactttaaaatatactttaaatgattattatgattttggtggtaacgatcccccacacacaaccactatgaagaaataatgccgcatttttcccccattgtaccaaaaagataaaaaaatggtaaacactgatcaaggtattttgtattgtcaaggcatgcatattctaaagaattaaatgctaacttaacagcactggctttctggctggtcaactatatgaaaccttgttcattcctccgagtactgtaatgttcacacttgtacaatcttccctgtcatgactttaagttctacttttcattaaccatggcctgatattagttcttagagcttcttgtggcaaaaataaaatgatttaattctga

SEQ ID NO: 34709 - DNA, 5308 bp, Homo sapiens
  source 1..5308: mol_type = unassigned DNA
tttggcttcagcgcttcgcccccgcgctgtgccctctgtcggcggcgtggggcagctgtagcagcgttggcggcaggaggcggcggccgcgtcgacgtcgacccagactggagcgacgtttaaagaaggggcagaatcgctggggagtgcggcttcttcttgttgggggactcccagccttccgcgcgtccggaggaggagaagcggcggcgccgggaagcagtgtctgttgacttcacttggcactgtttaacattccacctctggaaattgtaaagatggagagatgaggggaagggacaaggggatgaagaaagaggaaagggcatggagagtagaaaactgatttctgctacagacattcagtactctggcagtctgctgaactccttgaatgagcaacgtggccatggactcttctgtgatgttaccgttattgtggaagaccgaaaattccgggctcacaagaatattctttcagcttctagtacctacttccatcagctcttctctgttgctgggcaagttgttgaactgagctttataagagcagagatctttgcagaaattctcaattatatctatagttctaaaattgttcgtgttagatcagatttgcttgatgagttaattaaatcagggcagttattaggagtgaaatttatagcagagcttggtgtcccattgtcacaggttaaaagcatctcaggtacagcgcaggatggtaatactgagcctttacctcctgattctggtgacaagaaccttgtaatacagaaatcaaaagatgaagcccaagataatggggctactataatgcctattataacagagtctttttcattatctgccgaagattatgaaatgaaaaagatcattgttaccgattctgatgatgatgatgatgatgtcattttttgctccgagattctgcccacaaaggagactttgccgagtaataacacagtggcacaggtccaatctaacccaggccctgttgctatttcagatgttgcacctagtgctagcaataactcgccccctttaacaaatatcacacctactcagaaacttcctactcctgtgaatcaggcaactttgagccaaacacaaggaagtgaaaaattgttggtatcttcagctccaacacatctgactcccaatattattttgttaaatcagacaccactttctacaccaccaaatgtcagttcttcacttccaaatcatatgccctcttcaatcaatttacttgtgcagaatcagcagacaccaaacagtgctattttaacaggaaacaaggccaatgaagaggaggaggaggaaataatagatgatgatgatgacactattagctccagtcctgactcggccgtcagtaatacatctttggtcccacaggctgatacctcccaaaataccagttttgatggatcattaatacagaagatgcagattcctacacttcttcaagaaccactttccaattccttaaaaatttcagatataattactagaaatactaatgatccaggcgtaggatcaaaacatctaatggagggtcagaagatcattactttagatacagctactgaaattgaaggcttatcgactggttgcaaggtttatgcaaatatcggtgaagatacttatgatatagtgatccctgtcaaagatgaccctgatgaaggggaggccagacttgagaatgaaataccaaaaacgtctggcagcgagatggcaaacaaacgtatgaaagtaaaacatgatgatcactatgagttaatagtagatggaagggtctattatatctgtattgtatgcaaaaggtcatatgtctgtctgacaagcttgcggagacattttaacattcattcttgggagaagaagtatccgtgccgttactgtgagaaggtatttcctcttgcagaatatcgcacaaagcatgaaattcatcacacaggggagcgaaggtatcagtgtttggcctgtggcaaatctttcatcaactatcagtttatgtcttcacatataaagtcagttcatagtcaagatccttctggggactcaaagctttatcgtttacatccatgcaggtctttacaaatcagacaatatgcatatctttccgatagatcaagcactattcctgcaatgaaggatgatggtattgggtataaggttgacactggaaaagaacctccagtagggaccactacatctactcagaacaagccaatgacctgggaagatatttttattcagcaggaaaatgattcaatttttaaacaaaatgtaacagatggcagtactgagtttgaatttataataccagagtcttactaaactcctttgaaatactagaaagttttgttttggatgatggggcaggggtttcagaagatctgtaaaacaaattaaggtgcgaacaagttaatttgatctgccacattatctgaaggaagtgtagtgggatttttgttgataatttttagaagcaaattttcctgaaagttttgagtagaggtgagaccccctccccaagtatctgtttatatagttagttttcagctcatttaaaagaggcaaaaattaaaagcttggagagatagtttcctgaatagaatttgaagcagtctgaatgttctttgaaaataactggagttattagcataccctagtacatcttacagctttccccttccatgttagcactttactgctgaattctcaattttcttaacattgagacaataaatgtgtgttttgtcttgtatatggcataaagagtaaataagttttagagttgttctggaaaatgtcagaataagtcagtacttgggttgtgtaatctgctagtccaagcgaacagcaacctcctgctaccctccctctatgaaaatagccatgcagacaagtctctcatctgaagaacaaattagatttagctaattagaattaatcctggctttcattgccatagtctgtaaaagactttggtggctagaccactttataccttcgcagtgtggtctctgggggcaaaaaactaatgaaaacaatctctgtaatggcagataggaggagatgaaaagttctgttgcatggatttttaattctctggctaccacatagtagagaatggaatgaagatttccttttggcttcttaaggttaaaaatattcccatgaacatgaaaattttcaaattttgaatctgaaagccaccaaatgtatctttatgtataaatccttgtaaatgatagattccatgggtgagactttacatattttgggtgggaggctactggcatatatttttaaatgttcatattgcgtagaatctccactaggaagtctttatttgaaatagttgaatcagtgatctagtattttcctttcggcaagatttgttaggtttttaccccttctaaaataagttttattccatctgcaaattgctgcaatattatagtaatcagaaactacataaggaatgttatataggcttgtcagttcccatttttcttgacaacaataaataccacttttaaaaatgacacatatttaaacacttagaaaataaagttaacacttactgaagtgctagtactaaactgtgctagtactaaaagaaaacaggttggaacatacatatagcctagcatttataacagaattgttgaacgtctgtaaatgattttttttttttttgcaaaggaaaaaattgatactggaaaagattgttgtgcatagttattagtcatttgtaaccttgcttaagtatttcttagtccaacatagatattttctttctcctgaccatgtattttaaaatatagtctatttcttgactttgaacttaaagctttaatcataatttctcatgtatacatcgttcttctgatggtaagctggatttgaaggtagtggtttcagtgtttcttaagttggtagctgagggtatcaggcatcagttcatgcaataatacaagaaaaaaaatcctttgcttgccaagaggtagagtgatgtgcatttatctgttttctgttctgtaagtctagaccttcaaaccatttgtaaactaacccctgggaaatttgaaattacctgataacttaagactctgtgatctctggaatcaccatatgtttcttttttgtgtagatattaataacattactctttgactatagtgtgcactctgaaatgtactcagtgaaaatttgttttgagtttcattaatgctatttcaccagttagacataattacttctaccgatgtgaatgatacggatgccggcagagcttccagatctttcagactcaactgctaggtcaattagtttgtcataataaaacttggcagattctacaagtctattatgacaaaccaggaactaattctataatggaaaactatccattctgaataataggtatgtaattatttgctgctgctgctgtgctctgtaaattctgaatatgacatttaaactctgtgcctactaaaggtatcttctggagtttttgggaggagagaaactggaaaattaaattgtatttttgccagaagactcttacttgcatgtgtctcagggtcttcagtttttctataagtttccatatccaaagttcagaattcatgtgaaatacttctttggggcaaaagtccttcattcctggtatttattggattggaaatctgtagcaagatgctgtttaaaattaccatattgtttttttatcttatacttagctctctggctattgaacttccttttcttgtttgaagttagcttcaaatttgctcctatgctaaattacctgtaaatattctggataggaactacttgaaatagtaatttgttaaaagatatgacaaaatgaaaatgcttaaactacagaaatttaaaaatgccataacaatcttgcgagactaactttaaaatatactttaaatgattattatgattttggtggtaacgatcccccacacacaaccactatgaagaaataatgccgcatttttcccccattgtaccaaaaagataaaaaaatggtaaacactgatcaaggtattttgtattgtcaaggcatgcatattctaaagaattaaatgctaacttaacagcactggctttctggctggtcaactatatgaaaccttgttcattcctccgagtactgtaatgttcacacttgtacaatcttccctgtcatgactttaagttctacttttcattaaccatggcctgatattagttcttagagcttcttgtggcaaaaataaaatgatttaattct

SEQ ID NO: 34710 - DNA, 2346 bp, Homo sapiens
  source 1..2346: mol_type = unassigned DNA
tttggcttcagcgcttcgcccccgcgctgtgccctctgtcggcggcgtggggcagctgtagcagcgttggcggcaggaggcggcggccgcgtcgacgtcgacccagactggagcgacgtttaaagaaggggcagaatcgctggggagtgcggcttcttcttgttgggggactcccagccttccgcgcgtccggaggaggagaagcggcggcgccgggaagcagtgtctgttgacttcacttggcactgtttaacattccacctctggaaattgtaaagatggagagatgaggggaagggacaaggggatgaagaaagaggaaagggcatggagagtagaaaactgatttctgctacagacattcagtactctggcagtctgctgaactccttgaatgagcaacgtggccatggactcttctgtgatgttaccgttattgtggaagaccgaaaattccgggctcacaagaatattctttcagcttctagtacctacttccatcagctcttctctgttgctgggcaagttgttgaactgagctttataagagcagagatctttgcagaaattctcaattatatctatagttctaaaattgttcgtgttagatcagatttgcttgatgagttaattaaatcagggcagttattaggagtgaaatttatagcagagcttggtgtcccattgtcacaggttaaaagcatctcaggtacagcgcaggatggtaatactgagcctttacctcctgattctggtgacaagaaccttgtaatacagaaatcaaaagatgaagcccaagataatggggctactataatgcctattataacagagtctttttcattatctgccgaagattatgaaatgaaaaagatcattgttaccgattctgatgatgatgatgatgatgtcattttttgctccgagattctgcccacaaaggagactttgccgagtaataacacagtggcacaggtccaatctaacccaggccctgttgctatttcagatgttgcacctagtgctagcaataactcgccccctttaacaaatatcacacctactcagaaacttcctactcctgtgaatcaggcaactttgagccaaacacaaggaagtgaaaaattgttggtatcttcagctccaacacatctgactcccaatattattttgttaaatcagacaccactttctacaccaccaaatgtcagttcttcacttccaaatcatatgccctcttcaatcaatttacttgtgcagaatcagcagacaccaaacagtgctattttaacaggaaacaaggccaatgaagaggaggaggaggaaataatagatgatgatgatgacactattagctccagtcctgactcggccgtcagtaatacatctttggtcccacaggctgatacctcccaaaataccagttttgatggatcattaatacagaagatgcagattcctacacttcttcaagaaccactttccaattccttaaaaatttcagatataattactagaaatactaatgatccaggcgtaggatcaaaacatctaatggagggtcagaagatcattactttagatacagctactgaaattgaaggcttatcgactggttgcaaggtttatgcaaatatcggtgaagatacttatgatatagtgatccctgtcaaagatgaccctgatgaaggggaggccagacttgagaatgaaataccaaaaacgtctggcagcgagatggcaaacaaacgtatgaaagtaaaacatgatgatcactatgagttaatagtagatggaagggtctattatatctgtattgtatgcaaaaggtcatatgtctgtctgacaagcttgcggagacattttaacattcattcttgggagaagaagtatccgtgccgttactgtgagaaggtatttcctcttgcagaatatcgcacaaagcatgaaattcatcacacaggggagcgaaggtatcagtgtttggcctgtggcaaatctttcatcaactatcagtttatgtcttcacatataaagtcagttcatagtcaagatccttctggggactcaaagctttatcgtttacatccatgcaggtctttacaaatcagacaatatgcatatctttccgatagatcaagcactattcctgcaatgaaggatgatggtattgggtataaggttgacactggaaaagaacctccagtagggaccactacatctactcagaacaagccaatgacctgggaagatatttttattcagcaggaaaatgattcaatttttaaacaaaatgtaacagatggcagtactgagtttgaatttataataccagagtcttactaa

SEQ ID NO: 34711 - DNA, 6564 bp, Homo sapiens
  source 1..6564: mol_type = unassigned DNA
cggggactggcctggcgccggcggcggcggagggggcgccgcgggcgggcgatgtgagcgcggcgctctggacagagtacgcttcatgtcagtagaaatggacagcagcagttttattcagtttgatgtgcccgagtacagcagcaccgttctgagccagctaaacgaactccgcctgcaggggaaactatgtgacatcattgtacacattcagggtcagccattccgagcccacaaagcagtccttgctgccagctccccatatttccgggaccattcagcgttaagtaccatgagtggcttgtcaatatcagtgattaaaaatcccaatgtgtttgagcagttgctttctttttgttacactggaagaatgtccttgcagctgaaggatgttgtcagttttctgactgcagccagctttcttcagatgcagtgtgtcattgacaagtgcacgcagatcctagagagcatccattccaaaatcagcgttggagatgttgactctgttaccgtcggtgctgaagagaatcccgagagtcgaaacggagtgaaagacagcagcttctttgccaacccagtggagatctctcctccatattgctctcagggacggcagcccaccgcaagcagtgacctccggatggagacgacccccagcaaagctttgcgcagccgcttacaggaggaggggcactcagaccgcgggagcagtgggagcgtttctgaatatgagattcagatagagggagaccatgagcaaggagacctattggtgagggagagccagatcaccgaggtgaaagtgaagatggagaagtccgaccggcccagctgttccgacagctcctccctgggtgacgatgggtaccacaccgagatggttgatggggaacaagttgtggcagtgaatgtgggctcctatggttctgtgctccagcacgcatactcctattcccaagcagcctcacagccaaccaatgtatcagaagcttttggaagtttgagtaattccagcccatccaggtccatgctgagctgtttccgaggagggcgtgcccgccagaagcgggctttgtctgtccacctgcacagtgacctgcagggcctggtgcagggctctgacagtgaagccatgatgaacaaccccgggtatgagagcagtccccgggagaggagtgcgagagggcattggtacccgtacaatgagaggttgatctgtatttactgtggaaagtccttcaaccagaaaggaagccttgataggcacatgcgactccatatgggaatcaccccctttgtgtgcaagttctgtgggaagaagtacacacggaaggaccaactggagtaccacatccggggccatacagatgataaaccattccgctgtgagatctgcgggaagtgctttccattccaaggtaccctcaaccagcacttgcggaaaaaccacccaggcgttgctgaagtcaggagtcgcattgagtcccccgagagaacagatgtgtacgtggaacagaaactagaaaatgacgcatcggcctcagagatgggcctagattcccggatggaaattcacacagtgtctgatgctcccgattaagatggtaaagaagtgcacccaaacaaagcacattaatcaatgcatatttgtgatttgctttgttgtaatctttggttttcccaaccatctggaaatctcttggtctcttggcagtttttctaaagtttctggatggaacacttcgttgtgtttatcctttcccctgccctccctccccgaaggagctcaaagcatgaagggcaacgcatccagggaaaacacaggctgacagtattcctctttggctgaactcttaatccaaaatctgccagtgatttagctatgccaactggttgaccctccattctctgccaagaggcatactctttctcattgtgtgcgctggcagcagtgcacttccacggagggagattaggatgccgtcagctgatacaaatgggtaaccttttctaatttaaaattccttttagggggtagttagacaatttatatatatatataataaaactattattatatatatagtatatatacattttcaaatttgattttattctggttgaggtgaatgtaagaggaatatataatttaatacaatgtgaacagggcttctgagtctatctcatccctacctaatatgttagggttttgccccttcatttcccttacaaaagaatgttagtaggtttatattaatcattgtgtccaaaagcaagcaaagcaaatcacagtgttcacagctctgcttcataacaaatacataaaccaaatgccataaaatttcttcaactctagttggaaaccgtttggaatttttgttagttgtccagcaggtaagctggatgacctgtggtgctgacctttttacatagtgtagtgttatattagccaaccccaaaggagcagtggttttcaaggtttttactggcctacaaatctaccttcattccgtactgtagaaacatacataccaggtaactaaatcgaatcactctctatcatgagttagtactcactcgcacttaaggaaagggatttgtagttctgtctacaaaattctccaagcagtgttgtggttttttttgtttttgttttttttctttctcttttcaaacagccagttcaggtgcacagcaactttttctacatgcagttcccagggaaactgcagaacttagaatttgtactttttgtaaagctatactctatgggaattgcaagcaatatatctatcttagtattgtgtgtgctaatgagagcctcagtggctcccccactctctcagtgtttcctgcttaaagaaccaacagtttaaaagccctctaagatactctgtgtgtcaccaaatctgtgtgtcaccattttttggtcatgtggtgctatttttgttaagtgtctttttaggtcagtatagttgtagaaaatgtgaaatctgatggtaataatgaattataattgttttcctctcttgagttcatagcttgaaaagagacctcaaaagcatgtgctggcaaacacgttactgtatgaaaacatacctgagtccatttgaataatgttttattagtactttcggaaatgtcttcagttctgtattgtgttcacatacacaaacaggctttacaagattgcttcggtactgtaaactctggcagagagtaattttgtaggcagtttggtggtgagtttgtgctgcaggctgcctgtgggatgtcagcgttctggtatctgcctgagaacctgggctctgagacgcacaaccagtgcacctccataggagaacagtgcagccacctaaaagaaaaacgaacgaaggaccagcctcagaggctagaagttaaaggaatacagaattagatgtttgctggttttctgtgcttttttggctcctaaaataccaatggtggatttgtttttgtttttgttttttgttttgagaaataaaaagtcattcaagccctttgtgtgtaatagcccccaggggtggcagctgtgcagtcgcatctctttggcacacaggatctgttcacgtgtgaactgctgcgctacacatcagtgttaactccctacagattacactctaatcccgctgctcccgaggagcggctttgctaaatcgggtatatagtatatgcctttttcctcgtcaaactgcctaagtaggggttcgttctctccctgaagcacttgttcaactcctgttaaagccgcgtgcctcaaggggaggctggaccccaagtgtttacccacttaaatatgttctggggtttcaggtaaatgtttgtgggtttttttttccttacatgaataagtttggttttgatttttttttaattgaatgcaaaaaatttgtgttgtgatacaaattaagtttgtgacaagaaatgcccaaatccaaggacataagaggtcaagctcagggaaggaacctccttttcactcaggcttggggcctccagcgaggtttccagagcattccatggtatgagagacagtgaggagggagggcacctggcgcgggcacttccagcgtcctggctcttggcattgtccgtcttaaccttatttacatggagttctttgtatttgtgaatctgtttaactggtttgagtttaccaaagagtgacttatccaaaattgtctttgacaaaaatatccattgctttgattgtacagttcaggttcaaacattgtaatgggactgttaaggggcagaaaattgattgagtttctctctaagaatcatgattccacattttgcaagttccacttgctcccattcgtgttgctaacactttaccctttccactgctcgcagtgttaagaatgaattctcaagccataacacagtactgtaaagttccgcagggcttcgagggaggcagcgcctaggccagcacggagctgtgtagcctctctgagcgttcgcactgtcatgcttcccaggggtgtgactggtgagagattaactccattcagatcgggcagcagcaattaattgtgccttgccgcatgaggatgtgtcaggaggattaacatgaccacagaaccgaaacattctctccctgaagttcacttcacgtctccgcagacgaagtacgctgtgtaactccttagagcaactctttttggaaagcaaagtccctatttctgtacagttttaggttaggtgtttcatttataacagatgcagaaatcaattaagataaagtgatatgtgaagaaatcttttacagtaaaatatatcctgaattcatataggcttgttcataattgagtctcttcttgagctaccttttcaatattagacaatgtgaagacagtgacagcgtccttttctagagatatttagcctgttattacaaactgtgaagacaaagaattttatacttttactaatgtttgtggttttaaacagttattttcattctaatcagttctctaccctctaatttctactaaagctgtaaatacatttagaaattatatttgtaaatacagtatatggagacaagttaattttttggtcagtggaaaaagcctcccaaccaattggccctgccttggcagttgtgttttttgttgttgttgttgttgttttagtttagtttttttttttaaacagcagaaaggatactgtcggttcactgttgagcagaatatactgtagaacgaaaatgataatttttaaatcttccagagcatgagtaaatgtcttttctaatgatagcaaatataaccaactctttgtttttcccttagcccagaccatatagacctgcgtattttgtgtgtggttttgtttttatttttgttcttacagcctagaccctaggaaaaatttgcaggaacacgaaacaagggctggggggaaaatcatctatgtgaatgagctttactttaaagagatcaatgtattttattttatcaactttttctcttagttactgtgatttttgttgttgttgtcctcgttattgttaaattctgtaatggtttcctgtgaagcctccactgaaagggactcaaatatgcaacacctaaactattttccaagggcacatgccccttgaatggtgcttctagactggtcagggttatttattaaattttatatatgaaagtattggggaattatgtaaattctttatatgaaactatctagttcataaatcatagatttcatattactcagtgcaactgaactaaaagttcagaaaagtcattcacattgttccaaatttgtaatggttgtcacatgtcacatgcgtctttttcagtaagtgccagagtgttcccactgtttctgcccagtgcttgacttctcggcccggaagagaacctgctttctctggtttccttcctgagtctggcacagacggggctattgtagttcttgatcaagtcctggagtcagccttgcctggctctccttgtagcagattcagtccacagacctcttgctgcccctcagtgacaagtatgctgtgaattcaacctttggacttgctgcccaagcctttggttgctgccctgactattgtaagaggtaaacttacctggtttgtttgagaatgaccattttcctaatgtgaaaaccatctctctcaccacttttattagtagggctaacatttttttccgttataaatggttgagcaatttgaatgacttaacacagtgtcattatcttgcaatataaactggtaacctcacaactccacacttcatcaccatatgaagtaaatgaagctagctaagcggatgctgtatcaactagtaacttgccattaaggattattttatagcatgaatttaagactatttattcaaatgatattttactcttgtattcactttgttttagatttgtgacatgaatatttcagtgctgcttaattttgttctgaattcttgtttcttgcttgtaaatggcttttttatggtataaataaagtcaatggacattgctgtttgtaaataaaaatgctgctagagcaaa

SEQ ID NO: 34712 - DNA, 6528 bp, Homo sapiens
  source 1..6528: mol_type = unassigned DNA
gaggagtcattggtgaatgatgcaaactctctctctccgcagagtacgcttcatgtcagtagaaatggacagcagcagttttattcagtttgatgtgcccgagtacagcagcaccgttctgagccagctaaacgaactccgcctgcaggggaaactatgtgacatcattgtacacattcagggtcagccattccgagcccacaaagcagtccttgctgccagctccccatatttccgggaccattcagcgttaagtaccatgagtggcttgtcaatatcagtgattaaaaatcccaatgtgtttgagcagttgctttctttttgttacactggaagaatgtccttgcagctgaaggatgttgtcagttttctgactgcagccagctttcttcagatgcagtgtgtcattgacaagtgcacgcagatcctagagagcatccattccaaaatcagcgttggagatgttgactctgttaccgtcggtgctgaagagaatcccgagagtcgaaacggagtgaaagacagcagcttctttgccaacccagtggagatctctcctccatattgctctcagggacggcagcccaccgcaagcagtgacctccggatggagacgacccccagcaaagctttgcgcagccgcttacaggaggaggggcactcagaccgcgggagcagtgggagcgtttctgaatatgagattcagatagagggagaccatgagcaaggagacctattggtgagggagagccagatcaccgaggtgaaagtgaagatggagaagtccgaccggcccagctgttccgacagctcctccctgggtgacgatgggtaccacaccgagatggttgatggggaacaagttgtggcagtgaatgtgggctcctatggttctgtgctccagcacgcatactcctattcccaagcagcctcacagccaaccaatgtatcagaagcttttggaagtttgagtaattccagcccatccaggtccatgctgagctgtttccgaggagggcgtgcccgccagaagcgggctttgtctgtccacctgcacagtgacctgcagggcctggtgcagggctctgacagtgaagccatgatgaacaaccccgggtatgagagcagtccccgggagaggagtgcgagagggcattggtacccgtacaatgagaggttgatctgtatttactgtggaaagtccttcaaccagaaaggaagccttgataggcacatgcgactccatatgggaatcaccccctttgtgtgcaagttctgtgggaagaagtacacacggaaggaccaactggagtaccacatccggggccatacagatgataaaccattccgctgtgagatctgcgggaagtgctttccattccaaggtaccctcaaccagcacttgcggaaaaaccacccaggcgttgctgaagtcaggagtcgcattgagtcccccgagagaacagatgtgtacgtggaacagaaactagaaaatgacgcatcggcctcagagatgggcctagattcccggatggaaattcacacagtgtctgatgctcccgattaagatggtaaagaagtgcacccaaacaaagcacattaatcaatgcatatttgtgatttgctttgttgtaatctttggttttcccaaccatctggaaatctcttggtctcttggcagtttttctaaagtttctggatggaacacttcgttgtgtttatcctttcccctgccctccctccccgaaggagctcaaagcatgaagggcaacgcatccagggaaaacacaggctgacagtattcctctttggctgaactcttaatccaaaatctgccagtgatttagctatgccaactggttgaccctccattctctgccaagaggcatactctttctcattgtgtgcgctggcagcagtgcacttccacggagggagattaggatgccgtcagctgatacaaatgggtaaccttttctaatttaaaattccttttagggggtagttagacaatttatatatatatataataaaactattattatatatatagtatatatacattttcaaatttgattttattctggttgaggtgaatgtaagaggaatatataatttaatacaatgtgaacagggcttctgagtctatctcatccctacctaatatgttagggttttgccccttcatttcccttacaaaagaatgttagtaggtttatattaatcattgtgtccaaaagcaagcaaagcaaatcacagtgttcacagctctgcttcataacaaatacataaaccaaatgccataaaatttcttcaactctagttggaaaccgtttggaatttttgttagttgtccagcaggtaagctggatgacctgtggtgctgacctttttacatagtgtagtgttatattagccaaccccaaaggagcagtggttttcaaggtttttactggcctacaaatctaccttcattccgtactgtagaaacatacataccaggtaactaaatcgaatcactctctatcatgagttagtactcactcgcacttaaggaaagggatttgtagttctgtctacaaaattctccaagcagtgttgtggttttttttgtttttgttttttttctttctcttttcaaacagccagttcaggtgcacagcaactttttctacatgcagttcccagggaaactgcagaacttagaatttgtactttttgtaaagctatactctatgggaattgcaagcaatatatctatcttagtattgtgtgtgctaatgagagcctcagtggctcccccactctctcagtgtttcctgcttaaagaaccaacagtttaaaagccctctaagatactctgtgtgtcaccaaatctgtgtgtcaccattttttggtcatgtggtgctatttttgttaagtgtctttttaggtcagtatagttgtagaaaatgtgaaatctgatggtaataatgaattataattgttttcctctcttgagttcatagcttgaaaagagacctcaaaagcatgtgctggcaaacacgttactgtatgaaaacatacctgagtccatttgaataatgttttattagtactttcggaaatgtcttcagttctgtattgtgttcacatacacaaacaggctttacaagattgcttcggtactgtaaactctggcagagagtaattttgtaggcagtttggtggtgagtttgtgctgcaggctgcctgtgggatgtcagcgttctggtatctgcctgagaacctgggctctgagacgcacaaccagtgcacctccataggagaacagtgcagccacctaaaagaaaaacgaacgaaggaccagcctcagaggctagaagttaaaggaatacagaattagatgtttgctggttttctgtgcttttttggctcctaaaataccaatggtggatttgtttttgtttttgttttttgttttgagaaataaaaagtcattcaagccctttgtgtgtaatagcccccaggggtggcagctgtgcagtcgcatctctttggcacacaggatctgttcacgtgtgaactgctgcgctacacatcagtgttaactccctacagattacactctaatcccgctgctcccgaggagcggctttgctaaatcgggtatatagtatatgcctttttcctcgtcaaactgcctaagtaggggttcgttctctccctgaagcacttgttcaactcctgttaaagccgcgtgcctcaaggggaggctggaccccaagtgtttacccacttaaatatgttctggggtttcaggtaaatgtttgtgggtttttttttccttacatgaataagtttggttttgatttttttttaattgaatgcaaaaaatttgtgttgtgatacaaattaagtttgtgacaagaaatgcccaaatccaaggacataagaggtcaagctcagggaaggaacctccttttcactcaggcttggggcctccagcgaggtttccagagcattccatggtatgagagacagtgaggagggagggcacctggcgcgggcacttccagcgtcctggctcttggcattgtccgtcttaaccttatttacatggagttctttgtatttgtgaatctgtttaactggtttgagtttaccaaagagtgacttatccaaaattgtctttgacaaaaatatccattgctttgattgtacagttcaggttcaaacattgtaatgggactgttaaggggcagaaaattgattgagtttctctctaagaatcatgattccacattttgcaagttccacttgctcccattcgtgttgctaacactttaccctttccactgctcgcagtgttaagaatgaattctcaagccataacacagtactgtaaagttccgcagggcttcgagggaggcagcgcctaggccagcacggagctgtgtagcctctctgagcgttcgcactgtcatgcttcccaggggtgtgactggtgagagattaactccattcagatcgggcagcagcaattaattgtgccttgccgcatgaggatgtgtcaggaggattaacatgaccacagaaccgaaacattctctccctgaagttcacttcacgtctccgcagacgaagtacgctgtgtaactccttagagcaactctttttggaaagcaaagtccctatttctgtacagttttaggttaggtgtttcatttataacagatgcagaaatcaattaagataaagtgatatgtgaagaaatcttttacagtaaaatatatcctgaattcatataggcttgttcataattgagtctcttcttgagctaccttttcaatattagacaatgtgaagacagtgacagcgtccttttctagagatatttagcctgttattacaaactgtgaagacaaagaattttatacttttactaatgtttgtggttttaaacagttattttcattctaatcagttctctaccctctaatttctactaaagctgtaaatacatttagaaattatatttgtaaatacagtatatggagacaagttaattttttggtcagtggaaaaagcctcccaaccaattggccctgccttggcagttgtgttttttgttgttgttgttgttgttttagtttagtttttttttttaaacagcagaaaggatactgtcggttcactgttgagcagaatatactgtagaacgaaaatgataatttttaaatcttccagagcatgagtaaatgtcttttctaatgatagcaaatataaccaactctttgtttttcccttagcccagaccatatagacctgcgtattttgtgtgtggttttgtttttatttttgttcttacagcctagaccctaggaaaaatttgcaggaacacgaaacaagggctggggggaaaatcatctatgtgaatgagctttactttaaagagatcaatgtattttattttatcaactttttctcttagttactgtgatttttgttgttgttgtcctcgttattgttaaattctgtaatggtttcctgtgaagcctccactgaaagggactcaaatatgcaacacctaaactattttccaagggcacatgccccttgaatggtgcttctagactggtcagggttatttattaaattttatatatgaaagtattggggaattatgtaaattctttatatgaaactatctagttcataaatcatagatttcatattactcagtgcaactgaactaaaagttcagaaaagtcattcacattgttccaaatttgtaatggttgtcacatgtcacatgcgtctttttcagtaagtgccagagtgttcccactgtttctgcccagtgcttgacttctcggcccggaagagaacctgctttctctggtttccttcctgagtctggcacagacggggctattgtagttcttgatcaagtcctggagtcagccttgcctggctctccttgtagcagattcagtccacagacctcttgctgcccctcagtgacaagtatgctgtgaattcaacctttggacttgctgcccaagcctttggttgctgccctgactattgtaagaggtaaacttacctggtttgtttgagaatgaccattttcctaatgtgaaaaccatctctctcaccacttttattagtagggctaacatttttttccgttataaatggttgagcaatttgaatgacttaacacagtgtcattatcttgcaatataaactggtaacctcacaactccacacttcatcaccatatgaagtaaatgaagctagctaagcggatgctgtatcaactagtaacttgccattaaggattattttatagcatgaatttaagactatttattcaaatgatattttactcttgtattcactttgttttagatttgtgacatgaatatttcagtgctgcttaattttgttctgaattcttgtttcttgcttgtaaatggcttttttatggtataaataaagtcaatggacattgctgtttgtaaataaaaatgctgctagagc

SEQ ID NO: 34713 - DNA, 3650 bp, Homo sapiens
  source 1..3650: mol_type = unassigned DNA
agttctcagacaggctgcccagaggggctccagcataagcaggagacatgatgacagtcatgtccctttccagggacctcaaggacgactttcacagtgacacggtactctccatcttaaatgagcagcgcattcggggcattttatgcgatgtcactatcattgtggaagataccaaatttaaagcccatagcaatgttctggcagcttcaagcctgtattttaaaaatatcttttggagccatacaatctgtatttccagccacgtcctggagctggacgatctcaaagctgaagtgtttactgaaatacttaattatatctacagttccacagtcgttgtcaagagacaggaaacagtcactgatctcgcagctgcaggaaaaaagctgggaatatcgttcttggaagaccttactgatcgcaacttctcaaattccccgggtccctatgtattctgtattactgaaaagggagtggttaaagaagaaaaaaatgaaaaaaggcatgaagaaccagccatcactaatgggccaaggatcacaaatgcattttccatcatcgaaacagaaaatagtaataacatgttttccccgctggacttgagggcaagtttcaaaaaggtctccgactccatgagaacagctagcctttgcctggagaggacggacgtctgccacgaggcagagcctgtccgcacacttgccgagcactcatacgctgtttcttccgtagctgaagcttacagaagtcagcctgtacgtgaacatgatggcagttcacctggtaacacagggaaagaaaattgtgaagcccttgcagcgaaaccgaaaacatgccggaagccaaagacattctccataccacaggattcggattcagccacagaaaatataccaccccctccagtatccaacttagaggttaatcaagaaagaagtccacaaccagctgctgttctcactcgttcaaaatctccaaacaatgaaggagatgtccatttttccagggaagatgaaaatcaatcttctgatgttcccgggccgccagccgcagaggttccacctctggtgtacaattgtagctgctgttccaaagcctttgacagcagcactctgctcagtgcccacatgcagcttcacaagccaacccaggagcctttagtgtgcaagtattgcaacaaacaattcaccaccctgaacaggttggatcggcatgaacagatctgcatgaggtcaagccacatgcccattcctggaggaaaccaacgctttttagaaaactatcctaccattggacaaaatggaggttcattcacaggtccagaacctttattatctgaaaataggattggtgaattttccagtaccggaagtactttgccagacacggaccacatggttaaatttgttaatgggcaaatgctctacagttgcgttgtgtgcaaacgtagttatgtgaccttatctagcctccgaagacatgcaaatgttcactcctggagaagaacatatccttgccattactgcaacaaagtatttgcattggctgagtacaggacaaggcatgaaatttggcatacgggagaaagacgatatcagtgcattttctgtcttgaaactttcatgacctactatatactcaaaaatcatcagaagtctttccatgccatcgatcatagactttccatcagtaaaaaaacagcaaatggaggcttgaagcctagtgtctatccgtataaactttataggctactgcctatgaaatgcaagagagccccttataagagctaccgaaattcttcctatgaaaatgcacgagaaaacagtcaaatgaatgagtctgcacctggtacctatgttgttcagaatccacacagctctgaattaccaacgctgaatttccaagatactgtaaacaccctgaccaacagtccagccatcccattggaaacatctgcatgtcaggacatacccacttctgccaatgtacaaaatgcagagggtaccaaatggggagaggaggcattgaaaatggatcttgacaataacttttattcaactgaggtgtcagtttcttccactgaaaatgctgtcagttctgacctccgggcaggggatgtacctgttttatctttgagtaatagcagtgagaatgccgcctctgtgatcagctacagtggctctgcaccctcggtcattgtacacagcagccagttttcatcggtgatcatgcacagcaatgccattgctgccatgaccagcagcaaccacagagccttttcagacccagctgtcagtcagtccctgaaagatgacagtaagcccgagccagataaagtgggtaggtttgcaagcagacccaaaagcattaaggagaaaaagaaaactacatcacataccaggggagaaataccggaggagtcaaactatgttgctgatcctggaggatcactgagcaaaaccacaaatattgctgaagaaaccagcaaaattgaaacctacattgcaaaacctgctctgccgggaacctccacaaatagtaatgttgcacccctttgccaaataacagtgaaaattggaaacgaagccattgtgaaaaggcacattctaggatctaaattgttttataaaagagggagaagacccaagtatcagatgcaggaggagcctttgccacaggggaatgacccagaacccagtggagacagcccactcgggctttgccaatccgagtgcatggagatgagtgaagtgttcgatgacgcaagtgaccaggattccactgacaaaccgtggcgcccttactacaactacaaacccaaaaagaaatccagacagttgaaaaaaatgaggaaagtcaactggaggaaggagcacggaaacaggagcccgagccataaatgtaaatacccagcagaactggattgcgccgtggggaaggctcctcaggataaaccctttgaggaagaagaaactaaagagatgcccaagctgcagtgtgaactctgtgatggagacaaagcagtgggggctggaaaccaaggaaggccccaccgacatcttacttctcggccatatgcctgcgagctctgcgccaagcagttccagagcccttccacactcaaaatgcacatgagatgtcacaccggggagaagccataccagtgcaagacctgcggacggtgcttttcggtgcaaggaaacttacagaaacatgaacgcatccacctgggcttgaaggagttcgtctgtcagtattgcaacaaggcattcaccttgaatgagaccctcaaaatccatgaaagaatccatactggagaaaagcgttaccactgtcagttctgctttcagagatttttgtatctctccaccaaaaggaatcacgagcagaggcatattcgggagcataatgggaagggctatgcctgcttccagtgccccaaaatttgcaaaacagctgctgcccttggaatgcaccaaaagaaacacttattcaaaagcccaagtcagcaggagaaaataggtgacgtgtgccacgaaaactcaaatcccttggagaatcaacatttcattggttcagaagacaatgaccaaaaggataacatacaaaccggtgtggaaaatgttgtcctttgagtggcaagaatt

SEQ ID NO: 34714 - DNA, 3662 bp, Homo sapiens
  source 1..3662: mol_type = unassigned DNA
agttctcagacaggctgcccagaggggctccagcataagcaggagacatgatgacagtcatgtccctttccagggacctcaaggacgactttcacagtgacacggtactctccatcttaaatgagcagcgcattcggggcattttatgcgatgtcactatcattgtggaagataccaaatttaaagcccatagcaatgttctggcagcttcaagcctgtattttaaaaatatcttttggagccatacaatctgtatttccagccacgtcctggagctggacgatctcaaagctgaagtgtttactgaaatacttaattatatctacagttccacagtcgttgtcaagagacaggaaacagtcactgatctcgcagctgcaggaaaaaagctgggaatatcgttcttggaagaccttactgatcgcaacttctcaaattccccgggtccctatgtattctgtattactgaaaagggagtggttaaagaagaaaaaaatgaaaaaaggcatgaagaaccagccatcactaatgggccaaggatcacaaatgcattttccatcatcgaaacagaaaatagtaataacatgttttccccgctggacttgagggcaagtttcaaaaaggtctccgactccatgagaacagctagcctttgcctggagaggacggacgtctgccacgaggcagagcctgtccgcacacttgccgagcactcatacgctgtttcttccgtagctgaagcttacagaagtcagcctgtacgtgaacatgatggcagttcacctggtaacacagggaaagaaaattgtgaagcccttgcagcgaaaccgaaaacatgccggaagccaaagacattctccataccacaggattcggattcagccacagaaaatataccaccccctccagtatccaacttagaggttaatcaagaaagaagtccacaaccagctgctgttctcactcgttcaaaatctccaaacaatgaaggagatgtccatttttccagggaagatgaaaatcaatcttctgatgttcccgggccgccagccgcagaggttccacctctggtgtacaattgtagctgctgttccaaagcctttgacagcagcactctgctcagtgcccacatgcagcttcacaagccaacccaggagcctttagtgtgcaagtattgcaacaaacaattcaccaccctgaacaggttggatcggcatgaacagatctgcatgaggtcaagccacatgcccattcctggaggaaaccaacgctttttagaaaactatcctaccattggacaaaatggaggttcattcacaggtccagaacctttattatctgaaaataggattggtgaattttccagtaccggaagtactttgccagacacggaccacatggttaaatttgttaatgggcaaatgctctacagttgcgttgtgtgcaaacgtagttatgtgaccttatctagcctccgaagacatgcaaatgttcactcctggagaagaacatatccttgccattactgcaacaaagtatttgcattggctgagtacaggacaaggcatgaaatttggcatacgggagaaagacgatatcagtgcattttctgtcttgaaactttcatgacctactatatactcaaaaatcatcagaagtctttccatgccatcgatcatagactttccatcagtaaaaaaacagcaaatggaggcttgaagcctagtgtctatccgtataaactttataggctactgcctatgaaatgcaagagagccccttataagagctaccgaaattcttcctatgaaaatgcacgagaaaacagtcaaatgaatgagtctgcacctggtacctatgttgttcagaatccacacagctctgaattaccaacgctgaatttccaagatactgtaaacaccctgaccaacagtccagccatcccattggaaacatctgcatgtcaggacatacccacttctgccaatgtacaaaatgcagagggtaccaaatggggagaggaggcattgaaaatggatcttgacaataacttttattcaactgaggtgtcagtttcttccactgaaaatgctgtcagttctgacctccgggcaggggatgtacctgttttatctttgagtaatagcagtgagaatgccgcctctgtgatcagctacagtggctctgcaccctcggtcattgtacacagcagccagttttcatcggtgatcatgcacagcaatgccattgctgccatgaccagcagcaaccacagagccttttcagacccagctgtcagtcagtccctgaaagatgacagtaagcccgagccagataaagtgggtaggtttgcaagcagacccaaaagcattaaggagaaaaagaaaactacatcacataccaggggagaaataccggaggagtcaaactatgttgctgatcctggaggatcactgagcaaaaccacaaatattgctgaagaaaccagcaaaattgaaacctacattgcaaaacctgctctgccgggaacctccacaaatagtaatgttgcacccctttgccaaataacagtgaaaattggaaacgaagccattgtgaaaaggcacattctaggatctaaattgttttataaaagagggagaagacccaagtatcagatgcaggaggagcctttgccacaggggaatgacccagaacccagtggagacagcccactcgggctttgccaatccgagtgcatggagatgagtgaagtgttcgatgacgcaagtgaccaggattccactgacaaaccgtggcgcccttactacaactacaaacccaaaaagaaatccagacagttgaaaaaaatgaggaaagtcaactggaggaaggagcacggaaacaggagcccgagccataaatgtaaatacccagcagaactggattgcgccgtggggaaggctcctcaggataaaccctttgaggaagaagaaactaaagagatgcccaagctgcagtgtgaactctgtgatggagacaaagcagtgggggctggaaaccaaggaaggccccaccgacatcttacttctcggccatatgcctgcgagctctgcgccaagcagttccagagcccttccacactcaaaatgcacatgagatgtcacaccggggagaagccataccagtgcaagacctgcggacggtgcttttcggtgcaaggaaacttacagaaacatgaacgcatccacctgggcttgaaggagttcgtctgtcagtattgcaacaaggcattcaccttgaatgagaccctcaaaatccatgaaagaatccatactggagaaaagcgttaccactgtcagttctgctttcagagatttttgtatctctccaccaaaaggaatcacgagcagaggcatattcgggagcataatgggaagggctatgcctgcttccagtgccccaaaatttgcaaaacagctgctgcccttggaatgcaccaaaagaaacacttattcaaaagcccaagtcagcaggagaaaataggtgacgtgtgccacgaaaactcaaatcccttggagaatcaacatttcattggttcagaagacaatgaccaaaaggataacatacaaaccggtgtggaaaatgttgtcctttgagtggcaagaattagaaaaatcttc

SEQ ID NO: 34715 - DNA, 578 bp, Homo sapiens
  source 1..578: mol_type = unassigned DNA
gcatttttctacaagcctgccggcaccatttaggattttgaaaaataatctagaaatgctataccctttatcaaaattattttttactttgcaagagcttaacagttttggttttttcttagcaattctataaaattaacatctataaaatgcatcccggaccagatacatactgtattgaaagctttcttcaggaagagaatatgagagtgttctttccagcttattttcttccttagcaaaaggattgtttgattctcagaagcagaaggacacattcattgtggagcagctctgcttaagtttgaaccaagactctgaggctgatatgcaatgtcacttacaacattaatcagatactgcatttaagatcttgatgtggaagaaatggaggactcagaaccaaggatttccaagtgatttcttccaaagcacaggaatctcactctgttaaagctggtctgttctaactgagatgacagtcatgtccctttccagggacctcaaggacgactttcacagtgacacggtactctccatcttaaatgagcagcgcattcggggcattttatgcgatg

SEQ ID NO: 34716 - DNA, 590 bp, Homo sapiens
  source 1..590: mol_type = unassigned DNA
agcgctgcggccggactcacgggtccggaagcaccatggacccccggggaaacgcgccggcggcgaaggagccgagccccatcttgatgtggaagaaatggaggactcagaaccaaggatttccaagtgatttcttccaaagcacaggaatctcactctgttaaagctggtctgttctaactgagacggagtttcgctcttgttgcccaggctggagtacaatggcgcaatcttggctcaccacaacctccgcctcccgggttcaagcagttcttctctctcagcctcccgagtagctgggattacagatgacagtcatgtccctttccagggacctcaaggacgactttcacagtgacacggtactctccatcttaaatgagcagcgcattcggggcattttatgcgatgtcactatcattgtggaagataccaaatttaaagcccatagcaatgttctggcagcttcaagcctgtattttaaaaatatcttttggagccatacaatctgtatttccagccacgtcctggagctggacgatctcaaagctgaagtgtttactgaaatacttaattatatctacagttcc

SEQ ID NO: 34717 - DNA, 593 bp, Homo sapiens
  source 1..593: mol_type = unassigned DNA
tatttctggagtagttgtgggagagagatgtactccaaagagaagaggactcttgctatggttcagttgaaccaagactctgaggctgatatgcaatgtcacttacaacattaatcagatactgcatttaagatcttgatgtggaagaaatggaggactcagaaccaaggatttccaagtgatttcttccaaagcacaggaatctcactctgttaaagctggtctgttctaactgagatgacagtcatgtccctttccagggacctcaaggacgactttcacagtgacacggtactctccatcttaaatgagcagcgcattcggggcattttatgcgatgtcactatcattgtggaagataccaaatttaaagcccatagcaatgttctggcagcttcaagcctgtattttaaaaatatcttttggagccatacaatctgtatttccagccacgtcctggagctggacgatctcaaagctgaagtgtttactgaaatacttaattatatctacagttccacagtcgttgtcaagagacaggaaacagtcactgatctcgcagctgcaggaaaaaagctgggaatatcgttctt

SEQ ID NO: 34718 - DNA, 855 bp, Homo sapiens
  source 1..855: mol_type = unassigned DNA
aggttgtccaagctggcctccctctctgctgagtgcactccagcagcttcccgatgttggcctttagaacagcctgaatttcagttaaaaaataagcttcccctgtcacacgatgccttcttgaatctgatagcttaagtgcagtaaaatctgataaatgtagcttttctgtgcccgtttcaggccacatttagaaggcaacatcaacaggattttccttttcctagacacagctcaactccataaaggacttctgttttgtaatctgttttcgagatctgatgcgtgtgtttctaacaccccgtcacgtgaggaggtctgacgtagtcacccaacatgactttgagaaaatatactgtaaagatgtgtgtgggatggtacagccagctcactgaagcaaaatatcctttgtcggaaaactttccgcagggaataacagacctgcgcagtagatttcactttgatatggcccctgtgctggcccagtatggactgcaggtttgacttttgcaggattccagatgacagtcatgtccctttccagggacctcaaggacgactttcacagtgacacggtactctccatcttaaatgagcagcgcattcggggcattttatgcgatgtcactatcattgtggaagataccaaatttaaagcccatagcaatgttctggcagcttcaagcctgtattttaaaaatatcttttggagccatacaatctgtatttccagccacgtcctggagctggacgatctcaaagctgaagtgtttactgaaatacttaattatatctacagttccacagtcgttgtcaagagacaggaaacagtcactgatctcgcagctgcaggaa

SEQ ID NO: 34719 - DNA, 1434 bp, Homo sapiens
  source 1..1434: mol_type = unassigned DNA
cacagaagccctctagccaaggcctcgggcagccctaccaaatgaatatgggcacttgagttttctaggagggctttcctgctgccctgggtctcatccaactggtatccatctaaacattcccacccagggttattcatgctagaggaagaagaatgccctttccagagccagttcttggggaaaagaggaactgttgatatagccagagcccgaaaagaagattactctgcaacagctaaagcctcacgaaagattttacttgtagatcaactttcaaaatgtaggaagtcagaatgggtgacatcatcagaaaaatatgtggagctgatcacaagaagtgaagaacccagagcacgaaagcggttgtgactcctgggcccagggagttgacagcgtctgggtttcagaggagccagcgcctccgagttgtcttgaagtgaggctctgctgtagtcctgttcttctggctctaagatctgaatgttgtgaccactaatttgctctttcctggagagtaaccccagtttggtccacaaggcttgctgcccaatctttgccaacagttgaaccaagactctgaggctgatatgcaatgtcacttacaacattaatcagatactgcatttaaggttcacagtgtcttcacctggaatagattccacctcaagaaaccagtttctttgctcatccataagaagcaactcctcatctgatcaagttttataataagattgcagaaattcagtctcatctttaggctccacttctagttcttatgctatttccaccacatctgcagttacttcctccactgaagtcttgaatctctcaaagtcatccatgagggttggaaccaacatcttccaaactcctgatcttgatgtggaagaaatggaggactcagaaccaaggatttccaagtgatttcttccaaagcacaggaatctcactctgttaaagctggtctgttctaactgagatgacagtcatgtccctttccagggacctcaaggacgactttcacagtgacacggtactctccatcttaaatgagcagcgcattcggggcattttatgcgatgtcactatcattgtggaagataccaaatttaaagcccatagcaatgttctggcagcttcaagcctgtattttaaaaatatcttttggagccatacaatctgtatttccagccacgtcctggagctggacgatctcaaagctgaagtgtttactgaaatacttaattatatctacagttccacagtcgttgtcaagagacaggaaacagtcactgatctcgcagctgcaggaaaaaagctgggaatatcgttcttggaagaccttactgatcgcaacttctcaaattccccgggtccctatgtattctgtattactgaaaagggagtggttaaagaagaaaaaaatgaaaa

SEQ ID NO: 34720 - DNA, 2659 bp, Homo sapiens
  source 1..2659: mol_type = unassigned DNA
gcagtctcagaaaaaccttggatgagaaacttcttttttcaatcctgttttcctgttgataaattcagttctgtgatcacagttcattcaagctgttctgcgtatgatttttgtgtgtatgtgacaattgcatctaaaacttgtgagcaagaagacagagaaatcagttggtctccatcgctttacataaaaatggctgagtgtcttgtcatgctagcactgcattaagtgatgcatacagatcttgatgtggaagaaatggaggactcagaaccaaggatttccaagtgatttcttccaaagcacaggaatctcactctgttaaagctggtctgttctaactgagatgacagtcatgtccctttccagggacctcaaggacgactttcacagtgacacggtactctccatcttaaatgagcagcgcattcggggcattttatgcgatgtcactatcattgtggaagataccaaatttaaagcccatagcaatgttctggcagcttcaagcctgtattttaaaaatatcttttggagccatacaatctgtatttccagccacgtcctggagctggacgatctcaaagctgaagtgtttactgaaatacttaattatatctacagttccacagtcgttgtcaagagacaggaaacagtcactgatctcgcagctgcaggaaaaaagctgggaatatcgttcttggaagaccttactgatcgcaacttctcaaattccccgggtccctatgtattctgtattactgaaaagggagtggttaaagaagaaaaaaatgaaaaaaggcatgaagaaccagccatcactaatgggccaaggatcacaaatgcattttccatcatcgaaacagaaaatagtaataacatgttttccccgctggacttgagggcaagtttcaaaaaggtctccgactccatgagaacagctagcctttgcctggagaggacggacgtctgccacgaggcagagcctgtccgcacacttgccgagcactcatacgctgtttcttccgtagctgaagcttacagaagtcagcctgtacgtgaacatgatggcagttcacctggtaacacagggaaagaaaattgtgaagcccttgcagcgaaaccgaaaacatgccggaagccaaagacattctccataccacaggattcggattcagccacagaaaatataccaccccctccagtatccaacttagaggttaatcaagaaagaagtccacaaccagctgctgttctcactcgttcaaaatctccaaacaatgaaggagatgtccatttttccagggaagatgaaaatcaatcttctgatgttcccgggccgccagccgcagaggttccacctctggtgtacaattgtagctgctgttccaaagcctttgacagcagcactctgctcagtgcccacatgcagcttcacaagccaacccaggagcctttagtgtgcaagtattgcaacaaacaattcaccaccctgaacaggttggatcggcatgaacagatctgcatgaggtcaagccacatgcccattcctggaggaaaccaacgctttttagaaaactatcctaccattggacaaaatggaggttcattcacaggtccagaacctttattatctgaaaataggattggtgaattttccagtaccggaagtactttgccagacacggaccacatggttaaatttgttaatgggcaaatgctctacagttgcgttgtgtgcaaacgtagttatgtgaccttatctagcctccgaagacatgcaaatgttcactcctggagaagaacatatccttgccattactgcaacaaagtatttgcattggctgagtacaggacaaggcatgaaatttggcatacgggagaaagacgatatcagtgcattttctgtcttgaaactttcatgacctactatatactcaaaaatcatcagaagtctttccatgccatcgatcatagactttccatcagtaaaaaaacagcaaatggaggcttgaagcctagtgtctatccgtataaactttataggctactgcctatgaaatgcaagagagccccttataagagctaccgaaattcttcctatgaaaatgcacgagaaaacagtcaaatgaatgagtctgcacctggtacctatgttgttcagaatccacacagctctgaattaccaacgctgaatttccaagatactgtaaacaccctgaccaacagtccagccatcccattggaaacatctgcatgtcaggacatacccacttctgccaatgtacaaaatgcagagggtaccaaatggggagaggaggcattgaaaatggatcttgacaataacttttattcaactgaggtgtcagtttcttccactgaaaatgctgtcagttctgacctccgggcaggggatgtacctgttttatctttgagtaatagcagtgagaatgccgcctctgtgatcagctacagtggctctgcaccctcggtcattgtacacagcagccagttttcatcggtgatcatgcacagcaatgccattgctgccatgaccagcagcaaccacagagccttttcagacccagctgtcagtcagtccctgaaagatgacagtaagcccgagccagataaagtgggtaggtttgcaagcagaccc

SEQ ID NO: 34721 - DNA, 644 bp, Homo sapiens
  source 1..644: mol_type = unassigned DNA
attttctgggcggtgctgtgcagcgctgcggccggactcacgggtccggaagcaccatggacccccggggaaacgcgccggcggcgaaggagccgagccccatcttgatgtggaagaaatggaggactcagaaccaaggatttccaagtgatttcttccaaagcacaggaatctcactctgttaaagctggtctgttctaactgagatgacagtcatgtccctttccagggacctcaaggacgactttcacagtgacacggtactctccatcttaaatgagcagcgcattcggggcattttatgcgatgtcactatcattgtggaagataccaaatttaaagcccatagcaatgttctggcagcttcaagcctgtattttaaaaatatcttttggagccatacaatctgtatttccagccacgtcctggagctggacgatctcaaagctgaagtgtttactgaaatacttaattatatctacagttccacagtcgttgtcaagagacaggaaacagtcactgatctcgcagctgcaggaaaaaagctgggaatatcgttcttggaagaccttactgatcgcaacttctcaaattccccgggtccctatgtattctgtattactgaaaagggagtggttaaagaa

SEQ ID NO: 34722 - DNA, 859 bp, Homo sapiens
  source 1..859: mol_type = unassigned DNA
aggctgcccagaggggctccagcataagcaggagacatggagactcttgcctccatcatggaggaggttcacaccagaagccagctctgcccttggagactctcttcccccagtgctcccctgaagcttcacactcaccagtctcatgctgcaccctgaccggcaggtccctagcatgagccccataatccctggggactgcattatcacagaccagtaataagaagatgacagtcatgtccctttccagggacctcaaggacgactttcacagtgacacggtactctccatcttaaatgagcagcgcattcggggcattttatgcgatgtcactatcattgtggaagataccaaatttaaagcccatagcaatgttctggcagcttcaagcctgtattttaaaaatatcttttggagccatacaatctgtatttccagccacgtcctggagctggacgatctcaaagctgaagtgtttactgaaatacttaattatatctacagttccacagtcgttgtcaagagacaggaaacagtcactgatctcgcagctgcaggaaaaaagctgggaatatcgttcttggaagaccttactgatcgcaacttctcaaattccccgggtccctatgtattctgtattactgaaaagggagtggttaaagaagaaaaaaatgaaaaaaggcatgaagaaccagccatcactaatgggccaaggatcacaaatgcattttccatcatcgaaacagaaaatagtaataacatgttttccccgctggacttgagggcaagtttcaaaaaggtctccgactccatgagaacagctagcctttgcctggagaggacggacgtctgccacga

SEQ ID NO: 34723 - DNA, 591 bp, Homo sapiens
  source 1..591: mol_type = unassigned DNA
aaccaagactctgaggctgatatgcaatgtcacttacaacattaatcagatactgcatttaagatcttgatgtggaagaaatggaggactcagaaccaaggatttccaagtgatttcttccaaagcacaggaatctcactctgttaaagctggtctgttctaactgaggctggagtacaatggcgcaatcttggctcaccacaacctccgcctcccgggttcaagcagttcttctctctcagcctcccgagtagctgggattacagatgacagtcatgtccctttccagggacctcaaggacgactttcacagtgacacggtactctccatcttaaatgagcagcgcattcggggcattttatgcgatgtcactatcattgtggaagataccaaatttaaagcccatagcaatgttctggcagcttcaagcctgtattttaaaaatatcttttggagccatacaatctgtatttccagccacgtcctggagctggacgatctcaaagctgaagtgtttactgaaatacttaattatatctacagttccacagtcgttgtcaagagacaggaaacagtcactgatctcgcag

SEQ ID NO: 34724 - DNA, 649 bp, Homo sapiens
  source 1..649: mol_type = unassigned DNA
ctcgagtccagcgggctcgggcactgctttgacagtcacacctcccgtctcctggattgggaatcggaccctagtcctgaccctatgggaacttgatgatttccttgatgcaacaccaagcccctggaattgaaagggacgtgcaaaggcagggacctgcccccaggggtttgcagtctcagccgcctacttctgcagtagtaaggtctgctctgttggtacaacatacaacacaaccgcccgccgttagccactttttttatagggtacatcataaatcacctgagattttagtctgtccgcggttccactttataactcctgcactgcggtagatcttgatgtggaagaaatggaggactcagaaccaaggatttccaagtgatttcttccaaagcacaggaatctcactctgttaaagctggtctgttctaactgagatgacagtcatgtccctttccagggacctcaaggacgactttcacagtgacacggtactctccatcttaaatgagcagcgcattcggggcattttatgcgatgtcactatcattgtggaagataccaaatttaaagcccatagcaatgttctggcagcttcaagcctgtattttaaaaatatcttttggagccatacaatctgtatttc

SEQ ID NO: 34725 - DNA, 7683 bp, Homo sapiens
  source 1..7683: mol_type = unassigned DNA
agttggtctccatcgctttacataaaaatggctgagtgtcttgtcatgctagcactgcattaagtgatgcatacagatcttgatgtggaagaaatggaggactcagaaccaaggatttccaagtgatttcttccaaagcacaggaatctcactctgttaaagctggtctgttctaactgaggctggagtacaatggcgcaatcttggctcaccacaacctccgcctcccgggttcaagcagttcttctctctcagcctcccgagtagctgggattacagatgacagtcatgtccctttccagggacctcaaggacgactttcacagtgacacggtactctccatcttaaatgagcagcgcattcggggcattttatgcgatgtcactatcattgtggaagataccaaatttaaagcccatagcaatgttctggcagcttcaagcctgtattttaaaaatatcttttggagccatacaatctgtatttccagccacgtcctggagctggacgatctcaaagctgaagtgtttactgaaatacttaattatatctacagttccacagtcgttgtcaagagacaggaaacagtcactgatctcgcagctgcaggaaaaaagctgggaatatcgttcttggaagaccttactgatcgcaacttctcaaattccccgggtccctatgtattctgtattactgaaaagggagtggttaaagaagaaaaaaatgaaaaaaggcatgaagaaccagccatcactaatgggccaaggatcacaaatgcattttccatcatcgaaacagaaaatagtaataacatgttttccccgctggacttgagggcaagtttcaaaaaggtctccgactccatgagaacagctagcctttgcctggagaggacggacgtctgccacgaggcagagcctgtccgcacacttgccgagcactcatacgctgtttcttccgtagctgaagcttacagaagtcagcctgtacgtgaacatgatggcagttcacctggtaacacagggaaagaaaattgtgaagcccttgcagcgaaaccgaaaacatgccggaagccaaagacattctccataccacaggattcggattcagccacagaaaatataccaccccctccagtatccaacttagaggttaatcaagaaagaagtccacaaccagctgctgttctcactcgttcaaaatctccaaacaatgaaggagatgtccatttttccagggaagatgaaaatcaatcttctgatgttcccgggccgccagccgcagaggttccacctctggtgtacaattgtagctgctgttccaaagcctttgacagcagcactctgctcagtgcccacatgcagcttcacaagccaacccaggagcctttagtgtgcaagtattgcaacaaacaattcaccaccctgaacaggttggatcggcatgaacagatctgcatgaggtcaagccacatgcccattcctggaggaaaccaacgctttttagaaaactatcctaccattggacaaaatggaggttcattcacaggtccagaacctttattatctgaaaataggattggtgaattttccagtaccggaagtactttgccagacacggaccacatggttaaatttgttaatgggcaaatgctctacagttgcgttgtgtgcaaacgtagttatgtgaccttatctagcctccgaagacatgcaaatgttcactcctggagaagaacatatccttgccattactgcaacaaagtatttgcattggctgagtacaggacaaggcatgaaatttggcatacgggagaaagacgatatcagtgcattttctgtcttgaaactttcatgacctactatatactcaaaaatcatcagaagtctttccatgccatcgatcatagactttccatcagtaaaaaaacagcaaatggaggcttgaagcctagtgtctatccgtataaactttataggctactgcctatgaaatgcaagagagccccttataagagctaccgaaattcttcctatgaaaatgcacgagaaaacagtcaaatgaatgagtctgcacctggtacctatgttgttcagaatccacacagctctgaattaccaacgctgaatttccaagatactgtaaacaccctgaccaacagtccagccatcccattggaaacatctgcatgtcaggacatacccacttctgccaatgtacaaaatgcagagggtaccaaatggggagaggaggcattgaaaatggatcttgacaataacttttattcaactgaggtgtcagtttcttccactgaaaatgctgtcagttctgacctccgggcaggggatgtacctgttttatctttgagtaatagcagtgagaatgccgcctctgtgatcagctacagtggctctgcaccctcggtcattgtacacagcagccagttttcatcggtgatcatgcacagcaatgccattgctgccatgaccagcagcaaccacagagccttttcagacccagctgtcagtcagtccctgaaagatgacagtaagcccgagccagataaagtgggtaggtttgcaagcagacccaaaagcattaaggagaaaaagaaaactacatcacataccaggggagaaataccggaggagtcaaactatgttgctgatcctggaggatcactgagcaaaaccacaaatattgctgaagaaaccagcaaaattgaaacctacattgcaaaacctgctctgccgggaacctccacaaatagtaatgttgcacccctttgccaaataacagtgaaaattggaaacgaagccattgtgaaaaggcacattctaggatctaaattgttttataaaagagggagaagacccaagtatcagatgcaggaggagcctttgccacaggggaatgacccagaacccagtggagacagcccactcgggctttgccaatccgagtgcatggagatgagtgaagtgttcgatgacgcaagtgaccaggattccactgacaaaccgtggcgcccttactacaactacaaacccaaaaagaaatccagacagttgaaaaaaatgaggaaagtcaactggaggaaggagcacggaaacaggagcccgagccataaatgtaaatacccagcagaactggattgcgccgtggggaaggctcctcaggataaaccctttgaggaagaagaaactaaagagatgcccaagctgcagtgtgaactctgtgatggagacaaagcagtgggggctggaaaccaaggaaggccccaccgacatcttacttctcggccatatgcctgcgagctctgcgccaagcagttccagagcccttccacactcaaaatgcacatgagatgtcacaccggggagaagccataccagtgcaagacctgcggacggtgcttttcggtgcaaggaaacttacagaaacatgaacgcatccacctgggcttgaaggagttcgtctgtcagtattgcaacaaggcattcaccttgaatgagaccctcaaaatccatgaaagaatccatactggagaaaagcgttaccactgtcagttctgctttcagagatttttgtatctctccaccaaaaggaatcacgagcagaggcatattcgggagcataatgggaagggctatgcctgcttccagtgccccaaaatttgcaaaacagctgctgcccttggaatgcaccaaaagaaacacttattcaaaagcccaagtcagcaggagaaaataggtgacgtgtgccacgaaaactcaaatcccttggagaatcaacatttcattggttcagaagacaatgaccaaaaggataacatacaaaccggtgtggaaaatgttgtcctttgagtggcaagaattagaaaaatcttcaaaaatatagttggtggtttttttagttatgatttaagtttagtttcattttgtccatgtgacagtcatgaaggagtgaaattaaaaaaaaaaaaaactcatttgtgaaaattccagaaaaaggatcctaatatctactttgggttttagcattaactttatgcaaagtgcacaaaaacaaaatagctgactcctccaatatcccaagtttcttgtgaaagttaataaaattcttagctgtggtatttctaccagtgaaaaaaggagtttaattttagcctagtttaaaactttctaataattgctaataagaactggctgctgaactgtctttagtcactggagaaaataagggtcagatatcctgaagatggcatcttcgtaaatatgttacgtggtaataagctgtgtgacggtctttattcccatctggcttctgcactattaaaatttgtttaaattaatggatacacatgaaatacttaaacaatataactgaaattatgtgcataatgagtaacctaaagtaggacattcatacattatgtagaactacttttctgcaacacaaaccttgtaaaatacatatataaatcactataacttttaactgtccatatcccctgtagagaattatgaggagcaatagatctgcaaataatgaggactgatgtaaaaatcaatagaaagcattttgaatatgatttaagagcatgtgaatgcttttagatggaatgctgttcccttgaagttatggctgagctgttcttagaactggtctactcaattcacagaaaacataggtcatgccttatctatgggggaacaccctcccagaatttacctgtgattacctgtgctgcatattactttgcaatggcctcatctcagagaatgaaagagggtcacattgttctgaaactctctgcagtcttccaaccaccacaaggccatggatgtgggggtctattccagacagacttaagggctcaagtggaacctgccatctcccattccactgaaggactgtccaagagatttagtgcaaggtacactgcagtagtgaattcccaggcacttgaaagtgactgcctaatccctacaattactagccttgttggagattatgcagcccacaagtacagactagtataaagcaaaaggacaaaggaacccccaccctccaccccacccattaatgacttgagtgggcaagaagaagtgatggccttccttgcctaaaacagtagctttgtttttagggggtgggaaggtaggatgtggagtgacatggttctatcctttacttatgagactcagaaatatatctacaaagccagatgctctgtcttcatatttgcagacatctagaccccttgctaaaaacccactgaagttttttttttatgttctttgacccacaccatcaacactaccctcaaatctaattgccctacagcatattctatcatgtggactaggttcctggaaagccggaactcatgattctttttcaaactgccagaatagaagggagagagaaaacatttctaccctttgatcaccagtgtgaacagaatccggaatgcagtttcagcgtgacctgcagtcattcatgttcattggatttgacagatggaaacccaaggttatcgaagattggaaggttatcattgtgaagaagtagctcaaaggactccggtttctgtctacaagtgtgatgtctccatgaagaagacttagtatggatttgggtgggtaagaaagcatttaaacgcccaggaaaggacatgattaaagttgaccttttaatactgtagtaccttgctgttaagtaaccccactattgtatctgcatttatcttttgttcatctactttcacttacatacagtattatataagtagagaaaaatgggaaaatgcaagcaaattcaactttattttatacattgtatatatgtacaccctacactattcatttgggttttattaaagagatagtcacaaagggcttacgaaaatcatttttgaattgataattagaatattgaataagcaatcctatgatccactaatttgttttatcagttaataatattaatcaaagacatttactgtatattctagtcattttgatttgagttaaccccaaatataaaattacctgtagtgatgtctctctcccagcccttatatgtggatattttttaagtggacttgtatgctgataattctagaccaaagtaaatatggcagaatatttatacatgaaaaaataattttgcaaatattttctataattgtattcatttaaaatgttgatagcttgtgttagtttcagggaggggtgtatattttgataaaaaaatacttgactttgtaattctgtatattctatacaatttatagcagagccgttttaagacagccttgtcacatttttttgttaattgtgaaaattttattgagtgatgtttaagtatgcattgagtacatgaccaactagaattaaagtaagtgtaaacagtgaacatactgtatgctgtacaagatataatgtaacttgctgttttagcatctgtattttggttagaagatattattaaatgcagatgttaaggattggaaaagtctaattttatttttagaaataatggatataaatttgtttttgcttgattaaaatagcttattcctacattaagtctctttttaaatgttttcatgttatttcttttgtgcagctatttcatctgtgtgagtcacagctttgtttccacgtattattcagtttatttctgtttccttacttgtttacattccgtggtacctacttacatgcttaggagtcaaatggattatgacattaggaaaaaagcagaataaaagagattgaagtcttctgatgattgagtgttttggataggcctgatcttataatgataaatcagagaatgaaatgctctccaggaagcattctgctccactcatccgtgggaaacaaattacatttattgagtaccaggcactgggcaatgtctttacataggctatttcattaacacacacgcaccagaattcgacctcattatcctcgttttatagtgactttgagaaggtctcacaaccagacaaagccaggatgctaacctaggtctgcctgactccaaagcccatgtttttgttccttctcaacactgtagagaaaaatcatttatagaaactgaacagagtatgaggaaaggagatatgataaagtaatgcagctttaggatggcagttagtgactgccctggaacaggattaaaggaggctgtgtcaggttcagcttcccctgaattgggcttcccttatatctcaggagattgccctataaaatcagtaaaatttgtgcacttttttaaggatatggagtaaaattgtaatagcattataagctggtaattttcacacaaagaaaaaaatacgttccgtcgtcacagactctactcctaaacttagctaactaactatcttgcaaatgcctgcagtttgtcccagtgggcaatgtgagaggggatgtcggtggctcaggcagcacagtccatcaccaacacagagaaaattactgccaggcctaccggtggctggccagtagcatcaattttgtattggaagggcaatccaaaccagattcaccaaaaatttgataactgttatctgctaaaactaacttcattatgtacaagaacaacagatttaatattgaaagcatctgtaacaattgggaaagtaaaagcataaaacaaaa

SEQ ID NO: 34726 - DNA, 5891 bp, Homo sapiens
  source 1..5891: mol_type = unassigned DNA
cagggagagaagaatttttttctttaatcccaccgcctctcctcgctgctcccttttgcactgaggcttaaggtttgaagactcgagggtaaaattgggccgctttcattctagtttggacaacggtttcatcttcagcaaaagcctctcattcgtagccccccccagctggaaaatggtctgctctgcgaatcgaaggaagaggcccagcagaagggactcgctgagccaccccccgccccactccatgttggctgtgctctcaggctggcaccatgcccccccctgcagaggtgacggacccgtcccatgcccccgccgtcctgcgccagctcaatgaacagcggctccgtggcctcttctgtgacgtcaccctcatagccggagacaccaagttccctgctcaccgcagcgtcctggctgcttcaagtcccttcttcagagaggccctgctcacttcagccccactaccccttccaccagctactgggggcgccgcacccaaccctgccaccaccacagctgcctcttcctcctcctcctcttcctcgtcttcttcctcttcttcctcctctgcttcttcttcttcttcctcttcctcttcctctccccctccagcctctccccctgcttcttccccaccccgggtcctggagttgccaggagtcccagcagctgcgttttctgatgtcctcaacttcatctacagcgcccggctcgcactgcctggtggtggaggggacggggcagctgtagcagagattggagctttggggcgccgtctgggcatctcccgccttcagggcctgggggagggaggtgatgcctgggtacctcctaccccagcccccatggccacctcgcagcctgaagaggacagctttgggcccgggcccaggccagctggggagtgggagggtgacagggctgaggcccaggcccctgacttgcagtgctccctgccccggcggcccctcccctgcccccagtgtggaaaaagcttcatccatcccaaacggctgcagacccatgaggcccagtgccgacgaggggccagcacgcgggggtctacagggctgggagctgggggcgctggccctggtggtcctgcaggggtggacgcctcagccctgcctccaccagtgggcttccgagggggccccgagcacgtggtgaaggtggtgggcggccacgtgctgtatgtgtgcgcggcctgcgagcgttcctacgtgaccctgtccagtctgaagagacacagcaatgtacactcgtggcggaggaagtacccctgccgctattgtgagaaagtgtttgctctggcggagtaccgcacgaagcatgaagtgtggcacacgggggagcgcaggtaccagtgcatcttctgttgggagacctttgtcacttactataacctgaagacccaccagcgagccttccacggcattagcccgggcctccttgccagtgagaagacacccaatggaggctacaagcccaagctcaatacactcaagctctaccgcctgctccccatgcgggcagccaagcggccctacaagacctacagccagggagccccggaggctcccctttctccaaccctcaacacaccggcccctgtggcaatgccagccagcccgccgcctgggcctccacctgccccagagcctggccctccaccctctgtcatcacttttgcccacccagccccctctgtcattgtccatgggggcagtagcagtggtggaggggggagtgggacggccagcacaggagggtcccaagctgcctcggttatcacttacactgctcccccgaggccacccaagaaacgagaatacccacctcctccccctgagcctgcagccacacccaccagcccagccacagcagtcagcccagccaccgctgcagggccagccatggccaccaccacggaggaggccaagggccggaatccacgggctggaaggactctgacttacacagccaagccagtgggcgggattggtggaggtgggggtccccccacaggggctggccggggcccctctcagctgcaggctccacctccactgtgtcagatcactgtgcgaataggggaggaggccatcgtcaagcgccgcatctcagagactgacctgcgtcctggggagctgagcggagaggagatggaggagagtgaggaggacgaagaggaggaggacgaagaggaggaggaggaggatgaggaggaatcaaaggctggtggggaggaccagctctggaggccctactactcctacaagcctaagcgcaaggctggagctgctggaggtgccagtgtggggggcagtgggctgccccgaggccgccggccaccacgttggaggcagaagctggaacggaggagctgggaggaaaccccagcggccgagagcccagcgggacgtgcccgcacagagcggaggcaccgatgcggggactgtgcccagaccttcaccaccctgagaaagctgcggaagcaccaagaggcccacggtgggggctcccacagctcccgggccggacggaggccctccacccgctttacctgcccccactgcgccaaggtgtgcaagaccgcagctgccctgagccgccacgggcagaggcatgctgctgagcggcccgggggcaccccaacccctgtcattgcctattccaagggcagcgctggcaccaggcccggggatgtcaaggaggaagccccccaagagatgcaagtctcctcatccagcggtgaggcaggtggcgggagcactgctgctgaggaagcttccgagaccgcctcactccaggaccctatcatttcagggggtgaggagcccccagtagtggcaagcgggggcagctatgtatacccacctgtgcaggaatttccactggccttgattgggggcggccgggaacctggcggtggcaggggaaaatctgggagtgaagggccagtgggggctggtgagggggaccggatggaggggataggggctgccaaagtcactttctaccctgagccctacccgctcgtctatggcccccagctccttgccgcctacccttacaacttcagtaacttggccgctctcccggttgctctcaacatggtcctacctgatgagaagggtgcgggggcccttcccttcctaccaggggtctttggctacgcagtgaatcctcaagcagcaccccctgccccaccaacaccacctcccccaactcttcctccaccaattccccctaagggagaaggggaaagggcaggggttgagagaacccagaagggcgatgtggggtgaaccctggggctcaatccccctttcaccagatgccaccctccctgaaccccccaccactaccagctccctggcctccctgccccttgggagccccttcacactcttgtgcagggacttgggggcccctggagctcaggggtcaggctgctttgtgtgagatgtagttttcccatctcctgggaagggatctttcgaggttcccctctcagtcttcctccagggaatggcctccatgaggggcagggccagcttccatcccttctccagcccttggggcaactgagcaatatacttaacctgaatctctactcacagcccccaccagctctgaatgtctaacctgctcccctgattcgtaaacctaggggaaaccatctctctcacctaatgacccgccttgttctgaagctttctctaagcccttcccagttgcttcctagcacattccattctttgtggcccagggcctggaccagaccattgtgatacctgaccccgcccacctgggagtgtggctttgggtttcatccttccccagcgtgggtctctacgtccctgtttcccttgtatcaagacaccttcctcagcttccatgcctttggatcttccatgttcctccccatattcctggacttcggagatggcctctcccaagccaggtcaaggaggtttgggggagggttgcccctctgcccctctgttctgtggctgagcactttcccagtccagggcagggaaatattggccctatcttgacccccaaatccagtgagctccagattcttccaaggcaaaagaggtaagcagatcacacctctttctgcctctacatatggcctattctgggctagaccagatttgggggccaggagggaagaactccatatgggatggagaagggaatctactttctccctgtttttttttcctgatggtttctcccagactagaccaaatagccagaaaaatgataggggtcggatgggtgggtaagcccaggatttgcacatgaccttccatccttacctgtattcccatctccccagtgtcactcccctcaccaatcactccagatggttttgggggaaccattctactcttctggtgggctttggggtatccccaccaactttcccttcaaaatagcaccttacaccccatctttgactcagttccccacacccaaagatcccagcctagggatggggtacagggactttaaatagtccctaatccctaatttgcactagttaaccctggtcagggtccctgtatttccttccagtgggggagataaatgtttgctcctaattctctttgaaaactgggcctccctgctctgtgattggataaatatttcccatcccacccacctccccccaaaaaatagctcacaaggggagagccagtatgggggagcaaatttgacaaatgggaattagaggagtgcagttttaaaaggaaaagttgctgtcatcaaaatggcagccttttccccagctactgtttttggggccaagatggctgccctagcagcaatcactgccaagggcaagatcatggcttttggagggaggtgagtttagggagggccaggaccatcctcctacccctcataccctcccagcatatacaaaaggggaggttttagacaggctccctgaatgttaaccacagaggagtcactccttcattcctcctctgtctctttgcacttttcttggtcttggccacagcctgagtgacgaatttcctactgaatgtaccaagttccaatttttaagggggggaaaggtttcaaatggggaaaaacacacaaaaaaaaaaatcactaaaaattcccacaaatcttgtttctggcactttagaaaaactgcaaaaaaatacgtaataaagaatacatatatatatatctacacacaaattatatatctatctatctatacagcggaaccacaagagagactgaggaaggcctggaggcaggggcagaggtgacgacagtgcccctatatccttaacccatactcctctgaggcaaacaggcatgggaaaatggaagggttgaggatggaccggagaattggaacttcagaataggtcaaaattccaaaaccatggacatttttttttgggagaattgagattgtagacattttttttttcttaaatatgatcaaggaaaatagcttccagaatgtggtggttctgggcaacaaatgagattgtggcgacgtggagattaaaatatatgtatttgagctggggaatttgaatattgtgagtttcagatgttggaaatttgggattttgcagttttgtcttttgaaaatgatcaagtcttgtcagttcgtgccctctttccccatgttccctgggaagacgggtggtggcagagtgagaaggccactggttctgtgccgcagcacgcaaaatttagaattctacagactagctctatacgtagtgaggacccagatttagagaaactgaccaatatttatctccgcatttgtgtgtgtgtccaactctgtaggccaataaaccaacaagacaaatgaactgtgctccaca

SEQ ID NO: 34727 - DNA, 5863 bp, Homo sapiens
  source 1..5863: mol_type = unassigned DNA
gtcagcggcggcggcggcggcggcagcggggccgggccggggccaggcgctgggggggccagggccggagctggagccggagccggagctggaggcgggcaaaaccggagcggccgggggcggccacggtgatgagccgggcctggcggacgcggcgccatcgcagtcagaaggaagaggcccagcagaagggactcgctgagccaccccccgccccactccatgttggctgtgctctcaggctggcaccatgcccccccctgcagaggtgacggacccgtcccatgcccccgccgtcctgcgccagctcaatgaacagcggctccgtggcctcttctgtgacgtcaccctcatagccggagacaccaagttccctgctcaccgcagcgtcctggctgcttcaagtcccttcttcagagaggccctgctcacttcagccccactaccccttccaccagctactgggggcgccgcacccaaccctgccaccaccacagctgcctcttcctcctcctcctcttcctcgtcttcttcctcttcttcctcctctgcttcttcttcttcttcctcttcctcttcctctccccctccagcctctccccctgcttcttccccaccccgggtcctggagttgccaggagtcccagcagctgcgttttctgatgtcctcaacttcatctacagcgcccggctcgcactgcctggtggtggaggggacggggcagctgtagcagagattggagctttggggcgccgtctgggcatctcccgccttcagggcctgggggagggaggtgatgcctgggtacctcctaccccagcccccatggccacctcgcagcctgaagaggacagctttgggcccgggcccaggccagctggggagtgggagggtgacagggctgaggcccaggcccctgacttgcagtgctccctgccccggcggcccctcccctgcccccagtgtggaaaaagcttcatccatcccaaacggctgcagacccatgaggcccagtgccgacgaggggccagcacgcgggggtctacagggctgggagctgggggcgctggccctggtggtcctgcaggggtggacgcctcagccctgcctccaccagtgggcttccgagggggccccgagcacgtggtgaaggtggtgggcggccacgtgctgtatgtgtgcgcggcctgcgagcgttcctacgtgaccctgtccagtctgaagagacacagcaatgtacactcgtggcggaggaagtacccctgccgctattgtgagaaagtgtttgctctggcggagtaccgcacgaagcatgaagtgtggcacacgggggagcgcaggtaccagtgcatcttctgttgggagacctttgtcacttactataacctgaagacccaccagcgagccttccacggcattagcccgggcctccttgccagtgagaagacacccaatggaggctacaagcccaagctcaatacactcaagctctaccgcctgctccccatgcgggcagccaagcggccctacaagacctacagccagggagccccggaggctcccctttctccaaccctcaacacaccggcccctgtggcaatgccagccagcccgccgcctgggcctccacctgccccagagcctggccctccaccctctgtcatcacttttgcccacccagccccctctgtcattgtccatgggggcagtagcagtggtggaggggggagtgggacggccagcacaggagggtcccaagctgcctcggttatcacttacactgctcccccgaggccacccaagaaacgagaatacccacctcctccccctgagcctgcagccacacccaccagcccagccacagcagtcagcccagccaccgctgcagggccagccatggccaccaccacggaggaggccaagggccggaatccacgggctggaaggactctgacttacacagccaagccagtgggcgggattggtggaggtgggggtccccccacaggggctggccggggcccctctcagctgcaggctccacctccactgtgtcagatcactgtgcgaataggggaggaggccatcgtcaagcgccgcatctcagagactgacctgcgtcctggggagctgagcggagaggagatggaggagagtgaggaggacgaagaggaggaggacgaagaggaggaggaggaggatgaggaggaatcaaaggctggtggggaggaccagctctggaggccctactactcctacaagcctaagcgcaaggctggagctgctggaggtgccagtgtggggggcagtgggctgccccgaggccgccggccaccacgttggaggcagaagctggaacggaggagctgggaggaaaccccagcggccgagagcccagcgggacgtgcccgcacagagcggaggcaccgatgcggggactgtgcccagaccttcaccaccctgagaaagctgcggaagcaccaagaggcccacggtgggggctcccacagctcccgggccggacggaggccctccacccgctttacctgcccccactgcgccaaggtgtgcaagaccgcagctgccctgagccgccacgggcagaggcatgctgctgagcggcccgggggcaccccaacccctgtcattgcctattccaagggcagcgctggcaccaggcccggggatgtcaaggaggaagccccccaagagatgcaagtctcctcatccagcggtgaggcaggtggcgggagcactgctgctgaggaagcttccgagaccgcctcactccaggaccctatcatttcagggggtgaggagcccccagtagtggcaagcgggggcagctatgtatacccacctgtgcaggaatttccactggccttgattgggggcggccgggaacctggcggtggcaggggaaaatctgggagtgaagggccagtgggggctggtgagggggaccggatggaggggataggggctgccaaagtcactttctaccctgagccctacccgctcgtctatggcccccagctccttgccgcctacccttacaacttcagtaacttggccgctctcccggttgctctcaacatggtcctacctgatgagaagggtgcgggggcccttcccttcctaccaggggtctttggctacgcagtgaatcctcaagcagcaccccctgccccaccaacaccacctcccccaactcttcctccaccaattccccctaagggagaaggggaaagggcaggggttgagagaacccagaagggcgatgtggggtgaaccctggggctcaatccccctttcaccagatgccaccctccctgaaccccccaccactaccagctccctggcctccctgccccttgggagccccttcacactcttgtgcagggacttgggggcccctggagctcaggggtcaggctgctttgtgtgagatgtagttttcccatctcctgggaagggatctttcgaggttcccctctcagtcttcctccagggaatggcctccatgaggggcagggccagcttccatcccttctccagcccttggggcaactgagcaatatacttaacctgaatctctactcacagcccccaccagctctgaatgtctaacctgctcccctgattcgtaaacctaggggaaaccatctctctcacctaatgacccgccttgttctgaagctttctctaagcccttcccagttgcttcctagcacattccattctttgtggcccagggcctggaccagaccattgtgatacctgaccccgcccacctgggagtgtggctttgggtttcatccttccccagcgtgggtctctacgtccctgtttcccttgtatcaagacaccttcctcagcttccatgcctttggatcttccatgttcctccccatattcctggacttcggagatggcctctcccaagccaggtcaaggaggtttgggggagggttgcccctctgcccctctgttctgtggctgagcactttcccagtccagggcagggaaatattggccctatcttgacccccaaatccagtgagctccagattcttccaaggcaaaagaggtaagcagatcacacctctttctgcctctacatatggcctattctgggctagaccagatttgggggccaggagggaagaactccatatgggatggagaagggaatctactttctccctgtttttttttcctgatggtttctcccagactagaccaaatagccagaaaaatgataggggtcggatgggtgggtaagcccaggatttgcacatgaccttccatccttacctgtattcccatctccccagtgtcactcccctcaccaatcactccagatggttttgggggaaccattctactcttctggtgggctttggggtatccccaccaactttcccttcaaaatagcaccttacaccccatctttgactcagttccccacacccaaagatcccagcctagggatggggtacagggactttaaatagtccctaatccctaatttgcactagttaaccctggtcagggtccctgtatttccttccagtgggggagataaatgtttgctcctaattctctttgaaaactgggcctccctgctctgtgattggataaatatttcccatcccacccacctccccccaaaaaatagctcacaaggggagagccagtatgggggagcaaatttgacaaatgggaattagaggagtgcagttttaaaaggaaaagttgctgtcatcaaaatggcagccttttccccagctactgtttttggggccaagatggctgccctagcagcaatcactgccaagggcaagatcatggcttttggagggaggtgagtttagggagggccaggaccatcctcctacccctcataccctcccagcatatacaaaaggggaggttttagacaggctccctgaatgttaaccacagaggagtcactccttcattcctcctctgtctctttgcacttttcttggtcttggccacagcctgagtgacgaatttcctactgaatgtaccaagttccaatttttaagggggggaaaggtttcaaatggggaaaaacacacaaaaaaaaaaatcactaaaaattcccacaaatcttgtttctggcactttagaaaaactgcaaaaaaatacgtaataaagaatacatatatatatatctacacacaaattatatatctatctatctatacagcggaaccacaagagagactgaggaaggcctggaggcaggggcagaggtgacgacagtgcccctatatccttaacccatactcctctgaggcaaacaggcatgggaaaatggaagggttgaggatggaccggagaattggaacttcagaataggtcaaaattccaaaaccatggacatttttttttgggagaattgagattgtagacattttttttttcttaaatatgatcaaggaaaatagcttccagaatgtggtggttctgggcaacaaatgagattgtggcgacgtggagattaaaatatatgtatttgagctggggaatttgaatattgtgagtttcagatgttggaaatttgggattttgcagttttgtcttttgaaaatgatcaagtcttgtcagttcgtgccctctttccccatgttccctgggaagacgggtggtggcagagtgagaaggccactggttctgtgccgcagcacgcaaaatttagaattctacagactagctctatacgtagtgaggacccagatttagagaaactgaccaatatttatctccgcatttgtgtgtgtgtccaactctgtaggccaataaaccaacaagacaaatgaactgtgctcc

SEQ ID NO: 34728 - DNA, 931 bp, Homo sapiens
  source 1..931: mol_type = unassigned DNA
gatacccattgcgcgccggcctcaagatggccgccttctggcgtctccggcgctgttgaatggcgaaagctttattgttcccttcgggcaggagtgttcgtgtcctctatggcgctgtcaataaagaacggcagtttgaatcggtgctgaacagggcctgtcctcccaaagccaactctaaggagaggagaggaagagcagttcttggggcagagttgacgcaatggagctccccaactacagccggcagctgctgcagcagctgtacactctgtgcaaggagcagcagttctgtgattgcaccatctccattggtaccatttacttcagggctcacaagcttgtcctggctgctgccagcctcctgttcaaaaccctgctggataacacagataccatctccatcgatgcatctgtggtgagccccgaggagtttgcgctcttgttggaaatgatgtacacgggcaaactacctgtgggcaagcacaacttctccaaaatcatctccttagcagacagtctacagatgtttgatgtagctgttagctgcaaaaatcttctgaccagccttcttgctgccactccagggggccctgtgaaagctgagactgaggaagcagcccattcagtttcacaagagatgagtgtgaattctcccacagcccaggagagccagaggaatgcagaaaccccagcggagactcctactacagctgaagcttgttccccctcccctgctgtgcaaacctttagtgaggcaaagaagacaagcacagaaccaggatgtgaaaggaaacactaccagctgaattttcttctagaaaatgaaggtgtcttctcagatgcactcatggttacccaggatgttttaaaaaaactagaaatgtgttcaaactgttgtgtccctgttgaggctgtaccaatattctaa

SEQ ID NO: 34729 - DNA, 4445 bp, Homo sapiens
  source 1..4445: mol_type = unassigned DNA
cggcagtttgaatcggtgctgaacagggcctgtcctcccaaagccaactctaaggagaggagaggaagagcagttcttggggcagagttgacgcaatggagctccccaactacagccggcagctgctgcagcagctgtacactctgtgcaaggagcagcagttctgtgattgcaccatctccattggtaccatttacttcagggctcacaagcttgtcctggctgctgccagcctcctgttcaaaaccctgctggataacacagataccatctccatcgatgcatctgtggtgagccccgaggagtttgcgctcttgttggaaatgatgtacacgggcaaactacctgtgggcaagcacaacttctccaaaatcatctccttagcagacagtctacagatgtttgatgtagctgttagctgcaaaaatcttctgaccagccttgtaaactgctcggttcagggtcaggtggtaagggatgtctctgcgccatcctcagagacattcagaaaggaaccagagaagcctcaagtagaaatcctttcatctgaaggtgctggagagcctcattcttccccagagcttgctgccactccagggggccctgtgaaagctgagactgaggaagcagcccattcagtttcacaagagatgagtgtgaattctcccacagcccaggagagccagaggaatgcagaaaccccagcggagactcctactacagctgaagcttgttccccctcccctgctgtgcaaacctttagtgaggcaaagaagacaagcacagaaccaggatgtgaaaggaaacactaccagctgaattttcttctagaaaatgaaggtgtcttctcagatgcactcatggttacccaggatgttttaaaaaaactagaaatgtgttcagaaattaaaggtccacagaaggaggtgattctgaattgctgtgagggcagaacacccaaggagacaatagaaaatttgttgcacagaatgactgaagagaagacgctgactgctgagggtttggtaaaactcctccaggctgtgaagacgactttcccaaacctgggccttctgctagagaagttgcagaaatcagccactttgccaagcaccacagtccaaccaagccctgatgattatgggactgagctattgagacgctatcatgaaaacctctctgagattttcacagacaaccagattttattaaagatgatctcacacatgacaagtttagcccctggagaaagagaggtcatggagaagcttgtgaaacgtgactctggttcaggtggtttcaattctctgatatcagcagttctagaaaagcagactctctctgccacagccatttggcaactgctgctggtggttcaggagacaaagacctgtccattggacctgctcatggaggaaatacgaagggagcctggtgccgatgctttcttccgggcagtgaccaccccagaacatgccactttagaaacaatcctgaggcataaccagttgatcttggaggccatccaacagaagattgagtacaagctctttacctcggaggaggagcacctggcagagactgtgaaagagattctgagcattccctctgagacagccagccctgaagcttccctgagagcagtgctgagcagagccatggaaaaatcagtcccggccattgaaatatgccacctcctgtgcagtgtccacaaatcttttccaggcctgcagcctgtcatgcaggagttggcatacattggtgtccttactaaggaagatggagagaaggaaacgtggaaggtgagtaataaatttcaccttgaagccaacaacaaagaagatgaaaaggcagccaaagaagacagccagcctggggaacagaatgatcaaggagagactggttccttgccaggacagcaagagaaagaggcttcagcctccccagaccctgccaagaagagcttcatctgtaaggcctgcgacaaaagcttccatttctactgccgcctaaaggtgcacatgaagcgctgccgggtggctaagagcaaacaggtgcagtgtaaggagtgcagtgagaccaaggattcaaagaaagagctggacaaacatcagctggaggcccatggtgcaggtggagagcccgatgcccccaagaagaagaagaagaggcttccagtgacatgtgacctctgtggcagagaatttgcccatgcctcaggcatgcagtaccataagctgacagagcacttcgatgagaagcctttctcctgtgaagagtgtggggcgaagtttgcagccaattccaccctgaagaaccaccttcgccttcacaccggggaccgcccgttcatgtgcaagcactgcctcatgaccttcacccaggcctccgccctggcctatcacaccaagaagaagcactcagaagggaaaatgtatgcatgccagtactgtgatgctgtgtttgcccagtctattgagctgtcccgccacgtgaggacccacaccggggacaagccctatgtctgcagagactgtggcaagggcttccggcaagccaatggcctctccatccatctgcacacctttcacaacatagaagatccttatgactgcaagaagtgcaggatgagtttccccactcttcaggatcaccggaagcacatccatgaggtgcactccaaagagtaccacccctgccccacgtgtgggaagatcttcagtgccccgtccatgctggagcggcacgtggtgacccacgttggagggaagcccttcagctgcgggatctgcaacaaggcctaccagcaattgtctggtttgtggtaccacaatcgaacccaccaccctgacgtatttgctgctcagaaccaccgatcttccaagttctcatcactccagtgcagctcctgtgacaaaaccttccccaacaccattgagcacaagaagcacatcaaagcagaacatgcagatatgaagttccatgaatgtgaccagtgtaaggagctcttccccacgccagccttgctgcaggttcatgtcaagtgccagcattcagggtcccagccattccggtgcttgtactgtgctgctactttccgttttcctggagcattgcagcaccatgtcaccacggagcacttcaagcagtcagagaccaccttcccctgtgagctctgtggggaactcttcacctcccaggcccagcttgacagtcacctggaatctgagcacccaaaggtgatgagcacggaaacccaggccgcagcctcacagatggcgcaggtgatccaaaccccagagccggtggccccgacagagcaggtgatcactttggaggagacccagcttgccgggtcgcaggtgtttgtgacgttgccagattctcaggcatctcaggccagctctgagctcgtggcggtgactgtggaggacttgctggatggcacagtgacgctgatctgtggtgaggccaaatgagcagcctttcatccggcagagccttcctgcgtttgcagcagagaggaggccccacagcttgccctttgccctccatccctggctgtcctgagtggtgagcatcttagcttagcaccaaccaacacagtctcacctagaaaacagatggaagcttcgttgttctcatagaaccaacagcatctgagccctcaacaccaacagcaccatcctctgtagcagacaggcctccctccccacaggcccgctgctgcggcctctatgacactgtccatccccaagtgacatgtggcttcagaagtagagtctgaaagagcagtgggatgggagctggtgaccagggtaccccaggaggcatgatgtgccgacagcgctcagtgggcagaatggcagttagatatgggacttggcccacagtgggggctgcaaatgctgccactgcctctggccatttaaagtgagaggggcaccaacagacaattcggggaccttaggccccttcctgaggcacacttggccccttcctcggtcctatcatcctaccctctgctggggttccccctccacccagtggccacgcccagcaccctattgatggctataggacaggtagccctcatttccatgcctgataaccccttgtcagttgtcagctcttcccaaaacaaagctctggagtttctgctggaagtgtttaatgtgaggcatcagctgctagacagtgtctgcctttccaggacattcttcttggtattccttacctgaagcctggttcccacagctcttccgtgtcatcttcatccccttcctttaatcaaaggctgaaatctctgcctgacctggcagcctggctccctctgggtcatatggtgcagactgtgaccagcaccaggcaggcagtcctgtctgcgtgtggaggagcagccgtgactgcccgtggctctgctgccgcccactccctgccttgtg

SEQ ID NO: 34730 - DNA, 8685 bp, Homo sapiens
  source 1..8685: mol_type = unassigned DNA
cggcctcaagatggccgccttctggcgtctccggcgctgttgaatggcgaaagctttattgttcccttcgggcaggagtgttcgtgtcctctatggcgctgtcaataaagaacggcagtttgaatcggtgctgaacagggcctgtcctcccaaagccaactctaaggagaggagaggaagagcagttcttggggcagagttgacgcaatggagctccccaactacagccggcagctgctgcagcagctgtacactctgtgcaaggagcagcagttctgtgattgcaccatctccattggtaccatttacttcagggctcacaagcttgtcctggctgctgccagcctcctgttcaaaaccctgctggataacacagataccatctccatcgatgcatctgtggtgagccccgaggagtttgcgctcttgttggaaatgatgtacacgggcaaactacctgtgggcaagcacaacttctccaaaatcatctccttagcagacagtctacagatgtttgatgtagctgttagctgcaaaaatcttctgaccagccttgtaaactgctcggttcagggtcaggtggtaagggatgtctctgcgccatcctcagagacattcagaaaggaaccagagaagcctcaagtagaaatcctttcatctgaaggtgctggagagcctcattcttccccagagcttgctgccactccagggggccctgtgaaagctgagactgaggaagcagcccattcagtttcacaagagatgagtgtgaattctcccacagcccaggagagccagaggaatgcagaaaccccagcggagactcctactacagctgaagcttgttccccctcccctgctgtgcaaacctttagtgaggcaaagaagacaagcacagaaccaggatgtgaaaggaaacactaccagctgaattttcttctagaaaatgaaggtgtcttctcagatgcactcatggttacccaggatgttttaaaaaaactagaaatgtgttcagaaattaaaggtccacagaaggagatgatagtgaaatgtttcgagggtgaaggaggacattcagcattccagagaatcctgggtaaagtaagagaggaaagcctggatgttcaaactgttgtgtccctgttgaggctgtaccaatattctaatcctgcagtaaaaacagcactattagacaggaagccagaagatgtagacacagtgcagccaaaagggagcacagaggagggaaagaccttgtctgttctgttactagaacacaaagaggacctgatacagtgtgtaacacagctgagacctattatggagtccctggaaacagccaaggaggaattcctgactggcactgaaaaaagggtgattctgaattgctgtgagggcagaacacccaaggagacaatagaaaatttgttgcacagaatgactgaagagaagacgctgactgctgagggtttggtaaaactcctccaggctgtgaagacgactttcccaaacctgggccttctgctagagaagttgcagaaatcagccactttgccaagcaccacagtccaaccaagccctgatgattatgggactgagctattgagacgctatcatgaaaacctctctgagattttcacagacaaccagattttattaaagatgatctcacacatgacaagtttagcccctggagaaagagaggtcatggagaagcttgtgaaacgtgactctggttcaggtggtttcaattctctgatatcagcagttctagaaaagcagactctctctgccacagccatttggcaactgctgctggtggttcaggagacaaagacctgtccattggacctgctcatggaggaaatacgaagggagcctggtgccgatgctttcttccgggcagtgaccaccccagaacatgccactttagaaacaatcctgaggcataaccagttgatcttggaggccatccaacagaagattgagtacaagctctttacctcggaggaggagcacctggcagagactgtgaaagagattctgagcattccctctgagacagccagccctgaagcttccctgagagcagtgctgagcagagccatggaaaaatcagtcccggccattgaaatatgccacctcctgtgcagtgtccacaaatcttttccaggcctgcagcctgtcatgcaggagttggcatacattggtgtccttactaaggaagatggagagaaggaaacgtggaaggtgagtaataaatttcaccttgaagccaacaacaaagaagatgaaaaggcagccaaagaagacagccagcctggggaacagaatgatcaaggagagactggttccttgccaggacagcaagagaaagaggcttcagcctccccagaccctgccaagaagagcttcatctgtaaggcctgcgacaaaagcttccatttctactgccgcctaaaggtgcacatgaagcgctgccgggtggctaagagcaaacaggtgcagtgtaaggagtgcagtgagaccaaggattcaaagaaagagctggacaaacatcagctggaggcccatggtgcaggtggagagcccgatgcccccaagaagaagaagaagaggcttccagtgacatgtgacctctgtggcagagaatttgcccatgcctcaggcatgcagtaccataagctgacagagcacttcgatgagaagcctttctcctgtgaagagtgtggggcgaagtttgcagccaattccaccctgaagaaccaccttcgccttcacaccggggaccgcccgttcatgtgcaagcactgcctcatgaccttcacccaggcctccgccctggcctatcacaccaagaagaagcactcagaagggaaaatgtatgcatgccagtactgtgatgctgtgtttgcccagtctattgagctgtcccgccacgtgaggacccacaccggggacaagccctatgtctgcagagactgtggcaagggcttccggcaagccaatggcctctccatccatctgcacacctttcacaacatagaagatccttatgactgcaagaagtgcaggatgagtttccccactcttcaggatcaccggaagcacatccatgaggtgcactccaaagagtaccacccctgccccacgtgtgggaagatcttcagtgccccgtccatgctggagcggcacgtggtgacccacgttggagggaagcccttcagctgcgggatctgcaacaaggcctaccagcaattgtctggtttgtggtaccacaatcgaacccaccaccctgacgtatttgctgctcagaaccaccgatcttccaagttctcatcactccagtgcagctcctgtgacaaaaccttccccaacaccattgagcacaagaagcacatcaaagcagaacatgcagatatgaagttccatgaatgtgaccagtgtaaggagctcttccccacgccagccttgctgcaggttcatgtcaagtgccagcattcagggtcccagccattccggtgcttgtactgtgctgctactttccgttttcctggagcattgcagcaccatgtcaccacggagcacttcaagcagtcagagaccaccttcccctgtgagctctgtggggaactcttcacctcccaggcccagcttgacagtcacctggaatctgagcacccaaaggtgatgagcacggaaacccaggccgcagcctcacagatggcgcaggtgatccaaaccccagagccggtggccccgacagagcaggtgatcactttggaggagacccagcttgccgggtcgcaggtgtttgtgacgttgccagattctcaggcatctcaggccagctctgagctcgtggcggtgactgtggaggacttgctggatggcacagtgacgctgatctgtggtgaggccaaatgagcagcctttcatccggcagagccttcctgcgtttgcagcagagaggaggccccacagcttgccctttgccctccatccctggctgtcctgagtggtgagcatcttagcttagcaccaaccaacacagtctcacctagaaaacagatggaagcttcgttgttctcatagaaccaacagcatctgagccctcaacaccaacagcaccatcctctgtagcagacaggcctccctccccacaggcccgctgctgcggcctctatgacactgtccatccccaagtgacatgtggcttcagaagtagagtctgaaagagcagtgggatgggagctggtgaccagggtaccccaggaggcatgatgtgccgacagcgctcagtgggcagaatggcagttagatatgggacttggcccacagtgggggctgcaaatgctgccactgcctctggccatttaaagtgagaggggcaccaacagacaattcggggaccttaggccccttcctgaggcacacttggccccttcctcggtcctatcatcctaccctctgctggggttccccctccacccagtggccacgcccagcaccctattgatggctataggacaggtagccctcatttccatgcctgataaccccttgtcagttgtcagctcttcccaaaacaaagctctggagtttctgctggaagtgtttaatgtgaggcatcagctgctagacagtgtctgcctttccaggacattcttcttggtattccttacctgaagcctggttcccacagctcttccgtgtcatcttcatccccttcctttaatcaaaggctgaaatctctgcctgacctggcagcctggctccctctgggtcatatggtgcagactgtgaccagcaccaggcaggcagtcctgtctgcgtgtggaggagcagccgtgactgcccgtggctctgctgccgcccactccctgccttgtgagtggcctgctgcctcacctcccgcaggccgccacacttattgcaggtcagtgatcctttggagtttgaatttcacaaagctttttttatcttcagttcctaaaatataatctgataattaatggtttgtggaatccattatgaagtgcaattagatagatgtaggttcctgccgtttggagagaatgactagcatttatcttcttttccttccatgccaaaggttggagtctgctggtgcggtgtttacacaccaggcagggctgtctgccaccttgtgtggcttgaccccctgtggaggggagtgcctggttggatcccacactggcagagatggggccaccccttccttccaggcacatctcacattgccatgtacagaggcaggagtcacgtttggtcaccatggaagcttttattgctcccacatggtcaggtctcaccctgcttgaagcgcagaaggcacagccttactgaccagcacgcccactgactggcatctgccggctttgtgcaggcagccccgacggtttccacagcgagcgccagctccggccagcctgggacagctcatcccagccgactacacctgcttctggtcctgtccacattttgatacgcagatcacttgagcttgtcaattagggttctgccattctgaaataaatgaagtttctaaagcagagtcggcctcagaagccaaaaactgaccagaagatggtgctcaaacctttaagacttcatctccatgtgaagggctcactgtttctaccaaggctgtgcctgtattaaggcttttccgtcctgggaactgtcagtctgggagagctcttgatctgcaggtggcaaaatggcactgaatatccccttggcagcagagaaaacccactgaaagatcgtagagtggcacatgcttacagggcattggtgccaagtccagtggatgagaatccagcccctcacaagctgtgggatggggcttgggagttgcagtgaatgtcattaaaatttcttccaaaacaaaactagaaataattgctgagggcttatagggaagtgatttaaaaagaaaaaacaaacaacaacaaaaaaaactcttcggaataaagagggctgtaaattttgaattccagtgtcagatcctttcaagcactgagaaattctttctcaggtttctttttttgggggagacagggtcttgctctgtcacccagactggaacacagtggcacgatcttggctcactgcaacctctgcgggctcacgcaatcctcctgccacagcttcccaagtagctgggaccacaggcgtgagccaccactgctggccagtttttgtatttttttttttttttgtagagacagggtctcgccatgttgcccaggctggtttaaaactcctgagctcaagcagttctcccacctgggcctcccaaagtgctaggattacagacatgagccactacgcctggccaggtttctgttggagacccagattgtgacaagacatttgttttcttcggaatcaccagatttgcagcttactgtgccgagagtggactggctgccggggcccatcagatgccctctggcccatggcacactcagcagaaggcacaaacccagtgctggttctcatcaagaaagaggggaaggcccttcccgagtttactgtctgctctgagtgggctccgcactggctgactgattttatagtcttgctctctagagaagcccaggcatggatcttataggaaaactttctgactctgcttggccattttatccttttctcctacttctgcccaagagacctgaattgctgccatagaggacagtgtttgtgtggtctcctgagtccacatcgctcgcttccatggggtcccggtgttgtttttgcctcgttccccataggctgctgcccttatggcctctggactgaactctggggcctttggggtggtgtgaaggagtctgtgggcttcttggaacacatggatctgttcggtgggtccccagacctctgctcccagagctcatggcccaggtggtgaggagggaaaggcagtcagattccaggctggagtgtgattctgtgggaatactggggtcagttatggaacaggacttgcccatcataggtaagtgagacagcaaatagatgattcaagagcaaggattactgcgggaaggtgagactcctactgtccacgcgcatgagcagaacctggaaccagaggggcagggaccaggggtctttactcatttattttatgggtaaagagacatgaagagacagcctctctcttctgtctcagaagctctgtgtttgggaaactttgagcccagtgagtagcagggtctgcagtgtgagtaccaggtttccctggcaatccaggtctcctctgaggaagcattctgacttcccactgaccacggaaggcatgtcagcttcatgcctcgggctagagttctgataatcggggctgaggggtgaaaagaaatccagtcagacagacagtggggagacaggtccctgccctttatttgcgggatcaatcagggactcccagaaaggaaggagaatggtgagaagggccctaagagttcgtctctcacctgggggctggtgacgtggtcaccacaagctgaagacaggctaatggggtggcgggtgtgtgtttaaacctcacgtgcctggaagctgcacattgaccaaaggagggagggaagtgctaaccatgtatagagtgggcaggcggttccagggagacaagcagcatgttattaaattgggcctaggcagttggacgataatggagaaaaagcagggatgctataatgagtcctccccaagggtgagttcagcaccccagccctgttctgcttgtatcccagtgatacttgggaggtaggaagaaaatgggagtaagagaacaatttggggctgaagggagtgtcagaggcacgttgatccttgttttgttgtcatggaaacttcggggctggtgggacttaggccaaaagctcagaggcacagccaaaatttagaagcttgctactcctacgactcggcctataaggaagagagaagctgtctgtactttggggactacattgctgaaggaaaaaaatcactccctggctaattaagattgcttccaaattgggggaatgtgtgtcatttcctttaccaaggccagtcatccctgcttccacccatggtcaggacagtcagccactacgtgatgctgtataaattggattacaaaccatattcttgttcagcttgcactaatctatataaataaaatatgtactttgaaaaaaattaggctacatgagtttcaaatggactgtgatgttatagacctgctttctctttggttctgggccagtgtcagacggggacaggggtgataggcctggtgtcctaggggccatttgtgtaccttgaggccgtgttaacatggcctgggggaaagaaagctctcctgtcacttggagtctcattcctaaaccctccttcccagggagcaagtgtggggcagggtttcagagcacaggctttggtgtccagcctgggtacatccagctgtcccgctgtctaactgacattgtgtgagatgcttactctctctgagctccctcctcctggctcccaactttattataaaatggggaaaatgattgtgcttgccctacagaattgtagtatgaattaaaagtctggatttaatgtatttaatatagaaaattttagcttttattaataaaagtttttggcatacaa

SEQ ID NO: 34731 - DNA, 1855 bp, Homo sapiens
  source 1..1855: mol_type = unassigned DNA
cggcctcaagatggccgccttctggcgtctccggcgctgttgaatggcgaaagctttattgttcccttcgggcaggagtgttcgtgtcctctatggcgctgtcaataaagaacggcagtttgaatcggtgctgaacagcaaaagtttactgacccctgccctaaacacaaggagattggatcagtgttgtcattcagctattcctctcgtcggttcttctggagtgggaaaagagttaaaactgcgcgatgcaccgagagcactttagttgacagaacactctggcttcccttctggtcttactgactattcagagtttctcctgctttgaatagcgttggtaccatgcagccagtgctgcaatgaaccaggtgctttatttatattcatacaagtgttgttctactttatgacgacgctttataaggcctgtcctcccaaagccaactctaaggagaggagaggaagagcagttcttggggcagagttgacgcaatggagctccccaactacagccggcagctgctgcagcagctgtacactctgtgcaaggagcagcagttctgtgattgcaccatctccattggtaccatttacttcagggctcacaagcttgtcctggctgctgccagcctcctgttcaaaaccctgctggataacacagataccatctccatcgatgcatctgtggtgagccccgaggagtttgcgctcttgttggaaatgatgtacacgggcaaactacctgtgggcaagcacaacttctccaaaatcatctccttagcagacagtctacagatgtttgatgtagctgttagctgcaaaaatcttctgaccagccttgtaaactgctcggttcagggtcaggtggtaagggatgtctctgcgccatcctcagagacattcagaaaggaaccagagaagcctcaagtagaaatcctttcatctgaaggtgctggagagcctcattcttccccagagcttgctgccactccagggggccctgtgaaagctgagactgaggaagcagcccattcagtttcacaagagatgagtgtgaattctcccacagcccaggagagccagaggaatgcagaaaccccagcggagactcctactacagctgaagcttgttccccctcccctgctgtgcaaacctttagtgaggcaaagaagacaagcacagaaccaggatgtgaaaggaaacactaccagctgaattttcttctagaaaatgaaggtgtcttctcagatgcactcatggttacccaggatgttttaaaaaaactagaaatgtgttcagaaattaaaggtccacagaaggagatgatagtgaaatgtttcgagggtgaaggaggacattcagcattccagagaatcctgggtaaagtaagagaggaaagcctggatgttcaaactgttgtgtccctgttgaggctgtaccaatattctaatcctgcagtaaaaacagcactattagacaggaagccagaagatgtagacacagtgcagccaaaagggagcacagaggagggaaagaccttgtctgttctgttactagaacacaaagaggacctgatacagtgtgtaacacagctgagacctattatggagtccctggaaacagccaaggaggaattcctgactggcactgaaaaaagggtgattctgaattgctgtgagggcagaacacccaaggagacaatagaaaatttgttgcacagaatgactgaagagaagacgctgactgctgagggtttggtaaaactcctccaggctgtgaagacgactttcccaaacctgggccttctgctagagaagttgcagaaatcagccactttgccaagcaccacag

SEQ ID NO: 34732 - DNA, 8992 bp, Homo sapiens
  source 1..8992: mol_type = unassigned DNA
gatacccattgcgcgccggcctcaagatggccgccttctggcgtctccggcgctgttgaatggcgaaagctttattgttcccttcgggcaggagtgttcgtgtcctctatggcgctgtcaataaagaacggcagtttgaatcggtgctgaacagcaaaagtttactgacccctgccctaaacacaaggagattggatcagtgttgtcattcagctattcctctcgtcggttcttctggagtgggaaaagagttaaaactgcgcgatgcaccgagagcactttagttgacagaacactctggcttcccttctggtcttactgactattcagagtttctcctgctttgaatagcgttggtaccatgcagccagtgctgcaatgaaccaggtgctttatttatattcatacaagtgttgttctactttatgacgacgctttataaggcctgtcctcccaaagccaactctaaggagaggagaggaagagcagttcttggggcagagttgacgcaatggagctccccaactacagccggcagctgctgcagcagctgtacactctgtgcaaggagcagcagttctgtgattgcaccatctccattggtaccatttacttcagggctcacaagcttgtcctggctgctgccagcctcctgttcaaaaccctgctggataacacagataccatctccatcgatgcatctgtggtgagccccgaggagtttgcgctcttgttggaaatgatgtacacgggcaaactacctgtgggcaagcacaacttctccaaaatcatctccttagcagacagtctacagatgtttgatgtagctgttagctgcaaaaatcttctgaccagccttgtaaactgctcggttcagggtcaggtggtaagggatgtctctgcgccatcctcagagacattcagaaaggaaccagagaagcctcaagtagaaatcctttcatctgaaggtgctggagagcctcattcttccccagagcttgctgccactccagggggccctgtgaaagctgagactgaggaagcagcccattcagtttcacaagagatgagtgtgaattctcccacagcccaggagagccagaggaatgcagaaaccccagcggagactcctactacagctgaagcttgttccccctcccctgctgtgcaaacctttagtgaggcaaagaagacaagcacagaaccaggatgtgaaaggaaacactaccagctgaattttcttctagaaaatgaaggtgtcttctcagatgcactcatggttacccaggatgttttaaaaaaactagaaatgtgttcagaaattaaaggtccacagaaggagatgatagtgaaatgtttcgagggtgaaggaggacattcagcattccagagaatcctgggtaaagtaagagaggaaagcctggatgttcaaactgttgtgtccctgttgaggctgtaccaatattctaatcctgcagtaaaaacagcactattagacaggaagccagaagatgtagacacagtgcagccaaaagggagcacagaggagggaaagaccttgtctgttctgttactagaacacaaagaggacctgatacagtgtgtaacacagctgagacctattatggagtccctggaaacagccaaggaggaattcctgactggcactgaaaaaagggtgattctgaattgctgtgagggcagaacacccaaggagacaatagaaaatttgttgcacagaatgactgaagagaagacgctgactgctgagggtttggtaaaactcctccaggctgtgaagacgactttcccaaacctgggccttctgctagagaagttgcagaaatcagccactttgccaagcaccacagtccaaccaagccctgatgattatgggactgagctattgagacgctatcatgaaaacctctctgagattttcacagacaaccagattttattaaagatgatctcacacatgacaagtttagcccctggagaaagagaggtcatggagaagcttgtgaaacgtgactctggttcaggtggtttcaattctctgatatcagcagttctagaaaagcagactctctctgccacagccatttggcaactgctgctggtggttcaggagacaaagacctgtccattggacctgctcatggaggaaatacgaagggagcctggtgccgatgctttcttccgggcagtgaccaccccagaacatgccactttagaaacaatcctgaggcataaccagttgatcttggaggccatccaacagaagattgagtacaagctctttacctcggaggaggagcacctggcagagactgtgaaagagattctgagcattccctctgagacagccagccctgaagcttccctgagagcagtgctgagcagagccatggaaaaatcagtcccggccattgaaatatgccacctcctgtgcagtgtccacaaatcttttccaggcctgcagcctgtcatgcaggagttggcatacattggtgtccttactaaggaagatggagagaaggaaacgtggaaggtgagtaataaatttcaccttgaagccaacaacaaagaagatgaaaaggcagccaaagaagacagccagcctggggaacagaatgatcaaggagagactggttccttgccaggacagcaagagaaagaggcttcagcctccccagaccctgccaagaagagcttcatctgtaaggcctgcgacaaaagcttccatttctactgccgcctaaaggtgcacatgaagcgctgccgggtggctaagagcaaacaggtgcagtgtaaggagtgcagtgagaccaaggattcaaagaaagagctggacaaacatcagctggaggcccatggtgcaggtggagagcccgatgcccccaagaagaagaagaagaggcttccagtgacatgtgacctctgtggcagagaatttgcccatgcctcaggcatgcagtaccataagctgacagagcacttcgatgagaagcctttctcctgtgaagagtgtggggcgaagtttgcagccaattccaccctgaagaaccaccttcgccttcacaccggggaccgcccgttcatgtgcaagcactgcctcatgaccttcacccaggcctccgccctggcctatcacaccaagaagaagcactcagaagggaaaatgtatgcatgccagtactgtgatgctgtgtttgcccagtctattgagctgtcccgccacgtgaggacccacaccggggacaagccctatgtctgcagagactgtggcaagggcttccggcaagccaatggcctctccatccatctgcacacctttcacaacatagaagatccttatgactgcaagaagtgcaggatgagtttccccactcttcaggatcaccggaagcacatccatgaggtgcactccaaagagtaccacccctgccccacgtgtgggaagatcttcagtgccccgtccatgctggagcggcacgtggtgacccacgttggagggaagcccttcagctgcgggatctgcaacaaggcctaccagcaattgtctggtttgtggtaccacaatcgaacccaccaccctgacgtatttgctgctcagaaccaccgatcttccaagttctcatcactccagtgcagctcctgtgacaaaaccttccccaacaccattgagcacaagaagcacatcaaagcagaacatgcagatatgaagttccatgaatgtgaccagtgtaaggagctcttccccacgccagccttgctgcaggttcatgtcaagtgccagcattcagggtcccagccattccggtgcttgtactgtgctgctactttccgttttcctggagcattgcagcaccatgtcaccacggagcacttcaagcagtcagagaccaccttcccctgtgagctctgtggggaactcttcacctcccaggcccagcttgacagtcacctggaatctgagcacccaaaggtgatgagcacggaaacccaggccgcagcctcacagatggcgcaggtgatccaaaccccagagccggtggccccgacagagcaggtgatcactttggaggagacccagcttgccgggtcgcaggtgtttgtgacgttgccagattctcaggcatctcaggccagctctgagctcgtggcggtgactgtggaggacttgctggatggcacagtgacgctgatctgtggtgaggccaaatgagcagcctttcatccggcagagccttcctgcgtttgcagcagagaggaggccccacagcttgccctttgccctccatccctggctgtcctgagtggtgagcatcttagcttagcaccaaccaacacagtctcacctagaaaacagatggaagcttcgttgttctcatagaaccaacagcatctgagccctcaacaccaacagcaccatcctctgtagcagacaggcctccctccccacaggcccgctgctgcggcctctatgacactgtccatccccaagtgacatgtggcttcagaagtagagtctgaaagagcagtgggatgggagctggtgaccagggtaccccaggaggcatgatgtgccgacagcgctcagtgggcagaatggcagttagatatgggacttggcccacagtgggggctgcaaatgctgccactgcctctggccatttaaagtgagaggggcaccaacagacaattcggggaccttaggccccttcctgaggcacacttggccccttcctcggtcctatcatcctaccctctgctggggttccccctccacccagtggccacgcccagcaccctattgatggctataggacaggtagccctcatttccatgcctgataaccccttgtcagttgtcagctcttcccaaaacaaagctctggagtttctgctggaagtgtttaatgtgaggcatcagctgctagacagtgtctgcctttccaggacattcttcttggtattccttacctgaagcctggttcccacagctcttccgtgtcatcttcatccccttcctttaatcaaaggctgaaatctctgcctgacctggcagcctggctccctctgggtcatatggtgcagactgtgaccagcaccaggcaggcagtcctgtctgcgtgtggaggagcagccgtgactgcccgtggctctgctgccgcccactccctgccttgtgagtggcctgctgcctcacctcccgcaggccgccacacttattgcaggtcagtgatcctttggagtttgaatttcacaaagctttttttatcttcagttcctaaaatataatctgataattaatggtttgtggaatccattatgaagtgcaattagatagatgtaggttcctgccgtttggagagaatgactagcatttatcttcttttccttccatgccaaaggttggagtctgctggtgcggtgtttacacaccaggcagggctgtctgccaccttgtgtggcttgaccccctgtggaggggagtgcctggttggatcccacactggcagagatggggccaccccttccttccaggcacatctcacattgccatgtacagaggcaggagtcacgtttggtcaccatggaagcttttattgctcccacatggtcaggtctcaccctgcttgaagcgcagaaggcacagccttactgaccagcacgcccactgactggcatctgccggctttgtgcaggcagccccgacggtttccacagcgagcgccagctccggccagcctgggacagctcatcccagccgactacacctgcttctggtcctgtccacattttgatacgcagatcacttgagcttgtcaattagggttctgccattctgaaataaatgaagtttctaaagcagagtcggcctcagaagccaaaaactgaccagaagatggtgctcaaacctttaagacttcatctccatgtgaagggctcactgtttctaccaaggctgtgcctgtattaaggcttttccgtcctgggaactgtcagtctgggagagctcttgatctgcaggtggcaaaatggcactgaatatccccttggcagcagagaaaacccactgaaagatcgtagagtggcacatgcttacagggcattggtgccaagtccagtggatgagaatccagcccctcacaagctgtgggatggggcttgggagttgcagtgaatgtcattaaaatttcttccaaaacaaaactagaaataattgctgagggcttatagggaagtgatttaaaaagaaaaaacaaacaacaacaaaaaaaactcttcggaataaagagggctgtaaattttgaattccagtgtcagatcctttcaagcactgagaaattctttctcaggtttctttttttgggggagacagggtcttgctctgtcacccagactggaacacagtggcacgatcttggctcactgcaacctctgcgggctcacgcaatcctcctgccacagcttcccaagtagctgggaccacaggcgtgagccaccactgctggccagtttttgtatttttttttttttttgtagagacagggtctcgccatgttgcccaggctggtttaaaactcctgagctcaagcagttctcccacctgggcctcccaaagtgctaggattacagacatgagccactacgcctggccaggtttctgttggagacccagattgtgacaagacatttgttttcttcggaatcaccagatttgcagcttactgtgccgagagtggactggctgccggggcccatcagatgccctctggcccatggcacactcagcagaaggcacaaacccagtgctggttctcatcaagaaagaggggaaggcccttcccgagtttactgtctgctctgagtgggctccgcactggctgactgattttatagtcttgctctctagagaagcccaggcatggatcttataggaaaactttctgactctgcttggccattttatccttttctcctacttctgcccaagagacctgaattgctgccatagaggacagtgtttgtgtggtctcctgagtccacatcgctcgcttccatggggtcccggtgttgtttttgcctcgttccccataggctgctgcccttatggcctctggactgaactctggggcctttggggtggtgtgaaggagtctgtgggcttcttggaacacatggatctgttcggtgggtccccagacctctgctcccagagctcatggcccaggtggtgaggagggaaaggcagtcagattccaggctggagtgtgattctgtgggaatactggggtcagttatggaacaggacttgcccatcataggtaagtgagacagcaaatagatgattcaagagcaaggattactgcgggaaggtgagactcctactgtccacgcgcatgagcagaacctggaaccagaggggcagggaccaggggtctttactcatttattttatgggtaaagagacatgaagagacagcctctctcttctgtctcagaagctctgtgtttgggaaactttgagcccagtgagtagcagggtctgcagtgtgagtaccaggtttccctggcaatccaggtctcctctgaggaagcattctgacttcccactgaccacggaaggcatgtcagcttcatgcctcgggctagagttctgataatcggggctgaggggtgaaaagaaatccagtcagacagacagtggggagacaggtccctgccctttatttgcgggatcaatcagggactcccagaaaggaaggagaatggtgagaagggccctaagagttcgtctctcacctgggggctggtgacgtggtcaccacaagctgaagacaggctaatggggtggcgggtgtgtgtttaaacctcacgtgcctggaagctgcacattgaccaaaggagggagggaagtgctaaccatgtatagagtgggcaggcggttccagggagacaagcagcatgttattaaattgggcctaggcagttggacgataatggagaaaaagcagggatgctataatgagtcctccccaagggtgagttcagcaccccagccctgttctgcttgtatcccagtgatacttgggaggtaggaagaaaatgggagtaagagaacaatttggggctgaagggagtgtcagaggcacgttgatccttgttttgttgtcatggaaacttcggggctggtgggacttaggccaaaagctcagaggcacagccaaaatttagaagcttgctactcctacgactcggcctataaggaagagagaagctgtctgtactttggggactacattgctgaaggaaaaaaatcactccctggctaattaagattgcttccaaattgggggaatgtgtgtcatttcctttaccaaggccagtcatccctgcttccacccatggtcaggacagtcagccactacgtgatgctgtataaattggattacaaaccatattcttgttcagcttgcactaatctatataaataaaatatgtactttgaaaaaaattaggctacatgagtttcaaatggactgtgatgttatagacctgctttctctttggttctgggccagtgtcagacggggacaggggtgataggcctggtgtcctaggggccatttgtgtaccttgaggccgtgttaacatggcctgggggaaagaaagctctcctgtcacttggagtctcattcctaaaccctccttcccagggagcaagtgtggggcagggtttcagagcacaggctttggtgtccagcctgggtacatccagctgtcccgctgtctaactgacattgtgtgagatgcttactctctctgagctccctcctcctggctcccaactttattataaaatggggaaaatgattgtgcttgccctacagaattgtagtatgaattaaaagtctggatttaatgtatttaatatagaaaattttagcttttattaataaaagtttttggcatacaagtc

SEQ ID NO: 34733 - DNA, 3800 bp, Homo sapiens
  source 1..3800: mol_type = unassigned DNA
tgaagttcaggagcgcccgggcggggacgcgcgcaggtttgcgcggctccggctcctgcgcctgagtcccgggacccgcccccgcggcggagctgctactgtttactttcgatcgagtttttcctgctcggggcaggtgcccgcggcggctctggacgggaggttgcgcgcgtcactcccgcgccgctctttccgcgctgcctgcagccgggaagggcgcttcgtgggcgcctccaggcgcgctgacgggcgtcccgtttgtgcccaggtgatgacggcggcggcatggagttccctgagcacggcggacggctgctgggccgcctgagacagcagcgcgagctgggcttcctatgcgactgcaccgtgctggtgggcgacgcgcgcttcccggcccaccgtgccgtgctggccgcgtgcagcgtctacttccatctcttctacagggaccggcccgcgggcagtcgcgacacggtgcggctcaacggcgacatcgtcacggcgcccgccttcggccgcctactggacttcatgtacgagggccgcctggacctgcgcagcctgcctgtggaggacgtcctggcagccgccagctacctgcacatgtatgacatcgtcaaggtctgcaagggcaggctccaggagaaggatcgaagtctggacccggggaaccctgcccctggggcagaacctgctcagccaccgtgcccctggcctgtctggaccgcggacctctgcccagctgcccgaaaggccaagctccccccgtttggggtcaaggctgccctccctcctcgagcatctgggcctcctccctgccaggtcccagaagagtcagaccaggccctggacctgtcgttgaagtctggcccaaggcaggagcgggtccacccaccgtgcgtcctccagacacccctctgcagccagaggcagccaggggcccagccactggtgaaggacgaacgggactcactgtccgaacaggaggagagcagcagctctaggagcccccacagtcccccgaagccacctcctgttcctgcagccaagggcctggtggtgggcttgcagccgctgcccctcagcggagagggcagccgggagctggagcttggtgcagggcgactggcgagtgaggacgagctggggcctggtgggcccctctgcatctgcccgttgtgcagcaagctgtttcccagctcccacgtgctgcagctgcacctcagtgcccacttccgtgagcgagacagcacccgggcccggctctcacccgacggcgtggcacccacctgcccgctctgtgggaagaccttctcgtgcacatacacactgaagaggcacgagcggacacactcgggtgagaagccctatacgtgtgtgcagtgtggcaaaagttttcagtactcccacaacctgagccggcacaccgtagtgcacactcgagagaagccgcatgcctgccggtggtgtgagcgccgtttcacgcagtccggggacctctaccgccacgtccgcaagtttcactgtggcctcgtcaagtcccttctggtgtgatgcatccctgtgggtcctgagggtggggtggaagggaagggatgggccctcccaggtgggacacagcatggggtgtgaagcctgaccaggtggaggtccctgcttgggccagatggctccaccctcctggcagagagaatgctgcctcttcctggaacttggcctcagactcggtaacttgggcagccttcctcccaccttgcctctcctttcccctcactctccaactcattccggcccccaggctgtgccctgcctaggctgtgacactatcttcctctcccgtcccctccagccaagttctgaggggtgtccaaccagcacctggctctgcccccgtttctccgtgtgagatggcacatccatctcccggcccgggactttcctgaccacctctctggcaggcttggggaggtcttcatgagcctggccccacgctaggtgaattattcacatgtcagaaaagttgttggtgtgcgtcccaatggggcgctgggagggaacaggacactcctggggagcggcagcaggaacccctgccaggaaggcctggggcacagtgagtgccagcaggggccatctgggcacagctggtgtctcggggtgggggggggggtgcagccccagcagggatcctaaggcagcaggagtagagccagctagaagctgagtggctgtggcatcattgtcactcgggtgggacgtgggtccatgagagcgtgcaattatgaccacactgtaactttgagcagagaaagtgggaatttggaactggattctctttagagccaggaagagcctcctgaggcggccagatgtctgctggtggccgcccagccacatgcttgtctgcctgagtgcaggtctaggaagcctctgggcatcccccagggtggggtctgggccgctgagctgtgtgctgctgctgggccaccgtgggccttaccttgacggtcactctgcctgctagggggtttccctggagctgtgggcatttccgtgcactgactgagcagaggcaagggctgccctgtccgccaggggcagggtttgcgggccttcctttccccacggcgaggcatgggtgaaagtggccatggcggcagggttaggggcaggtgaggagtgggagtcgcagcaccctaggggcctccatccgcagccttgggagactgacgctcctcgaacatgaatagaatgtggagaccacaacccccacacatgtcgttggttcaggtcgccctgctttgcctgcctaatggagcacatcttgctgccagaacctcactggcctctgggggtcggcaggtgcagagccacctggacgcctggagaccacctgggatgtttcctctgtgactgggaatggccttgacaacagagtccagccaagtctacgttattttctcatctcctgacaacactggatgtcatatttattagtcagcctggtctggagtgaaagaccgtccctagcgcatctcccacgcgccctgggctcctggtgtgctgggtgccagcctgggagcccagcgcttctgggtgatgccccagggctcagaggccctggatggctttggtctcgagacagctgggggaggggccctgcttctgattgtcctgggccccagcccccacctctgcaagggatcggtgtgatgtgctccataatcgggtggggggtgtgtgtgtgtgtgtgtgtgtgtgtatgtatgcatgcgtctggcacatggcaaggcccaagccaacccggcaccccgtagatgggcagctacactgccacccaagcacggagatgtggccgcggcactgggtcccccagtgggtcccatgggggaagaacttccctttgctggggtgggcagcctgccctgagctatcaacactggatttgttgtcttctgcacagctactgtgaagataacgtaaggagaagtggtcagttttcattttataactgacacagttgggacaaaatatatacgtgtacatatatttaagacactaattgtgtgggagagtttagtagaggcctgtgcagacacaaggcaaacagcgtcagcagcgtgggggtctcctgggccagctcggcacctgtgggtgctctgaccctgggggtggggacagctccgtgctaaccccagcagacagttgttggtgcacagtgtctaggaggcgtgggaatgggtgctgtcttcctcttttcacatcatggcgacagtaataaagcccacctccagtggaaa

SEQ ID NO: 34734 - DNA, 1411 bp, Homo sapiens
  source 1..1411: mol_type = unassigned DNA
ccctccccgccggggcgcgctgcccgcagctccacgcgcgccagggccgccctggggagggcgcgcgcgcgagcggcgaccggagaggagctcggggcggcggaggtgatgacggcggcggcatggagttccctgagcacggcggacggctgctgggccgcctgagacagcagcgcgagctgggcttcctatgcgactgcaccgtgctggtgggcgacgcgcgcttcccggcccaccgtgccgtgctggccgcgtgcagcgtctacttccatctcttctacagggaccggcccgcgggcagtcgcgacacggtgcggctcaacggcgacatcgtcacggcgcccgccttcggccgcctactggacttcatgtacgagggccgcctggacctgcgcagcctgcctgtggaggacgtcctggcagccgccagctacctgcacatgtatgacatcgtcaaggtctgcaagggcaggctccaggagaaggatcgaagtctggacccggggaaccctgcccctggggcagaacctgctcagccaccgtgcccctggcctgtctggaccgcggacctctgcccagctgcccgaaaggccaagctccccccgtttggggtcaaggctgccctccctcctcgagcatctgggcctcctccctgccaggtcccagaagagtcagaccaggccctggacctgtcgttgaagtctggcccaaggcaggagcgggtccacccaccgtgcgtcctccagacacccctctgcagccagaggcagccaggggcccagccactggtgaaggacgaacgggactcactgtccgaacaggaggagagcagcagctctaggagcccccacagtcccccgaagccacctcctgttcctgcagccaagggcctggtggtgggcttgcagccgctgcccctcagcggagagggcagccgggagctggagcttggtgcagggcgactggcgagtgaggacgagctggggcctggtgggcccctctgcatctgcccgttgtgcagcaagctgtttcccagctcccacgtgctgcagctgcacctcagtgcccacttccgtgagcgagacagcacccgggcccggctctcacccgacggcgtggcacccacctgcccgctctgtgggaagaccttctcgtgcacatacacactgaagaggcacgagcggacacactcgggtgagaagccctatacgtgtgtgcagtgtggcaaaagttttcagtactcccacaacctgagccggcacaccgtagtgcacactcgagagaagccgcatgcctgccggtggtgtgagcgccgtttcacgcagtccggggacctctaccgccacgtccgcaagtttcactgtggcctcgtcaagtcccttctggtgtgatgcatccctgtgggtcctga

SEQ ID NO: 34735 - DNA, 5495 bp, Homo sapiens
  source 1..5495: mol_type = unassigned DNA
tccgggtcccaaaagggttcgaggcctcttgccttcgctccgtaggagggagttctcttctggccctgggggccgcaggactgtccaggaatacagtttccaggtgagatcttacttgaaacaccggtagttctagcacagctaaaatggcatctacttgggctatccaggcccacatggaccaggatgaacctttggaagtaaagatagaggaagagaaatataccaccagacaggattgggacctgcgtaaaaacaacacccatagcagagaggtcttccgtcagtacttcagacagttctgctaccaggagacatctggtccccgtgaggctttgagccgactccgagaactttgccatcagtggctgaggccagagacccacaccaaagaacagattctggagctgctggtgctggagcagttcctgaccatcctacctgaggagctccaggcctgggtgcaggagcagcatccagagagtggggaggaggtggtgactgtgctggaggatttagagagagaactggatgaaccaggagagcaggtctcagtccacactggggaacaggaaatgttcttgcaggagacggtacgtctacgaaaagaaggagaacccagtatgtccctccagtccatgaaagcccagccaaagtatgaatctccagaacttgaatcccaacaggagcaagttttagatgttgagactggaaatgagtatgggaatttaaagcaagaagtttctgaagaaatggaaccacatgggaagacatccagtaaatttgaaaatgatatgtccaagtctgctaggtgtggagaaactcgtgaacctgaagaaataacagaagagccctctgcttgctccagagaagataaacaacctacctgtgatgaaaatggagtaagcctgactgagaactctgaccatactgaacatcagagaatctgtccaggagaagaatcttacggatgtgatgactgtggaaaagcttttagtcagcactcacacctcatagaacatcagaggatccatactggagatagaccctacaaatgcgaagaatgtggaaaagctttccgtgggagaactgtgcttattcgacacaaaataatacacactggagagaaaccgtataagtgtaatgaatgtggcaaagcctttggccggtggtcagctcttaaccaacatcagagacttcacacaggagaaaaacactatcactgtaatgactgtggcaaagcctttagtcagaaagcaggcctctttcaccatatcaagatccacacaagagacaaaccttatcagtgcactcagtgtaataaaagttttagtcggcgttccatacttactcagcatcaaggagttcataccggcgccaagccgtatgagtgcaacgagtgtggaaaagcctttgtttataactcatcccttgtttcccatcaggaaatccaccacaaagaaaaatgctatcagtgtaaggaatgtgggaaatccttcagtcagagtggccttattcagcatcagagaattcacactggggaaaaaccctacaaatgtgacgtatgtgaaaaagcctttattcaaaggacaagtcttacagaacatcagcgaattcacactggagaaagaccctataaatgtgataagtgtgggaaggcgtttactcaaagatcagtcctcacggaacatcagagaatccacactggagagaggccctacaagtgtgatgagtgtgggaatgccttccgaggaatcaccagcctcattcagcatcagagaatccacactggggagaagccctaccaatgtgatgagtgtggaaaagccttcagacagaggaagaagaccagctacaaggaaatacttctgaaaaatcactctgaaccccaagctggagtgaatcttctcctgagctctctcattccagaatggcaatcttgtttcaggagagatctctaatagtgactgatggtaaaggaagaaggctgtgcctagaacaaagaatcaggctggcaaagaaatcacaggtctttcctcaaactttaaattgctactctctggagatagctacctggactttacagagctgtcagaagacttgggaaggtttgccagcattggaaaaagccacttggacttcacagagctgtcagaagacttaggaagctttgccagtagttcctgagaccagaaatacatattatgaagcaggtgctggaacaggccctggcccctacttgtgaagctgcagatataggtaagataatatcatccagaatgtggagacgaggcaatcgatgatgctggaaaagttgaagagagagtttgaatgaaggacaaaccaccgatgggaaagcttgggaggatcacttatagcttgactagcaaaaggctttgggaataggatagaaagcagcaaacctgaactttaggatccaccagatgtctctggagccataacccaacatttcccataaatagtaggttttaattctcctgttatttaggtgcatctctgggacctcctctttctatattgggttttttgtttgttgggtgttttaacttaggatttagcttcaaattccatttcccaagaccaattttatcacattgcctttaggtctcaggctaaatgatataacaagatatgcttttggcaaagatagtaccttggaatgaaaggtttcagatcaaacctaagatcctaccttagtttacctctcagtgttattgccttttgatatggaaagctgatgagagagcatctctggagagaaagaagaggagagcctcacgggaagcttttagaacttttagtagcatcctctccccagaaaacttgtctctactcatctccttctcattatctacctgattcgttaagtaggaaatctcagccatatttgtaggggattggggttttgttttttttgacccacttaactcctttagcttcagagtgttgctttcttacattttagacatgaatattacctagaaaatttatttccccactgttaattttccagtttattgatttccccacatcagattagtgtgtattttgaaactggtttagctattgtttcaagttaactttgatcatatcccgttgtttactgatccactcaacaaatatttattgaacattctgtaggtttatagtagtagccaagatacttaaagtgagtagaaatagtccttttaactgtccttaacaaattaaactttctcttggtttcatgatattccttgtttctcagctttggattcaaactgatcttctcttttttgattatactttcctgatttcttttattgtcacatttttgtgaaaagtcttccatgcacttccagtctctttctgcctagctgtctcttctcacccaaattggacccccctactcctaccctgccacgtgccttcacaaaaatgagatgcttgtttagagacttagaaaaggcatgcactttaggtaaaagtggattttatttttaatcactgtaccctatcataaatctcatttcagaagagacaactgacatttgaattgtctgtgcattttgttttagatggtgttactgagaaggaaactaaggacttggctccaaaacaaaacaaaacaaaatctggagatgctgaattttgttggggggaatgtctgtagaactgcaacatcaatgcagtaagtgtagtaaaagctttagtttatggtgagtcattactcagcatcatggagtccacgatgaagagaatctcttttcaatctgtgcaatcaacaagtttttgaaaggcttttgtttatagtggaaccctcttttccccctagaagaaccaccacaaggaaaaatgctgtcaccataaggaatgtgggaaagttttcagccacatggccttatttgacttcaaagaatccacatgagagagagactgcataaatgtaataactgaggaggcctttgttcagcaaagaaaccttatacaaactcgtataaagaatgtaggaagaccttcacccagaagccaggactgactgtgcaccagagaatctgcacaataaacatgatgaatgtggagatgcttgcttcagcattggagaattcacagtaaagggaaaccctgccagtgtgatgagtacggaaaagtcttcagaggttggaacttgggaaaaatcagtgagtgaattcatattagagaggctcttataaatgagaggattgtggaaacttgtatagacagagatcagacctcaacaagggagcctccacagtattgaaaagttaatataattaatgtaagtgggcaagttgtatggggaatgggtagtctaaattgctcattttagccagtaaaaacattaaattagtttcttagatcaagaaaaggaaatgttagaagttatttttcccttccagaggggtctatatgtgtaagcaaccaggacttttgaaataagttgcatctctggatttgtgatctgtctcctggatgattatctctgttttgggagacaggtattttttcttcatgcctgctctagtctcatctcatatctttaattcattcagcaagtatacacaatagtattatcgtctactgtttgttgtaaatatatatatattattttctttttggtctgagtaggcttgtattggtaccctaggacataaaaatcacatatatcatgtttcagtaaatgcagtgaaaggaactatattattaaattgctgggaatttctgtaaatttgagactacctttatattctccaacacaagaccgtgtaggtgtcccttcagagagtatatttttctagcttggcttctttattttctttatttttttgagatggagtcttgctcctgtcgcccaggctggagtgcaatggcacgatctcggctcactgcaacctccgcctcccaggttcaagtgattctcctgtctcagtctcccgagtagctgggattacaggcacttgccaccattcccagctaatttttgtatttttagtagagacggggtttcaccatgttggccaggctggtctcgaactcctgaccttgtgatctgcccaccttggcctcccaaagttcagggattacaggcatgagccaccatgcccggctgtttttttaagatagaaaaatatacttcatgtatagcctattgacagataatgactgatattttttcttatagataacacataataaacattgtgaagactaataagtaacttgcttattcttttcagttctaaaacctgtaggaaagaatctttagaagctgtcaacaagttgataatgtagcccaatctctacccatgataggagagtaaggcttatatattttatagtagggcactaaatacaggaaccatgtatttaaaaactttttagtgattatctcagaattctaggtgtccctctgctgtacatccctaaattttttgcataggtattattaataaattcattattttcaaagatgg

SEQ ID NO: 34736 - DNA, 3909 bp, Homo sapiens
  source 1..3909: mol_type = unassigned DNA
gggtcccaaaagggttcgaggcctcttgccttcgctccgtaggagggagttctcttctggccctgggggccgcaggactgtccaggaatacagtttccaggtgagatcttacttgaaacaccggtagttctagcacagctaaaatggcatctacttgggctatccaggcccacatggaccaggatgaacctttggaagtaaagatagaggaagagaaatataccaccagacaggattgggacctgcgtaaaaacaacacccatagcagagaggtcttccgtcagtacttcagacagttctgctaccaggagacatctggtccccgtgaggctttgagccgactccgagaactttgccatcagtggctgaggccagagacccacaccaaagaacagattctggagctgctggtgctggagcagttcctgaccatcctacctgaggagctccaggcctgggtgcaggagcagcatccagagagtggggaggaggtggtgactgtgctggaggatttagagagagaactggatgaaccaggagagcaggtctcagtccacactggggaacaggaaatgttcttgcaggagacggtacgtctacgaaaagaaggagaacccagtatgtccctccagtccatgaaagcccagccaaagtatgaatctccagaacttgaatcccaacaggagcaagttttagatgttgagactggaaatgagtatgggaatttaaagcaagaagtttctgaagaaatggaaccacatgggaagacatccagtaaatttgaaaatgatatgtccaagtctgctaggtgtggagaaactcgtgaacctgaagaaataacagaagagccctctgcttgctccagagaagataaacaacctacctgtgatgaaaatggagtaagcctgactgagaactctgaccatactgaacatcagagaatctgtccaggagaagaatcttacggatgtgatgactgtggaaaagcttttagtcagcactcacacctcatagaacatcagaggatccatactggagatagaccctacaaatgcgaagaatgtggaaaagctttccgtgggagaactgtgcttattcgacacaaaataatacacactggagagaaaccgtataagtgtaatgaatgtggcaaagcctttggccggtggtcagctcttaaccaacatcagagacttcacacaggagaaaaacactatcactgtaatgactgtggcaaagcctttagtcagaaagcaggcctctttcaccatatcaagatccacacaagagacaaaccttatcagtgcactcagtgtaataaaagttttagtcggcgttccatacttactcagcatcaaggagttcataccggcgccaagccgtatgagtgcaacgagtgtggaaaagcctttgtttataactcatcccttgtttcccatcaggaaatccaccacaaagaaaaatgctatcagtgtaaggaatgtgggaaatccttcagtcagagtggccttattcagcatcagagaattcacactggggaaaaaccctacaaatgtgacgtatgtgaaaaagcctttattcaaaggacaagtcttacagaacatcagcgaattcacactggagaaagaccctataaatgtgataagtgtgggaaggcgtttactcaaagatcagtcctcacggaacatcagagaatccacactggagagaggccctacaagtgtgatgagtgtgggaatgccttccgaggaatcaccagcctcattcagcatcagagaatccacactggggagaagccctaccaatgtgatgagtgtggaaaagccttcagacagaggaagaagaccagctacaaggaaatacttctgaaaaatcactctgaaccccaagctggagtgaatcttctcctgagctctctcattccagaatggcaatcttgtttcaggagagatctctaatagtgactgatggtaaaggaagaaggctgtgcctagaacaaagaatcaggctggcaaagaaatcacaggtctttcctcaaactttaaattgctactctctggagatagctacctggactttacagagctgtcagaagacttgggaaggtttgccagcattggaaaaagccacttggacttcacagagctgtcagaagacttaggaagctttgccagtagttcctgagaccagaaatacatattatgaagcaggtgctggaacaggccctggcccctacttgtgaagctgcagatatagatggtgttactgagaaggaaactaaggacttggctccaaaacaaaacaaaacaaaatctggagatgctgaattttgttggggggaatgtctgtagaactgcaacatcaatgcagtaagtgtagtaaaagctttagtttatggtgagtcattactcagcatcatggagtccacgatgaagagaatctcttttcaatctgtgcaatcaacaagtttttgaaaggcttttgtttatagtggaaccctcttttccccctagaagaaccaccacaaggaaaaatgctgtcaccataaggaatgtgggaaagttttcagccacatggccttatttgacttcaaagaatccacatgagagagagactgcataaatgtaataactgaggaggcctttgttcagcaaagaaaccttatacaaactcgtataaagaatgtaggaagaccttcacccagaagccaggactgactgtgcaccagagaatctgcacaataaacatgatgaatgtggagatgcttgcttcagcattggagaattcacagtaaagggaaaccctgccagtgtgatgagtacggaaaagtcttcagaggttggaacttgggaaaaatcagtgagtgaattcatattagagaggctcttataaatgagaggattgtggaaacttgtatagacagagatcagacctcaacaagggagcctccacagtattgaaaagttaatataattaatgtaagtgggcaagttgtatggggaatgggtagtctaaattgctcattttagccagtaaaaacattaaattagtttcttagatcaagaaaaggaaatgttagaagttatttttcccttccagaggggtctatatgtgtaagcaaccaggacttttgaaataagttgcatctctggatttgtgatctgtctcctggatgattatctctgttttgggagacaggtattttttcttcatgcctgctctagtctcatctcatatctttaattcattcagcaagtatacacaatagtattatcgtctactgtttgttgtaaatatatatatattattttctttttggtctgagtaggcttgtattggtaccctaggacataaaaatcacatatatcatgtttcagtaaatgcagtgaaaggaactatattattaaattgctgggaatttctgtaaatttgagactacctttatattctccaacacaagaccgtgtaggtgtcccttcagagagtatatttttctagcttggcttctttattttctttatttttttgagatggagtcttgctcctgtcgcccaggctggagtgcaatggcacgatctcggctcactgcaacctccgcctcccaggttcaagtgattctcctgtctcagtctcccgagtagctgggattacaggcacttgccaccattcccagctaatttttgtatttttagtagagacggggtttcaccatgttggccaggctggtctcgaactcctgaccttgtgatctgcccaccttggcctcccaaagttcagggattacaggcatgagccaccatgcccggctgtttttttaagatagaaaaatatacttcatgtatagcctattgacagataatgactgatattttttcttatagataacacataataaacattgtgaagact

SEQ ID NO: 34737 - DNA, 4643 bp, Homo sapiens
  source 1..4643: mol_type = unassigned DNA
gaggtgtgctgggagctgtggtccgggtcggcgggcgcgcaagttggctagtctctgcggccacctccggaagggtccgccggctgtgctggtgaggcccagttccaaggctccggcatcctgtgtctcactgagcactgctgcccgatggccatccccaagcactccctgagcccagtgccgtgggaagaggacagcttccttcaagtgaaggtggaggaggaagaggaagccagcctctcccagggcggagaatccagccatgaccacattgctcactctgaggctgcacgcctgcgcttccggcacttccgctatgaggaggcatctggtccacacgaggccctggcccacctccgagcgctgtgctgtcagtggctgcagcccgaggcgcactccaaggagcagatactggagctgctggtgctggagcagttcctgggtgcgctgcccccagagatccaagcctgggtgggagcccagagtcccaagagcggagaggaagccgctgtgctggtggaggatctgactcaggtgctggacaagagaggatgggatccaggagccgagcccacagaggcaagctgcaagcagagtgacctgggagagtcagagccatcaaatgtcactgagaccctcatgggaggtgtttcccttggacccgcctttgtcaaggcatgtgaacctgagggcagctcagagaggtctggactatcaggggagatctggacaaagtctgtcacccaacagatccacttcaagaaaacttcagggccttacaaggatgtccccacagaccagcgtggccgtgaatctggtgcctcgaggaacagttctagtgcgtggccaaacctcacctcccaagagaagcctccttcagaagacaaatttgatctggtggatgcttatgggacagagcctccatacacctactcagggaagaggtcctccaagtgtcgcgagtgtaggaagatgttccagagtgcttcggcgctcgaggcacaccagaagacccattctcggaagaccccatatgcctgcagcgagtgtgggaaagccttcagccggagcactcacctcgcccagcaccaggttgtccacacaggggcgaagccccatgagtgtaaggaatgtgggaaggccttcagccgagtcacccacctgactcagcaccaaaggattcatactggagagaaaccctacaaatgtggggaatgtggtaaaaccttcagccgcagcactcacctcacccagcaccagcgggtgcacacgggggagcggccctacgagtgtgacgcgtgtgggaaagccttcagccagagcacgcacctgactcaacaccagcgcatccacaccggggagaagccctacaagtgtgacgcgtgtggccgagccttcagcgactgctcagccctgatccgacatctgagaatccactctggagagaagccatatcagtgtaaggtttgtccgaaggcctttgcacagagctcctccctcattgagcaccagaggatccacacgggagagaagccttataagtgcagcgactgtgggaaggccttcagtcgtagctcagccctgatggttcacttgcggatccacatcacggtgctgcaatgaccggaagtcgcccctgggggcgtagcacagcgtcttctcggaggctcgaggtctaagagaaacgctgagttcctgaagagccacagacagggtgggtgattgatgagttgtcaaaatgataggtgcctgagggcagactcgggctgtctaggaaccactctgcatttgaggaaccctgatgagcacaaggtgattcaggccagctggagaagcttccagaagggccctgcactgctaccctctatttcccactcagggctgtcccagagagaaggcagccgaactgaggatttagactggttctgagggccagggcaaatgaaggcgcatgtctctcagaactcagcgtcccaagacgctctgggcgggccaactgtagcttgttctcatgtggttcttcttgcctgcttttctgctgcttagcccagaacggacacctgccatgcccacctctgtgccttggcacctactatttccactccagactattttgtgcctaactgcaaggctgacttttgagactgcctcttccacgatgccttttctacactctgcctctctcatggtttcctgtcgtaatcagtggtgctgcttgacacctgcccagcatgttcctgtctctccttttccttccacatcccaccagtcaccagcgctattgttttaacctaaagcttatctgtaattcacctccttttccaccactgctaccttatgtgagccctcattgcctcttgcctggattatagccggggtctccttcctgaccacttcctgcctttattctctgcccctgtatcactctccaggggactcttgatattacttagatctgactgtgtcactccaaggtggaaagctctccaacccatcttctacagcacagcttcctgaacagggtataagtatgctgagatgcaggctgctctgggccccgagcaacctctccagttatcctcatatgcatgtatgaatactgtcatttttctgtgcgtgcagtgaaaatggcctcatctcataccatggctccaccttccatacaccagccacacggaactactgtggtccctgaaggagccatacattttcccacttatgtgcctttgtacctgtgcctggaaccctcctcttctttttctttttcttttcttttctttttttttttttgagatggagtctcgctctgtcgcccaggctggagtgcagtggcgcgatctcggctcactgcaagctctgcctcccgggttcatgccattctcctgcctcagcctcccaagtagctgggactacaggcgcctgccaccacgcccagctagtttttttttttttttgtatttttagtagagatggagtttcaccatgttagccaggatggtctcgatctcctgacctcgtgatccacccgcctcggcctcccaaagtgctgggattacaggcgtgagccaccgcacctggccctcctttttcatctaaggtgtttcaaatgttgcccaaagaaacctccctgctctccgggagcagacttcagcttgccctctctgcttccagagcacctcctagatacctctcttacaactcctgccaccttgttttacttatttgctccttgtagagctgccttttccaaggataccataaactcctgagagcaggggccatgtcttactctcagtatctacaacacacaagactcagtaggccctgactgatgtctcttacatgaatgtgactggtgcccccaggaggcagtcaccgtgctgtctctgccccacattgtccttatgtatgtttacatggatgtctccccagcagcttgaaccctggagagcaagaataatctgattttcctgggggccagcacccaaataagcctggcatgcagtggcctcaataaaatgtgactgtattgagtcattttctagggccccagatcccctggtgtcatggacttagtctttgccagcattctgtccatgtgttctctggtcttctctcacaatgctgcatccctgtcccatttttagggtccctgtctatcactggatgctgcagcttctgttcattactgttagtgtatcattcttcatgcctctgtttctgtgatggtctcatcatatgtgaaccatttgacctggcgtattgtgtactagtcaccgtcaccatctctccatatgtatctccctgtatttcgggcccattccctctatgtcaagagtaaatagaggcacagagactgatgagaaacgttcataacatgaaggtaagactcagggagacagagactttgtggaagtatctctgagggagtcccagacacaggcagagagggccacatatcgtgtgccagaggctgagagactgagagggatgacaggcttaggggaaaactcagagaggagagatgcacattcctagtgaaattgcacaggcttccagcatgctggagggaacagaaaaggcatgggcctgaattcaggctgcagagcctgactcctccctgtggctacttttgggacctaagataagtgactttcctgaacctccatgacctcctcatatgtaaaccagggacaggacccaccttgtgtagtgcctgacccaaagcctggccctgcacactgtctctgactcacagcaatcatcagcacctctctttgcctcctacttgctcagtctctgtcacaagaactggatctccatccccttgatgctctgagcatcttcacccatttggtcgttgagacatatctgtccatgtctgtctaaaaggggaggagatgagggagaaaaaagggaatctactcagagcctgtgtgtgctgcccagtctaccaaataatttatatacatctcagtcctcacacaaccatccctgttttatagaggaggaagtggcttagagaatgtaactgaccaaagtcacactgccaggaactggaagcactaggatttgacagcatatccaaatatgtcagcaatttcaataaacatgactgtactcaacaaaccaagtgtaaagac

SEQ ID NO: 34738 - DNA, 2245 bp, Homo sapiens
  source 1..2245: mol_type = unassigned DNA
ccttgtaattcataaatctctgaaaacttaaaagtttgagcaaaagtttgtcatgtttctatgagtaatttataataaaacttgatcagaatttgtgagactaacgtttgtctttatattttccttttttttttttttttttttgagacacagtctcgctctgtcgtccaggctggagtgccgtggcgtaatctcggctcactgcaacctctgcctcctggattcaaacaattcttctgcctcagcctcctgagtagctgggattacaggaccagtgatggtatagaacactgtattagagacatggagctggggctggatgaagattccatcagtaattcaatcaacagacaagtgttatccaatcacgtctttaaatcaatcactgacatggagctggggctggatgaagattccatcagtaattcaatcaacagacaagtgttatccaatcacgtctttaaatcaatcactgatcccagcccctataaaagggagcagccttaggaggcacatcagataaacccagtgtggaaagctagtcacacatcagctcagtgttcggcccgggattacccagtcaaccaaggagcttgcagttttaaagaatccaccaactgttgaaacaaatccctagagacacaaggcaagagactgaatcatcaaagtaaagtctctctgagaattattgctaagaatggctttagatctaagaaccatatttcagtgtgaaccatccgagaataatcttggatcagaaaattcagcgtttcaacaaagccaaggacctgctgttcagagagaagaagggatttctgagttctcaagaatggtgctcaattcatttcaagacagcaataattcatatgcaaggcaggaattgcaaagactttataggatctttcactcatggctgcaaccagaaaagcacagcaaggatgaaattatttctctattagtcctggagcagtttatgattggtggccactgcaatgacaaagccagtgtgaaagagaaatggaaatcaagtggcaaaaacttggagagattcatagaagacctgactgatgacagcataaatccacctgccttagtccacgtccacatgcagggacaggaagctctcttttctgaggatatgcccttaagagatgtcattgttcatctcacaaaacaagtgaatgcccaaaccacaagagaagcaaacatggggacaccctcccagacttcccaagatacttccttagaaacaggacaaggatatgaagatgaacaagatggctggaacagttcttcgaaaactactcgagtaaatgaaaatattactaatcaaggcaatcaaatagtttccctaatcatcatccaggaagagaacggtcctaggcctgaagagggaggtgtttcttctgacaacccatacaactcaaaaagagcagagctagtcactgctagatctcaggaagggtccataaatggaatcactttccaaggtgtccctatggtgatgggagcagggtgtatctctcaaccagagcagtcctcccctgagtctgcccttacccaccagagcaatgagggaaattccacatgtgaggtacatcagaaaggatcccatggagtccaaaaatcatacaaatgtgaagaatgccccaaggtctttaagtatctctgtcacttattagctcaccagagaagacacaggaatgagaggccatttgtttgtcccgagtgtcaaaaaggcttcttccagatatcagacctacgggtgcatcagataattcacacaggaaagaagcctttcacatgcagcatgtgtaaaaagtccttcagccacaaaaccaacctgcggtctcatgagagaatccacacaggagaaaagccttatacatgtcccttttgtaagacaagctaccgccagtcatccacataccaccgccatatgaggactcatgagaaaattaccctgccaagtgttccctccacaccagaagcttcctaagctgctggtctgataatgtgtataaatatgtatgcaagtatgtatattcctatagtatttatctacttaggatataagatataatctcctgattatgctttcaatttattgtcttgcttcattaaaatgtaaggctaaggagagcatggaatttgtcagttttgttcactaaagtattccaagtggttgggaaagtggaacatttccaagaaccaataaatttctgttgaataaatgaatgaatcc

SEQ ID NO: 34739 - DNA, 5015 bp, Homo sapiens
  source 1..5015: mol_type = unassigned DNA
ggacggcagcggccaagcaagaagaaagacgtggcagcaagcgggagtcggggatagtgtcatcggttcggtaaagtttctgttctctgggtcccggtactttggagcttgtctcaaactccacatacagaaagccaccgaccttattccggtatcctacacccattccccactctcattacactcccacccctggccctcagcgtcggagtcaagagcaacagggacacttccgttctccttgtaggactggtgaaaccgtaatgaagaacacccctaaactcccataatcgatttggggatattccctgcccaaaaaattcctggaaaattgactagtattaagtctatggaagatggagttttttttcatgatcctttaactctcaagttcatctttaaatgaactctttttttttgttttttttttgttttgttttgttttgtttttgaggagataactaaccctagctgtctccagtctgacaaaggttatttgaatggacttaatctcccagtagttgggagatgttttaaaaacacatgctgtgtttgaattgtggctgagaggttttcttggcaatgtgaggaggaaatttttttctgcctcattattattaattcatggattgagtgttggttcgacctacaggcgtaatagattggaactcagtgaagacacagatgttcctgttcagagcaaccagctaatgattacagtttaaagacaatttctgtgatcaagttgtcatttggaagattaaacccatttcacgaggacttggagcctggtccttgctttgaggaagcagtggcttgtttcaagaagccacttctgatctaagaatctacccagcatgcctaatcaaggagaagactgctatttttttttctattccacatgtaccaaaggtgacagctgcccattccgtcactgtgaagctgcaataggaaatgaaactgtttgcacattatggcaagaagggcgctgttttcgacaggtgtgcaggtttcggcacatggagattgataaaaaacgcagtgaaattccttgttattgggaaaatcagccaacaggatgtcaaaaattaaactgcgctttccatcacaatagaggacgatatgttgatggccttttcctacctccgagcaaaactgtgttgcccactgtgcctgagtcaccagaagaggaagtgaaggctagccaactttcagttcagcagaacaaattgtctgtccagtccaatccttcccctcagctgcggagcgttatgaaagtagaaagttccgaaaatgttcctagccccacgcatccaccagttgtaattaatgctgcagatgatgatgaagatgatgatgatcagttttctgaggaaggtgatgaaaccaaaacacctaccctgcaaccaactcctgaagttcacaatggattacgagtgacttctgtccggaaacctgcagtcaatataaagcaaggtgaatgtttgaattttggaataaaaactcttgaggaaattaagtcaaagaaaatgaaggaaaaatctaagaagcaaggtgagggttcttcaggagtttccagtcttttactccaccctgagcccgttccaggtcctgaaaaagaaaatgtcaggactgtggtgaggacagtaactctctccaccaaacaaggagaagaacccttggttagattgagtcttactgagagactggggaaacgaaaattttcagcaggcggtgacagtgatcctccattaaagcgtagcctggcacagaggctagggaagaaagttgaagctccagaaactaacattgacaaaacaccaaagaaagctcaagtttccaagtctcttaaggagcgattaggcatgtcagctgatccagataatgaggatgcaacagataaagttaataaagttggtgagatccatgtgaagacattagaagaaattcttcttgaaagagccagtcagaaacgtggagaattgcaaactaaactcaagacagaaggaccttcaaaaactgatgattctacttcaggagcaagaagctcctccactatccgtatcaaaaccttctctgaggtcctggctgaaaaaaaacatcggcagcaggaagcagagagacaaaaaagcaaaaaggatacaacttgcatcaagctaaagattgatagtgaaattaaaaaaacagtagttttgccacccattgttgccagcagaggacaatcagaggagcctgcaggtaaaacaaagtctatgcaggaggtgcacatcaagacgctggaagaaattaaactggagaaggcactgagggtgcagcagagctctgagagcagcaccagctccccgtctcaacacgaggccactccaggggcaaggcggctgctgcgaatcaccaaaagaacagggatgaaagaagagaagaaccttcaggaaggaaatgaagttgattctcagagcagtattagaacagaagctaaagaggcttcaggtgagaccacaggagttgacatcactaaaattcaagtcaagagatgtgagaccatgagagagaagcacatgcagaaacagcaggagagggaaaaatcagtcttgacacctcttcggggagatgtagcctcttgcaatacccaagtggcagagaaaccagtgctcactgctgtgccaggaatcacacggcacctgaccaagcggcttcccacaaagtcatcccagaaggtggaggtagaaacctcagggattggagactcattattgaatgtgaaatgtgcagcacagaccttggaaaaaaggggtaaagctaaacccaaagtgaacgtgaagccatctgtggttaaagttgtgtcatcccccaaattggccccaaaacgtaaggcagtggagatgcacgctgctgtcattgccgctgtgaagccactcagctccagcagtgtcctacaggaacccccagccaaaaaggcagctgtggctgttgtcccgcttgtctctgaggacaaatcagtcactgtgcctgaagcagaaaatcctagagacagtcttgtgctgcctccaacccagtcctcttcagattcctcacccccggaggtgtctggcccttcctcatcccaaatgagcatgaaaactcgccgactcagctctgcctcaacaggaaagcccccactctctgtggaggatgattttgagaaactaatatgggagatttcaggaggcaaattggaagctgagattgacctggatcctgggaaagatgaagatgaccttctgcttgagctatcagaaatgattgatagctgaaggtggtagtgaggacactttaaaaaaaaaatcgccaaaaaactggacttagtttcatctattgtaacatttacctgagatgatcatttctttagtctagaatttgccccaaatcagaagtatacctctgaattatctgtatgtgtcctggattccttggggtcagatttttaaagttactttataaccattttgtccatttgatgccattgtttatcatcttttgagaaaaaagttctgtcatacccttctctccacaaaaaagagactgagagggagatcaagtgaaagggtgcaagcgaacttagtgactccttgaggtgtttgtcagttttggcttttttcttctttgttgtattctttatgtattgtcttgatgtacttaatattacctgagtttgaaatggatgaagacagctgctaccattaaggaccaaattttatgctaccactaaacaaaaatacccactcagtctgtgttaaattgtatgtctttttaaaggtatttaaagattcaactaagctttaaagagggctgagcagctcaggaagcctgtaatgtgggcataactctttggacctgatcttgatgcttctgctgctctgttagcctctgaagagcaatatctaatttattattactgtaattttttaaaaggctttaaagtgcctcaggggtcccctgaaactaattttctatttctgggattccctggattcattatatgagatggtgacatgattagaggaattcttttttagtatgaaaattgtcctttttcttcttcagtacttgcctccttgctggcattgaattaacacagggacaaaatttggttaattttttatttctaactctcccaacaaacccctgttgcccagtatttgtttggtggcctttaaccacctgagggaaaaaatgagcttattcaagctgccaatatttatctatgggctgtagcagtacactgaattgtactgtgccagggatattgagatgctctgggggtgtattgtatacctgccagttttcttcatttctgaattgagttttcttttcttgatgttggtttccttcatatcacctcaaggtttagatttgtgaaggaataagcatgatggaaataatagtcttgaaaggagatatgttgtatataatcaggaggaagaggaaggaaggacttacccattttgatattttgctgtaggtggccagttttgtttctcatagggaaatctgacccacctgtcatgttggctcctaaggaactgctgttgtaagcggctcatcaagagttgaacttcacgtagccttgttgggaatatggaaaaggaagaaagccacaggactgcccattcagtcttgggaagattgggatgattctgcacaagcaaaaatgactgaagtttatgtatagacacacctctaccaatccatcttcagctgactgaatgttgtatgatagcccttctccaaagcagaggtagaatgttcaggtttcaccatggattttctacttatttcgtttttggaatcagcttacagattccaggtcccttttgtatatattctttattcttttgcttttttaaaaaataattttgtttcatatttaaagcacttgtattagtcaatgtttcgtgttccgcattatttgaaccatttgcccttacagaaagagaaatacttgtttgtgttttaaataaaactgatgtaggaaagtc

SEQ ID NO: 34740 - DNA, 4365 bp, Homo sapiens
  source 1..4365: mol_type = unassigned DNA
ctgcaacctccacctcccgggttcaagaagtttccctaccttaggctcctgagtagctgggactacaggattacagtttaaagacaatttctgtgatcaagttgtcatttggaagattaaacccatttcacgaggacttggagcctggtccttgctttgaggaagcagtggcttgtttcaagaagccacttctgatctaagaatctacccagcatgcctaatcaaggagaagactgctatttttttttctattccacatgtaccaaaggtgacagctgcccattccgtcactgtgaagctgcaataggaaatgaaactgtttgcacattatggcaagaagggcgctgttttcgacaggtgtgcaggtttcggcacatggagattgataaaaaacgcagtgaaattccttgttattgggaaaatcagccaacaggatgtcaaaaattaaactgcgctttccatcacaatagaggacgatatgttgatggccttttcctacctccgagcaaaactgtgttgcccactgtgcctgagtcaccagaagaggaagtgaaggctagccaactttcagttcagcagaacaaattgtctgtccagtccaatccttcccctcagctgcggagcgttatgaaagtagaaagttccgaaaatgttcctagccccacgcatccaccagttgtaattaatgctgcagatgatgatgaagatgatgatgatcagttttctgaggaaggtgatgaaaccaaaacacctaccctgcaaccaactcctgaagttcacaatggattacgagtgacttctgtccggaaacctgcagtcaatataaagcaaggtgaatgtttgaattttggaataaaaactcttgaggaaattaagtcaaagaaaatgaaggaaaaatctaagaagcaaggtgagggttcttcaggagtttccagtcttttactccaccctgagcccgttccaggtcctgaaaaagaaaatgtcaggactgtggtgaggacagtaactctctccaccaaacaaggagaagaacccttggttagattgagtcttactgagagactggggaaacgaaaattttcagcaggcggtgacagtgatcctccattaaagcgtagcctggcacagaggctagggaagaaagttgaagctccagaaactaacattgacaaaacaccaaagaaagctcaagtttccaagtctcttaaggagcgattaggcatgtcagctgatccagataatgaggatgcaacagataaagttaataaagttggtgagatccatgtgaagacattagaagaaattcttcttgaaagagccagtcagaaacgtggagaattgcaaactaaactcaagacagaaggaccttcaaaaactgatgattctacttcaggagcaagaagctcctccactatccgtatcaaaaccttctctgaggtcctggctgaaaaaaaacatcggcagcaggaagcagagagacaaaaaagcaaaaaggatacaacttgcatcaagctaaagattgatagtgaaattaaaaaaacagtagttttgccacccattgttgccagcagaggacaatcagaggagcctgcaggtaaaacaaagtctatgcaggaggtgcacatcaagacgctggaagaaattaaactggagaaggcactgagggtgcagcagagctctgagagcagcaccagctccccgtctcaacacgaggccactccaggggcaaggcggctgctgcgaatcaccaaaagaacagggatgaaagaagagaagaaccttcaggaaggaaatgaagttgattctcagagcagtattagaacagaagctaaagaggcttcaggtgagaccacaggagttgacatcactaaaattcaagtcaagagatgtgagaccatgagagagaagcacatgcagaaacagcaggagagggaaaaatcagtcttgacacctcttcggggagatgtagcctcttgcaatacccaagtggcagagaaaccagtgctcactgctgtgccaggaatcacacggcacctgaccaagcggcttcccacaaagtcatcccagaaggtggaggtagaaacctcagggattggagactcattattgaatgtgaaatgtgcagcacagaccttggaaaaaaggggtaaagctaaacccaaagtgaacgtgaagccatctgtggttaaagttgtgtcatcccccaaattggccccaaaacgtaaggcagtggagatgcacgctgctgtcattgccgctgtgaagccactcagctccagcagtgtcctacaggaacccccagccaaaaaggcagctgtggctgttgtcccgcttgtctctgaggacaaatcagtcactgtgcctgaagcagaaaatcctagagacagtcttgtgctgcctccaacccagtcctcttcagattcctcacccccggaggtgtctggcccttcctcatcccaaatgagcatgaaaactcgccgactcagctctgcctcaacaggaaagcccccactctctgtggaggatgattttgagaaactaatatgggagatttcaggaggcaaattggaagctgagattgacctggatcctgggaaagatgaagatgaccttctgcttgagctatcagaaatgattgatagctgaaggtggtagtgaggacactttaaaaaaaaaatcgccaaaaaactggacttagtttcatctattgtaacatttacctgagatgatcatttctttagtctagaatttgccccaaatcagaagtatacctctgaattatctgtatgtgtcctggattccttggggtcagatttttaaagttactttataaccattttgtccatttgatgccattgtttatcatcttttgagaaaaaagttctgtcatacccttctctccacaaaaaagagactgagagggagatcaagtgaaagggtgcaagcgaacttagtgactccttgaggtgtttgtcagttttggcttttttcttctttgttgtattctttatgtattgtcttgatgtacttaatattacctgagtttgaaatggatgaagacagctgctaccattaaggaccaaattttatgctaccactaaacaaaaatacccactcagtctgtgttaaattgtatgtctttttaaaggtatttaaagattcaactaagctttaaagagggctgagcagctcaggaagcctgtaatgtgggcataactctttggacctgatcttgatgcttctgctgctctgttagcctctgaagagcaatatctaatttattattactgtaattttttaaaaggctttaaagtgcctcaggggtcccctgaaactaattttctatttctgggattccctggattcattatatgagatggtgacatgattagaggaattcttttttagtatgaaaattgtcctttttcttcttcagtacttgcctccttgctggcattgaattaacacagggacaaaatttggttaattttttatttctaactctcccaacaaacccctgttgcccagtatttgtttggtggcctttaaccacctgagggaaaaaatgagcttattcaagctgccaatatttatctatgggctgtagcagtacactgaattgtactgtgccagggatattgagatgctctgggggtgtattgtatacctgccagttttcttcatttctgaattgagttttcttttcttgatgttggtttccttcatatcacctcaaggtttagatttgtgaaggaataagcatgatggaaataatagtcttgaaaggagatatgttgtatataatcaggaggaagaggaaggaaggacttacccattttgatattttgctgtaggtggccagttttgtttctcatagggaaatctgacccacctgtcatgttggctcctaaggaactgctgttgtaagcggctcatcaagagttgaacttcacgtagccttgttgggaatatggaaaaggaagaaagccacaggactgcccattcagtcttgggaagattgggatgattctgcacaagcaaaaatgactgaagtttatgtatagacacacctctaccaatccatcttcagctgactgaatgttgtatgatagcccttctccaaagcagaggtagaatgttcaggtttcaccatggattttctacttatttcgtttttggaatcagcttacagattccaggtcccttttgtatatattctttattcttttgcttttttaaaaaataattttgtttcatatttaaagcacttgtattagtcaatgtttcgtgttccgcattatttgaaccatttgcccttacagaaagagaaatacttgtttgtgttttaaataaaactgatgtagg

SEQ ID NO: 34741 - DNA, 3004 bp, Homo sapiens
  source 1..3004: mol_type = unassigned DNA
ggacgacggacggcagcggccaagcaagaagaaagacgtggcagcaagcgggagtcggggatagtgtcatcggttcgggtcccggtactttggagcttgtctcaaactccacatacagaaagccaccgaccttattccggtatcctacacccattccccactctcattacactcccacccctggccctcagcgtcggagtcaagagcaacagggacacttccgttctccttgtaggactggtgaaaccgtaatgaagaacacccctaaactcccataatcgatttggggatattccctgcccaaaaaattcctggaaaattgactagtattaagtgcgtaatagattggaactcagtgaagacacagatgttcctgttcagagcaaccagctaatgattacagtttaaagacaatttctgtgatcaagttgtcatttggaagattaaacccatttcacgaggacttggagcctggtccttgctttgaggaagcagtggcttgtttcaagaagccacttctgatctaagaatctacccagcatgcctaatcaaggagaagactgctatttttttttctattccacatgtaccaaaggtgacagctgcccattccgtcactgtgaagctgcaataggaaatgaaactgtttgcacattatggcaagaagggcgctgttttcgacaggtgtgcaggtttcggcacatggagattgataaaaaacgcagtgaaattccttgttattgggaaaatcagccaacaggatgtcaaaaattaaactgcgctttccatcacaatagaggacgatatgttgatggccttttcctacctccgagcaaaactgtgttgcccactgtgcctgagtcaccagaagaggaagtgaaggctagccaactttcagttcagcagaacaaattgtctgtccagtccaatccttcccctcagctgcggagcgttatgaaagtagaaagttccgaaaatgttcctagccccacgcatccaccagttgtaattaatgctgcagatgatgatgaagatgatgatgatcagttttctgaggaaggtgatgaaaccaaaacacctaccctgcaaccaactcctgaagttcacaatggattacgagtgacttctgtccggaaacctgcagtcaatataaagcaaggtgaatgtttgaattttggaataaaaactcttgaggaaattaagtcaaagaaaatgaaggaaaaatctaagaagcaaggtgagggttcttcaggagtttccagtcttttactccaccctgagcccgttccaggtcctgaaaaagaaaatgtcaggactgtggtgaggacagtaactctctccaccaaacaaggagaagaacccttggttagattgagtcttactgagagactggggaaacgaaaattttcagcaggcggtgacagtgatcctccattaaagcgtagcctggcacagaggctagggaagaaagttgaagctccagaaactaacattgacaaaacaccaaagaaagctcaagtttccaagtctcttaaggagcgattaggcatgtcagctgatccagataatgaggatgcaacagataaagttaataaagttggtgagatccatgtgaagacattagaagaaattcttcttgaaagagccagtcagaaacgtggagaattgcaaactaaactcaagacagaaggaccttcaaaaactgatgattctacttcaggagcaagaagctcctccactatccgtatcaaaaccttctctgaggtcctggctgaaaaaaaacatcggcagcaggaagcagagagacaaaaaagcaaaaaggatacaacttgcatcaagctaaagattgatagtgaaattaaaaaaacagtagttttgccacccattgttgccagcagaggacaatcagaggagcctgcaggtaaaacaaagtctatgcaggaggtgcacatcaagacgctggaagaaattaaactggagaaggcactgagggtgcagcagagctctgagagcagcaccagctccccgtctcaacacgaggccactccaggggcaaggcggctgctgcgaatcaccaaaagaacagggatgaaagaagagaagaaccttcaggaaggaaatgaagttgattctcagagcagtattagaacagaagctaaagaggcttcaggtgagaccacaggagttgacatcactaaaattcaagtcaagagatgtgagaccatgagagagaagcacatgcagaaacagcaggagagggaaaaatcagtcttgacacctcttcggggagatgtagcctcttgcaatacccaagtggcagagaaaccagtgctcactgctgtgccaggaatcacacggcacctgaccaagcggcttcccacaaagtcatcccagaaggtggaggtagaaacctcagggattggagactcattattgaatgtgaaatgtgcagcacagaccttggaaaaaaggggtaaagctaaacccaaagtgaacgtgaagccatctgtggttaaagttgtgtcatcccccaaattggccccaaaacgtaaggcagtggagatgcacgctgctgtcattgccgctgtgaagccactcagctccagcagtgtcctacaggaacccccagccaaaaaggcagctgtggctgttgtcccgcttgtctctgaggacaaatcagtcactgtgcctgaagcagaaaatcctagagacagtcttgtgctgcctccaacccagtcctcttcagattcctcacccccggaggtgtctggcccttcctcatcccaaatgagcatgaaaactcgccgactcagctctgcctcaacaggaaagcccccactctctgtggaggatgattttgagaaactaatatgggagatttcaggaggcaaattggaagctgagattgacctggatcctgggaaagatgaagatgaccttctgcttgagctatcagaaatgattgatagctgaaggtggtagtgaggacactttaaaaaaaaaa

SEQ ID NO: 34742 - DNA, 3451 bp, Homo sapiens
  source 1..3451: mol_type = unassigned DNA
ttttctgctagtgctgctgctgctgggaggacgacggacggcagcggccaagcaagaagaaagacgtggcagcaagcgggagtcggggatagtgtcatcggttcggtaaagtttctgttctctgggtcccggtactttggagcttgtctcaaactccacatacagaaagccaccgaccttattccggtatcctacacccattccccactctcattacactcccacccctggccctcagcgtcggagtcaagagcaacagggacacttccgttctccttgtaggactggtgaaaccgtaatgaagaacacccctaaactcccataatcggtgcggattcctatggggaaggcctatattgttgacatcttccaggccttggttctggaccttgagaaagaggctgtggaactagagatagcgatgctttttaggatttggggatattccctgcccaaaaaattcctggaaaattgactagtattaagtctatggaagatggagttttttttcatgatcctttaactctcaagttcatctttaaatgaactctttttttttgttttttttttgttttgttttgttttgtttttgaggagataactaaccctagctgtctccagtctgacaaaggttatttgaatggacttaatctcccagtagttgggagatgttttaaaaacacatgctgtgtttgaattgtggctgagaggttttcttggcaatgtgaggaggaaatttttttctgcctcattattattaattcatggattgagtgttggttcgacctacaggcgtaatagattggaactcagtgaagacacagatgttcctgttcagagcaaccagctaatgattacagtttaaagacaatttctgtgatcaagttgtcatttggaagattaaacccatttcacgaggacttggagcctggtccttgctttgaggaagcagtggcttgtttcaagaagccacttctgatctaagaatctacccagcatgcctaatcaaggagaagactgctatttttttttctattccacatgtaccaaaggtgacagctgcccattccgtcactgtgaagctgcaataggaaatgaaactgtttgcacattatggcaagaagggcgctgttttcgacaggtgtgcaggtttcggcacatggagattgataaaaaacgcagtgaaattccttgttattgggaaaatcagccaacaggatgtcaaaaattaaactgcgctttccatcacaatagaggacgatatgttgatggccttttcctacctccgagcaaaactgtgttgcccactgtgcctgagtcaccagaagaggaagtgaaggctagccaactttcagttcagcagaacaaattgtctgtccagtccaatccttcccctcagctgcggagcgttatgaaagtagaaagttccgaaaatgttcctagccccacgcatccaccagttgtaattaatgctgcagatgatgatgaagatgatgatgatcagttttctgaggaaggtgatgaaaccaaaacacctaccctgcaaccaactcctgaagttcacaatggattacgagtgacttctgtccggaaacctgcagtcaatataaagcaaggtgaatgtttgaattttggaataaaaactcttgaggaaattaagtcaaagaaaatgaaggaaaaatctaagaagcaaggtgagggttcttcaggagtttccagtcttttactccaccctgagcccgttccaggtcctgaaaaagaaaatgtcaggactgtggtgaggacagtaactctctccaccaaacaaggagaagaacccttggttagattgagtcttactgagagactggggaaacgaaaattttcagcaggcggtgacagtgatcctccattaaagcgtagcctggcacagaggctagggaagaaagttgaagctccagaaactaacattgacaaaacaccaaagaaagctcaagtttccaagtctcttaaggagcgattaggcatgtcagctgatccagataatgaggatgcaacagataaagttaataaagttggtgagatccatgtgaagacattagaagaaattcttcttgaaagagccagtcagaaacgtggagaattgcaaactaaactcaagacagaaggaccttcaaaaactgatgattctacttcaggagcaagaagctcctccactatccgtatcaaaaccttctctgaggtcctggctgaaaaaaaacatcggcagcaggaagcagagagacaaaaaagcaaaaaggatacaacttgcatcaagctaaagattgatagtgaaattaaaaaaacagtagttttgccacccattgttgccagcagaggacaatcagaggagcctgcaggtaaaacaaagtctatgcaggaggtgcacatcaagacgctggaagaaattaaactggagaaggcactgagggtgcagcagagctctgagagcagcaccagctccccgtctcaacacgaggccactccaggggcaaggcggctgctgcgaatcaccaaaagaacagggatgaaagaagagaagaaccttcaggaaggaaatgaagttgattctcagagcagtattagaacagaagctaaagaggcttcaggtgagaccacaggagttgacatcactaaaattcaagtcaagagatgtgagaccatgagagagaagcacatgcagaaacagcaggagagggaaaaatcagtcttgacacctcttcggggagatgtagcctcttgcaatacccaagtggcagagaaaccagtgctcactgctgtgccaggaatcacacggcacctgaccaagcggcttcccacaaagtcatcccagaaggtggaggtagaaacctcagggattggagactcattattgaatgtgaaatgtgcagcacagaccttggaaaaaaggggtaaagctaaacccaaagtgaacgtgaagccatctgtggttaaagttgtgtcatcccccaaattggccccaaaacgtaaggcagtggagatgcacgctgctgtcattgccgctgtgaagccactcagctccagcagtgtcctacaggaacccccagccaaaaaggcagctgtggctgttgtcccgcttgtctctgaggacaaatcagtcactgtgcctgaagcagaaaatcctagagacagtcttgtgctgcctccaacccagtcctcttcagattcctcacccccggaggtgtctggcccttcctcatcccaaatgagcatgaaaactcgccgactcagctctgcctcaacaggaaagcccccactctctgtggaggatgattttgagaaactaatatgggagatttcaggaggcaaattggaagctgagattgacctggatcctgggaaagatgaagatgaccttctgcttgagctatcagaaatgattgatagctgaaggtggtagtgaggacacttt

SEQ ID NO: 34743 - DNA, 682 bp, Homo sapiens
  source 1..682: mol_type = unassigned DNA
gacgctggcagtcttggttttctgctagtgctgctgctgctgggaggacgacggacggcagcggccaagcaagaagaaagacgtggcagcaagcgggagtcggggatagtgtcatcggttcggactggtgaaaccgtaatgaagaacacccctaaactcccataatcggtgcggattcctatggggaaggcctatattgttgacatcttccaggccttggttctggaccttgagaaagaggctgtggaactagagatagcgatgctttttaggatttggggatattccctgcccaaaaaattcctggaaaattgactagtattaagtgcgtaatagattggaactcagtgaagacacagatgttcctgttcagagcaaccagctaatgattacagtttaaagacaatttctgtgatcaagttgtcatttggaagattaaacccatttcacgaggacttggagcctggtccttgctttgaggaagcagtggcttgtttcaagaagccacttctgatctaagaatctacccagcatgcctaatcaaggagaagactgctatttttttttctattccacatgtaccaaaggtgacagctgcccattccgtcactgtgaagctgcaataggaaatgaaactgtttgcacattatggcaagaagggcgctgttttcgacaggtgtgc

SEQ ID NO: 34744 - DNA, 1892 bp, Homo sapiens
  source 1..1892: mol_type = unassigned DNA
gacgctggcagtcttggttttctgctagtgctgctgctgctgggaggacgacggacggcagcggccaagcaagaagaaagacgtggcagcaagcgggagtcggggatagtgtcatcggttcggtaaagtttctgttctctggcgtaatagattggaactcagtgaagacacagatgttcctgttcagagcaaccagctaatgattacagtttaaagacaatttctgtgatcaagttgtcatttggaagattaaacccatttcacgaggacttggagcctggtccttgctttgaggaagcagtggcttgtttcaagaagccacttctgatctaagaatctacccagcatgcctaatcaaggagaagactgctatttttttttctattccacatgtaccaaaggtgacagctgcccattccgtcactgtgaagctgcaataggaaatgaaactgtttgcacattatggcaagaagggcgctgttttcgacaggtgtgcaggtttcggcacatggagattgataaaaaacgcagtgaaattccttgttattgggaaaatcagccaacaggatgtcaaaaattaaactgcgctttccatcacaatagaggacgatatgttgatggccttttcctacctccgagcaaaactgtgttgcccactgtgcctgagtcaccagaagaggaagtgaaggctagccaactttcagttcagcagaacaaattgtctgtccagtccaatccttcccctcagctgcggagcgttatgaaagtagaaagttccgaaaatgttcctagccccacgcatccaccagttgtaattaatgctgcagatgatgatgaagatgatgatgatcagttttctgaggaaggtgatgaaaccaaaacacctaccctgcaaccaactcctgaagttcacaatggattacgagtgacttctgtccggaaacctgcagtcaatataaagcaaggtgaatgtttgaattttggaataaaaactcttgaggaaattaagtcaaagaaaatgaaggaaaaatctaagaagcaaggtgagggttcttcaggagtttccagtcttttactccaccctgagcccgttccaggtcctgaaaaagaaaatgtcaggactgtggtgaggacagtaactctctccaccaaacaaggagaagaacccttggttagattgagtcttactgagagactggggaaacgaaaattttcagcaggcggtgacagtgatcctccattaaagcgtagcctggcacagaggctagggaagaaagttgaagctccagaaactaacattgacaaaacaccaaagaaagctcaagtttccaagtctcttaaggagcgattaggcatgtcagctgatccagataatgaggatgcaacagataaagttaataaagttggtgagatccatgtgaagacattagaagaaattcttcttgaaagagccagtcagaaacgtggagaattgcaaactaaactcaagacagaaggaccttcaaaaactgatgattctacttcaggagcaagaagctcctccactatccgtatcaaaaccttctctgaggtcctggctgaaaaaaaacatcggcagcaggaagcagagagacaaaaaagcaaaaaggatacaacttgcatcaagctaaagattgatagtgaaattaaaaaaacagtagttttgccacccattgttgccagcagaggacaatcagaggagcctgcaggtaaaacaaagtctatgcaggaggtgcacatcaagacgctggaagaaattaaactggagaaggcactgagggtgcagcagagctctgagagcagcaccagctccccgtctcaacacgaggccactccaggggcaaggcggctgctgcgaatcaccaaaagaacag

SEQ ID NO: 34745 - DNA, 2763 bp, Homo sapiens
  source 1..2763: mol_type = unassigned DNA
agtgctgctgctgctgggaggacgacggacggcagcggccaagcaagaagaaagacgtggcagcaagcgggagtcggggatagtgtcatcggttcggtaaagtttctgttctctggtgacagctgcccattccgtcactgtgaagctgcaataggaaatgaaactgtttgcacattatggcaagaagggcgctgttttcgacaggtgtgcaggtttcggcacatggagattgataaaaaacgcagtgaaattccttgttattgggaaaatcagccaacaggatgtcaaaaattaaactgcgctttccatcacaatagaggacgatatgttgatggccttttcctacctccgagcaaaactgtgttgcccactgtgcctgagtcaccagaagaggaagtgaaggctagccaactttcagttcagcagaacaaattgtctgtccagtccaatccttcccctcagctgcggagcgttatgaaagtagaaagttccgaaaatgttcctagccccacgcatccaccagttgtaattaatgctgcagatgatgatgaagatgatgatgatcagttttctgaggaaggtgatgaaaccaaaacacctaccctgcaaccaactcctgaagttcacaatggattacgagtgacttctgtccggaaacctgcagtcaatataaagcaaggtgaatgtttgaattttggaataaaaactcttgaggaaattaagtcaaagaaaatgaaggaaaaatctaagaagcaaggtgagggttcttcaggagtttccagtcttttactccaccctgagcccgttccaggtcctgaaaaagaaaatgtcaggactgtggtgaggacagtaactctctccaccaaacaaggagaagaacccttggttagattgagtcttactgagagactggggaaacgaaaattttcagcaggcggtgacagtgatcctccattaaagcgtagcctggcacagaggctagggaagaaagttgaagctccagaaactaacattgacaaaacaccaaagaaagctcaagtttccaagtctcttaaggagcgattaggcatgtcagctgatccagataatgaggatgcaacagataaagttaataaagttggtgagatccatgtgaagacattagaagaaattcttcttgaaagagccagtcagaaacgtggagaattgcaaactaaactcaagacagaaggaccttcaaaaactgatgattctacttcaggagcaagaagctcctccactatccgtatcaaaaccttctctgaggtcctggctgaaaaaaaacatcggcagcaggaagcagagagacaaaaaagcaaaaaggatacaacttgcatcaagctaaagattgatagtgaaattaaaaaaacagtagttttgccacccattgttgccagcagaggacaatcagaggagcctgcaggtaaaacaaagtctatgcaggaggtgcacatcaagacgctggaagaaattaaactggagaaggcactgagggtgcagcagagctctgagagcagcaccagctccccgtctcaacacgaggccactccaggggcaaggcggctgctgcgaatcaccaaaagaacagggatgaaagaagagaagaaccttcaggaaggaaatgaagttgattctcagagcagtattagaacagaagctaaagaggcttcaggtgagaccacaggagttgacatcactaaaattcaagtcaagagatgtgagaccatgagagagaagcacatgcagaaacagcaggagagggaaaaatcagtcttgacacctcttcggggagatgtagcctcttgcaatacccaagtggcagagaaaccagtgctcactgctgtgccaggaatcacacggcacctgaccaagcggcttcccacaaagtcatcccagaaggtggaggtagaaacctcagggattggagactcattattgaatgtgaaatgtgcagcacagaccttggaaaaaaggggtaaagctaaacccaaagtgaacgtgaagccatctgtggttaaagttgtgtcatcccccaaattggccccaaaacgtaaggcagtggagatgcacgctgctgtcattgccgctgtgaagccactcagctccagcagtgtcctacaggaacccccagccaaaaaggcagctgtggctgttgtcccgcttgtctctgaggacaaatcagtcactgtgcctgaagcagaaaatcctagagacagtcttgtgctgcctccaacccagtcctcttcagattcctcacccccggaggtgtctggcccttcctcatcccaaatgagcatgaaaactcgccgactcagctctgcctcaacaggaaagcccccactctctgtggaggatgattttgagaaactaatatgggagatttcaggaggcaaattggaagctgagattgacctggatcctgggaaagatgaagatgaccttctgcttgagctatcagaaatgattgatagctgaaggtggtagtgaggacactttaaaaaaaaaatcgccaaaaaactggacttagtttcatctattgtaacatttacctgagatgatcatttctttagtctagaatttgccccaaatcagaagtatacctctgaattatctgtatgtgtcctggattccttggggtcagatttttaaagttactttataaccattttgtccatttgatgccattgtttatcatcttttgagaaaaaagttctgtcatacccttctctccacaaaaaagagact

SEQ ID NO: 34746 - DNA, 7979 bp, Homo sapiens
  source 1..7979: mol_type = unassigned DNA
atgttagtggctgccaggaaaacttgtcatcattttagtcattcggtcaaggcccgtcagatactgcaagagttccaaaatgatcaccaacttccatggaagaatttgaagcaggacgaaactggccattggatttctactttttatatgttaaaatggctcttggagcattgctactcagttcaccatagtcttggtagagccagtggagttgtgctcacctcccttcagtggactctaatgacttatgtttgtgatattcttaagccatttgaggaggctacccagaaagtgagcgtgaagaccgcaggattgaatcaggtgctacccctaatccatcatctactcctttccctgcagaaactcagagaagattttcaagtcagaggtattactcaggccctcaatctggtggatagtttatctctgaaacttgaaacagataccctactaagtgccatgcttaaatccaagccctgtatcttggctactttgttagatccttgctttaaaaacagtttggaagacttttttcctcaaggtgctgatttagaaacttataagcagttccttgcagaagaggtctgtaattatatggaatcttcaccagagatctgccaaattccaacttcagaagcttcttgtccctcagttacagtgggagctgattcatttacctcatctctaaaagaaggcacctccagttcaggttctgttgatagctcagctgtagacaatgttgcccttggaagcaaaagcttcatgttcccttctgctgtagcagttgtggatgagtacttcaaagagaagtattcagagttctcaggaggtgatgaccctttaatttactggcagaggaagataagcatatggccggctttgacccaggttgccatccagtatctaagttgccccatgtgtagttggcaatctgaatgtatctttactaaaaatagccactttcatccaaaacagatcatgagcctggactttgacaatatagaacaactgatgtttctgaaaatgaacttgaaaaatgttaactacgattattctacgttggttctgagctgggatcctgagcagaatgaagttgttcaaagcagtgaaaaagaaatactgccttaatttctttttctccatttaaaatgggcaactttttgctgtgttactgtatcttaatagctgtagttgttaaatataatcattatctttataaacacatctggggaaacctgaaatcacacaagggctgaaaattcctcagaggcaatataattttgataaaatgaagattaaagatttcatagctataactgtggcgctagcacttgaaaattttgcttataccaatgagagagaagatatttttaattaaaaaaaatatagtgcagcattgaaaggccttaggctttcttcctggtagattgaactagtaattggttttaagtaaaacttcccccaccatgggaaattttattgctctgaaatcaacgaaatgagaaaaaagtacactggctggcattcctcctgcccctgtttttctgtttccttaaaaaccctgatgcttaattacaacttggcaaaaagaaaacccgtgaaattgttttatatttggaaatttctaattgcctcctcatactggtcagctttataatttcaaattgttgagtgtgatagtgttaccctttagaattggatcttatataaaagggaaatattagaaaacaattaggaaaatatacttttagtctttgaaatgcctgttttaacctttataaaatattataaaaatagattgtgtaggtactttcaaataatttatgggtaaaaacagactaaaatgtttgcaagaattggaaaaggttgaatgggaattgtaatgagagccctttgaacatgcttggaaaaacccagtagacatttcccaaagattgtttctgtaattttaggtaatctttttaaaaacatacttaatgacccattatactgtattaactgtgcggttgttttggccactgaattcttaatgaaaactaagcagtcggtatttttatgtgttaggaatcattggtgaaatgagtgaattgatctcattttaagatccctttctactctgaaagtatgtttctgagattgagtaggaggccagaaaatgatgacttttagtaaaagtctattaaaagtttcagactgaataactaatgtgagatcccaatttttcctttttttcattttagatttggggatattccctgcccaaaaaattcctggaaaattgactagtattaagtgtgagtaaaaggtgtccacttttttttaagttttgattttagttttgtcttggatagtatttggcaagatttagcctagaaattatgtagtatttattacataagaatcaaaattgctttgttactgggctggtttcaaagtttagaactcatttctatgtatcaaaatcgggttttttttggttttgattttttttttttttaaattcttaaatggtaaatatgccattgtgaaatgaaatctcaactccaaaagtttacccttttactaactggagtaaatgtatacttacaaagtctttagctgtagccattagtagtaaagaatttggacctaggctgcgtaagcaagcctttccagggccactatttaatggcaaaccagtgatactggtgttgatacaaaataagaaataaattttcccttagataaagctttctgtgttttgacagtgccagtttagaatggctataatgctgctctgccttctacagcttgctgcaccactctgtagttactctattaccatacgtttctatcttttttggttaaacactccctgatgacgatgatggatatatatacatacatccatattatacataatgatatatgtgtaaggatttaccttcgtctttattttgtgggctgggcaaaatttagtgtaacaataacttcatgatactttggtataagagtaagttctttatttttataatgaacccaaatctaaagtcttttatagtgcattttaaaaggggaaacttatccaaatgttatatttctatacatttttgtgtatatgtgtgtgtgtataagccagttagtatatatctgtatgtatattatatacataaaacactatatttttacatacaagtatgcttttattatacagataataaagatgggggaaggtttctgtttttttcttaataggtgaagaaatcttgaagaccagaaattggatcttactgaaaaactgatgtttttttgttttttttttaaattatattgttcagctatggaagatggagttttttttcatgatcctttaactctcaagttcatctttaaatgaactctttttttttgttttttttttgttttgttttgttttgtttttgaggagataactaaccctagctgtctccagtctgacaaaggttatttgaatggacttaatctcccagtagttgggagatgttttaaaaacacatgctgtgtttgaattgtggctgagaggttttcttggcaatgtgaggaggaaatttttttctgcctcattattattaattcatggattgagtgttggttcgacctacaggcgtaatagattggaactcagtgaagacacagatgttcctgttcagagcaaccagctaatgattacagtttaaagacaatttctgtgatcaagttgtcatttggaagattaaacccatttcacgaggacttggagcctggtccttgctttgaggaagcagtggcttgtttcaagaagccacttctgatctaagaatctacccagcatgcctaatcaaggagaagactgctatttttttttctattccacatgtaccaaaggtgacagctgcccattccgtcactgtgaagctgcaataggaaatgaaactgtttgcacattatggcaagaagggcgctgttttcgacaggtgtgcaggtttcggcacatggagattgataaaaaacgcagtgaaattccttgttattgggaaaatcagccaacaggatgtcaaaaattaaactgcgctttccatcacaatagaggacgatatgttgatggccttttcctacctccgagcaaaactgtgttgcccactgtgcctgagtcaccagaagaggaagtgaaggctagccaactttcagttcagcagaacaaattgtctgtccagtccaatccttcccctcagctgcggagcgttatgaaagtagaaagttccgaaaatgttcctagccccacgcatccaccagttgtaattaatgctgcagatgatgatgaagatgatgatgatcagttttctgaggaaggtgatgaaaccaaaacacctaccctgcaaccaactcctgaagttcacaatggattacgagtgacttctgtccggaaacctgcagtcaatataaagcaaggtgaatgtttgaattttggaataaaaactcttgaggaaattaagtcaaagaaaatgaaggaaaaatctaagaagcaaggtgagggttcttcaggagtttccagtcttttactccaccctgagcccgttccaggtcctgaaaaagaaaatgtcaggactgtggtgaggacagtaactctctccaccaaacaaggagaagaacccttggttagattgagtcttactgagagactggggaaacgaaaattttcagcaggcggtgacagtgatcctccattaaagcgtagcctggcacagaggctagggaagaaagttgaagctccagaaactaacattgacaaaacaccaaagaaagctcaagtttccaagtctcttaaggagcgattaggcatgtcagctgatccagataatgaggatgcaacagataaagttaataaagttggtgagatccatgtgaagacattagaagaaattcttcttgaaagagccagtcagaaacgtggagaattgcaaactaaactcaagacagaaggaccttcaaaaactgatgattctacttcaggagcaagaagctcctccactatccgtatcaaaaccttctctgaggtcctggctgaaaaaaaacatcggcagcaggaagcagagagacaaaaaagcaaaaaggatacaacttgcatcaagctaaagattgatagtgaaattaaaaaaacagtagttttgccacccattgttgccagcagaggacaatcagaggagcctgcaggtaaaacaaagtctatgcaggaggtgcacatcaagacgctggaagaaattaaactggagaaggcactgagggtgcagcagagctctgagagcagcaccagctccccgtctcaacacgaggccactccaggggcaaggcggctgctgcgaatcaccaaaagaacagggatgaaagaagagaagaaccttcaggaaggaaatgaagttgattctcagagcagtattagaacagaagctaaagaggcttcaggtgagaccacaggagttgacatcactaaaattcaagtcaagagatgtgagaccatgagagagaagcacatgcagaaacagcaggagagggaaaaatcagtcttgacacctcttcggggagatgtagcctcttgcaatacccaagtggcagagaaaccagtgctcactgctgtgccaggaatcacacggcacctgaccaagcggcttcccacaaagtcatcccagaaggtggaggtagaaacctcagggattggagactcattattgaatgtgaaatgtgcagcacagaccttggaaaaaaggggtaaagctaaacccaaagtgaacgtgaagccatctgtggttaaagttgtgtcatcccccaaattggccccaaaacgtaaggcagtggagatgcacgctgctgtcattgccgctgtgaagccactcagctccagcagtgtcctacaggaacccccagccaaaaaggcagctgtggctgttgtcccgcttgtctctgaggacaaatcagtcactgtgcctgaagcagaaaatcctagagacagtcttgtgctgcctccaacccagtcctcttcagattcctcacccccggaggtgtctggcccttcctcatcccaaatgagcatgaaaactcgccgactcagctctgcctcaacaggaaagcccccactctctgtggaggatgattttgagaaactaatatgggagatttcaggaggcaaattggaagctgagattgacctggatcctgggaaagatgaagatgaccttctgcttgagctatcagaaatgattgatagctgaaggtggtagtgaggacactttaaaaaaaaaatcgccaaaaaactggacttagtttcatctattgtaacatttacctgagatgatcatttctttagtctagaatttgccccaaatcagaagtatacctctgaattatctgtatgtgtcctggattccttggggtcagatttttaaagttactttataaccattttgtccatttgatgccattgtttatcatcttttgagaaaaaagttctgtcatacccttctctccacaaaaaagagactgagagggagatcaagtgaaagggtgcaagcgaacttagtgactccttgaggtgtttgtcagttttggcttttttcttctttgttgtattctttatgtattgtcttgatgtacttaatattacctgagtttgaaatggatgaagacagctgctaccattaaggaccaaattttatgctaccactaaacaaaaatacccactcagtctgtgttaaattgtatgtctttttaaaggtatttaaagattcaactaagctttaaagagggctgagcagctcaggaagcctgtaatgtgggcataactctttggacctgatcttgatgcttctgctgctctgttagcctctgaagagcaatatctaatttattattactgtaattttttaaaaggctttaaagtgcctcaggggtcccctgaaactaattttctatttctgggattccctggattcattatatgagatggtgacatgattagaggaattcttttttagtatgaaaattgtcctttttcttcttcagtacttgcctccttgctggcattgaattaacacagggacaaaatttggttaattttttatttctaactctcccaacaaacccctgttgcccagtatttgtttggtggcctttaaccacctgagggaaaaaatgagcttattcaagctgccaatatttatctatgggctgtagcagtacactgaattgtactgtgccagggatattgagatgctctgggggtgtattgtatacctgccagttttcttcatttctgaattgagttttcttttcttgatgttggtttccttcatatcacctcaaggtttagatttgtgaaggaataagcatgatggaaataatagtcttgaaaggagatatgttgtatataatcaggaggaagaggaaggaaggacttacccattttgatattttgctgtaggtggccagttttgtttctcatagggaaatctgacccacctgtcatgttggctcctaaggaactgctgttgtaagcggctcatcaagagttgaacttcacgtagccttgttgggaatatggaaaaggaagaaagccacaggactgcccattcagtcttgggaagattgggatgattctgcacaagcaaaaatgactgaagtttatgtatagacacacctctaccaatccatcttcagctgactgaatgttgtatgatagcccttctccaaagcagaggtagaatgttcaggtttcaccatggattttctacttatttcgtttttggaatcagcttacagattccaggtcccttttgtatatattctttattcttttgcttttttaaaaaataattttgtttcatatttaaagcacttgtattagtcaatgtttcgtgttccgcattatttgaaccatttgcccttacagaaagagaaatacttgtttgtgttttaaataaaactgatgtagg

SEQ ID NO: 34747 - DNA, 3046 bp, Homo sapiens
  source 1..3046: mol_type = unassigned DNA
ggaagtggagcattggcatgaagtggctcctagtggctgcttggcgcacgccagctgccctcctctgactccagtggcacctgggggcctggcctcactgacgggagaacattggcgtgaaggctgctggcgactgggccagcattcattgtgaagaccggagggacacaccctgctgctcatgtctgcagggctctgagaggaggaagcctggggcaggacctgcgccagtggccgctgggcacagcatggagcaccccagcaagatggaattcttccagaagctgggctatgaccgggaggatgtgctccgggtgttgggcaagctgggcgagggcgccctggtcaacgacgtgctgcaggagcttatccgcacgggcagccgcccgggtgccctggagcacccggctgcacccaggctagtgcctcggggctcctgtggggtcccggactctgcccagcgtggcccggggacagccctggaagaggacttcagaaccctggccagttctctgcgacccatagtgattgatggcagcaacgtggcgatgagccatggaaataaagaaaccttctcttgccggggaatcaagctggctgttgactggttcagggacagaggacacacctacatcaaagtttttgttccatcctggaggaaggacccaccaagagctgacacccctatcagagagcagcacgtgctggcggagctggagcggcaggcggtgctggtgtacacgccgtcccgcaaggtgcacggcaagcgcctggtctgctacgacgaccgctacatcgtgaaggtggcctacgagcaggacggcgtcatcgtctccaacgacaactaccgggacctgcagagcgagaaccccgagtggaagtggttcatcgagcagaggctgctcatgttctccttcgtcaacgaccggttcatgccgcctgatgaccccctgggccgccatggaccctccctgagcaacttcctgagcaggaagccgaagcccccagagccatcctggcagcattgtccttatggcaagaaatgcacctatggcatcaagtgcaagttctaccacccggagaggccgcaccacgcgcaactggcggtggccgacgagctccgcgccaagacaggggcccggcctggcgcgggcgccgaggagcagcggccaccgagagccccgggcggctccgcaggagcccgggcggccccccgggaaccatttgcgcacagcctcccgccggcgcgggggtccccggacctggccgccctgcgagggagcttctctcggctggccttcagcgacgacctggggcccctggggccgcctctcccggtccccgcctgcagcctcacgccccgactgggcgggcccgactgggtgtccgcgggcggccgggtgccaggcccgctcagcctccctagcccggagagccagttctccccgggcgacctcccgcctccgcccggcctgcagctccagccgcggggcgaacaccgccctagggacctgcacggcgacttgctttccccgcgcaggccacccgacgacccgtgggcccgtccaccccgctccgaccgcttccctgggcgctccgtctgggcggagccggcctggggcgacggcgccactgggggactttcagtgtacgcgaccgaggacgacgagggggacgcgcgcgcccgggctcgcatcgcgctctacagcgtcttcccgcgtgaccaggtggaccgcgtgatggccgcgttcccggagctctcagacctcgccaggctcatcctcctggtacagagatgccagagcgcgggggcgcccctgggcaagccctaagggaccaacacgcacttgcagggaatggcccagcctcgccttgcgtcttggacgggtggacctgtggttgccagcctggacctgagtgggcccatcatggtgcccccttttctttaaagatggtcagggaagcctgcttcctcctcctgagcggggttgtgggggcctggtggcacttggtgatcctcactgaggccggggcctgctgcggggaggtccacccacttccgtggagggaatgattttccatgtgcacggagactgcgggtccaagctgcagtagaacccacaagtgggtcacaaaatcaatttagtgggtcaccaccacaaacacagtggactgggacagggcaaagcgcaccctgtgccatcaggctgagtctgaactcttgttacctatcctgtgtccccacccccttggcagccatgtaactaacctcaatgtgggtcgtagtcagaagtttaaaaaagactatgaatgctcttgaatttcattgcttcaggtaatgtttgaaatatgtagtcaggtggccaggggaggtttgctatctggaagttttcatgttagctattgctaaccccacccgcaagggcagcccagcctccaggtgtgggctctcctgtgctctgaattgtgtggctgtcctatgctggggacaagtggtaggagcgctttgtcccagggccaccttctggggccttcacacacatacccccaccacacaaacacacacacacacacacacacacacacacagtctatcatacatgtacatactcacacacaccacacagacacatactgtttggctaagggttaagtatctccaatattttattagccatccatcatggcagtttccagaataggctttctactgtaccagctgagctgccttcttttacttcttcttcttcttctttttttaaacagacagagtctcggcccggcatggtggctcatgcctctcagcctcccaaagtgctgggattataggcgtgagccaccgcgcctggccccgggcctttatttttatttttaaccttttgacaagacacgctttctattagagctgctttttgtctccctggttcgatttcctgatgtagaatcattgtgttgctgatttttcagttgaaaatgtttaaactgcttcctttgagaacaagtttgagttttagtaagctgtaaagctgttttatttgattcactg

SEQ ID NO: 34748 - DNA, 1930 bp, Homo sapiens
  source 1..1930: mol_type = unassigned DNA
cttaaaaaaaaaaaaaccaaaaaaacccaaagcataactacttttgcagctgaacgtgactgtggcgtgcaggaagtggagcattggcatgaagtggctcctagtggctgcttggcgcacgccagctgccctcctctgactccagtggcacctgggggcctggcctcactgacgggagaacattggcgtgaaggctgctggcgactgggccagcattcattgtgaagaccggagggacacaccctgctgctcatgtctgcagggctctgagaggaggaagcctggggcaggacctgcgccagtggccgctgggcacagcatggagcaccccagcaagatggaattcttccagaagctgggctatgaccgggaggatgtgctccgggtgttgggcaagctgggcgagggcgccctggtcaacgacgtgctgcaggagcttatccgcacgggcagccgcccgggtgccctggagcacccggctgcacccaggctagtgcctcggggctcctgtggggtcccggactctgcccagcgtggcccggggacagccctggaagaggacttcagaaccctggccagttctctgcgacccatagtgattgatggcagcaacgtggcgatgagccatggaaataaagaaaccttctcttgccggggaatcaagctggctgttgactggttcagggacagaggacacacctacatcaaagtttttgttccatcctggaggaaggacccaccaagagctgacacccctatcagagagcagcacgtgctggcggagctggagcggcaggcggtgctggtgtacacgccgtcccgcaaggtgcacggcaagcgcctggtctgctacgacgaccgctacatcgtgaaggtggcctacgagcaggacggcgtcatcgtctccaacgacaactaccgggacctgcagagcgagaaccccgagtggaagtggttcatcgagcagaggctgctcatgttctccttcgtcaacgaccggttcatgccgcctgatgaccccctgggccgccatggaccctccctgagcaacttcctgagcaggaagccgaagcccccagagccatcctggcagcattgtccttatggcaagaaatgcacctatggcatcaagtgcaagttctaccacccggagaggccgcaccacgcgcaactggcggtggccgacgagctccgcgccaagacaggggcccggcctggcgcgggcgccgaggagcagcggccaccgagagccccgggcggctccgcaggagcccgggcggccccccgggaaccatttgcgcacagcctcccgccggcgcgggggtccccggacctggccgccctgcgagggagcttctctcggctggccttcagcgacgacctggggcccctggggccgcctctcccggtccccgcctgcagcctcacgccccgactgggcgggcccgactgggtgtccgcgggcggccgggtgccaggcccgctcagcctccctagcccggagagccagttctccccgggcgacctcccgcctccgcccggcctgcagctccagccgcggggcgaacaccgccctagggacctgcacggcgacttgctttccccgcgcaggccacccgacgacccgtgggcccgtccaccccgctccgaccgcttccctgggcgctccgtctgggcggagccggcctggggcgacggcgccactgggggactttcagtgtacgcgaccgaggacgacgagggggacgcgcgcgcccgggctcgcatcgcgctctacagcgtcttcccgcgtgaccaggtggaccgcgtgatggccgcgttcccggagctctcagacctcgccaggctcatcctcctggtacagagatgccagagcgcgggggcgcccctgggcaagccctaagggaccaacacgcacttgcagggaatg

SEQ ID NO: 34749 - DNA, 2753 bp, Homo sapiens
  source 1..2753: mol_type = unassigned DNA
ggaagtggagcattggcatgaagtggctcctagtggctgcttggcgcacgccagctgccctcctctgactccagtggcacctgggggcctggcctcactgacgggagaacattggcgtgaaggctgctggcgactgggccagcattcattgtgaagaccggagggacacaccctgctgctcatgtctgcagggctctgagaggaggaagcctggggcaggacctgcgccagtggccgctgggcacagcatggagcaccccagcaagatggaattcttccagaagctgggctatgaccgggaggatgtgctccgggtgttgggcaagctgggcgagggcgccctggtcaacgacgtgctgcaggagcttatccgcacgggcagccgcccgggtgccctggagcacccggctgcacccaggctagtgcctcggggctcctgtggggtcccggactctgcccagcgtggcccggggacagccctggaagaggacttcagaaccctggccagttctctgcgacccatagtgattgatggcagcaacgtggcgatgagccatggaaataaagaaaccttctcttgccggggaatcaagctggctgttgactggttcagggacagaggacacacctacatcaaagtttttgttccatcctggaggaaggacccaccaagagctgacacccctatcagagagcagcacgtgctggcggagctggagcggcaggcggtgctggtgtacacgccgtcccgcaaggtgcacggcaagcgcctggtctgctacgacgaccgctacatcgtgaaggtggcctacgagcaggacggcgtcatcgtctccaacgacaactaccgggacctgcagagcgagaaccccgagtggaagtggttcatcgagcagaggctgctcatgttctccttcgtcaacgaccggttcatgccgcctgatgaccccctgggccgccatggaccctccctgagcaacttcctgagcaggaagccgaagcccccagagccatcctggcagcattgtccttatggcaagaaatgcacctatggcatcaagtgcaagttctaccacccggagaggccgcaccacgcgcaactggcggtggccgacgagctccgcgccaagacaggggcccgactgggtgtccgcgggcgacctcccgcctccgcccggcctgcagctccagccgcggggcgaacaccgccctagggacctgcacggcgacttgctttccccgcgcaggccacccgacgacccgtgggcccgtccaccccgctccgaccgcttccctgggcgctccgtctgggcggagccggcctggggcgacggcgccactgggggactttcagtgtacgcgaccgaggacgacgagggggacgcgcgcgcccgggctcgcatcgcgctctacagcgtcttcccgcgtgaccaggtggaccgcgtgatggccgcgttcccggagctctcagacctcgccaggctcatcctcctggtacagagatgccagagcgcgggggcgcccctgggcaagccctaagggaccaacacgcacttgcagggaatggcccagcctcgccttgcgtcttggacgggtggacctgtggttgccagcctggacctgagtgggcccatcatggtgcccccttttctttaaagatggtcagggaagcctgcttcctcctcctgagcggggttgtgggggcctggtggcacttggtgatcctcactgaggccggggcctgctgcggggaggtccacccacttccgtggagggaatgattttccatgtgcacggagactgcgggtccaagctgcagtagaacccacaagtgggtcacaaaatcaatttagtgggtcaccaccacaaacacagtggactgggacagggcaaagcgcaccctgtgccatcaggctgagtctgaactcttgttacctatcctgtgtccccacccccttggcagccatgtaactaacctcaatgtgggtcgtagtcagaagtttaaaaaagactatgaatgctcttgaatttcattgcttcaggtaatgtttgaaatatgtagtcaggtggccaggggaggtttgctatctggaagttttcatgttagctattgctaaccccacccgcaagggcagcccagcctccaggtgtgggctctcctgtgctctgaattgtgtggctgtcctatgctggggacaagtggtaggagcgctttgtcccagggccaccttctggggccttcacacacatacccccaccacacaaacacacacacacacacacacacacacacacagtctatcatacatgtacatactcacacacaccacacagacacatactgtttggctaagggttaagtatctccaatattttattagccatccatcatggcagtttccagaataggctttctactgtaccagctgagctgccttcttttacttcttcttcttcttctttttttaaacagacagagtctcggcccggcatggtggctcatgcctctcagcctcccaaagtgctgggattataggcgtgagccaccgcgcctggccccgggcctttatttttatttttaaccttttgacaagacacgctttctattagagctgctttttgtctccctggttcgatttcctgatgtagaatcattgtgttgctgatttttcagttgaaaatgtttaaactgcttcctttgagaacaagtttgagttttagtaagctgtaaagctgttttatttgattcactg

SEQ ID NO: 34750 - DNA, 1236 bp, Homo sapiens
  source 1..1236: mol_type = unassigned DNA
ctgaacgtgactgtggcgtgcaggaagtggagcattggcatgaagtggctcctagtggctgcttggcgcacgccagctgccctcctctgactccagtggcacctgggggcctggcctcactgacgggagaacattggcgtgaaggctgctggcgactgggccagcattcattgtgaagaccggagggacacaccctgctgctcatgtctgcagggctctgagaggaggaagcctggggcaggacctgcgccagtggccgctgggcacagcatggagcaccccagcaagatggaattcttccagaagctgggctatgaccgggaggatgtgctccgggtgttgggcaagctgggcgagggcgccctggtcaacgacgtgctgcaggagcttatccgcacgggcagccgcccgggtgccctggagcacccggctgcacccaggctagtgcctcggggctcctgtggggtcccggactctgcccagcgtggcccggggacagccctggaagaggacttcagaaccctggccagttctctgcgacccatagtgattgatggcagcaacgtggcgatgagccatggaaataaagaaaccttctcttgccggggaatcaagctggctgttgactggttcagggacagaggacacacctacatcaaagtttttgttccatcctggaggaaggacccaccaagagctgacacccctatcagagagcagcacgtgctggcggagctggagcggcaggcggtgctggtgtacacgccgtcccgcaaggtgcacggcaagcgcctggtctgctacgacgaccgctacatcgtgaaggtggcctacgagcaggacggcgtcatcgtctccaacgacaactaccgggacctgcagagcgagaaccccgagtggaagtggttcatcgagcagaggctgctcatgttctccttcgtcaacgaccggttcatgccgcctgatgaccccctgggccgccatggaccctccctgagcaacttcctgagcaggaagccgaagcccccagagccatcctggcagcattgtccttatggcaagaaatgcacctatggcatcaagtgcaagttctaccacccggagaggccgcaccacgcgcaactggcggtggccgacgagctccgcgccaagacaggggcccggcctgttctccccgggcgacctcccgcctccgcccggcctgcagctccagccgcggggcgaacaccgccctag

SEQ ID NO: 34751 - DNA, 4194 bp, Homo sapiens
  source 1..4194: mol_type = unassigned DNA
tgagcacaggtttcgcgggtagaaggcgtgcgcaggcgcggacacgggcgcatgcgcgttcactccggcgcgcagtgccggccggggcggggatacgccgtgtgcgcggccgggggcggaacggaggaggaggcggtggtgtcccggctgcggggtaggagtccgcggcagcctccgggtaagccaagcgccgcgcagtgctgagttcccgcacgccgcagagccatggagatcggcaccgagatcagccgcaagatccggagtgccattaaggggaaattacaagaattaggagcttatgttgatgaagaacttcctgattacattatggtgatggtggccaacaagaaaagtcaggaccaaatgacagaggatctgtccctgtttctagggaacaacacaattcgattcaccgtatggcttcatggtgtattagataaacttcgctctgttacaactgaaccctctagtctgaagtcttctgataccaacatctttgatagtaacgtgccttcaaacaagagcaatttcagtcggggagatgagaggaggcatgaagctgcagtgccaccacttgccattcctagcgcgagacctgaaaaaagagattccagagtttctacaagttcgcaggagtcaaaaaccacaaatgtcagacagacttacgatgatggagctgcaacccgactaatgtcaacagtgaaacctttgagggagccagcaccctctgaagatgtgattgatattaagccagaaccagatgatctcattgacgaagacctcaactttgtgcaggagaatcccttatctcagaaaaaacctacagtgacacttacatatggttcttctcgcccttctattgaaatttatcgaccacctgcaagtagaaatgcagatagtggtgttcatttaaacaggttgcaatttcaacagcagcagaatagtattcatgctgccaagcagcttgatatgcagagtagttgggtatatgaaacaggacgtttgtgtgaaccagaggtgcttaacagcttagaagaaacgtatagtccgttctttagaaacaactcggagaaaatgagtatggaggatgaaaactttcggaagagaaagttgcctgtggtaagttcagttgttaaagtaaaaaaattcaatcatgatggagaagaggaggaagaagatgatgattacgggtctcgaacaggaagcatctccagcagtgtgtctgtgcctgcaaagcctgaaaggagaccttctcttccaccttctaaacaagctaacaagaatctgattttgaaggctatatctgaagctcaagaatccgtaacaaaaacaactaactactctacagttccacagaaacagacacttccagttgctcccagaactcgaacttctcaagaagaattgctagcagaagtggtccagggacaaagtaggacccccagaataagtccccccattaaagaagaggaaacaaaaggagattctgtagaaaaaaatcaaggaactcaacagaggcaattattatcccgactgcaaatcgacccagtaatggcagaaactctgcagatgagtcaagattactatgacatggaatccatggtccatgcagacacaagatcatttattctgaagaagccaaagctgtctgaggaagtagtagtggcaccaaaccaagagtcggggatgaagactgcagattcccttcgggtactttcaggacaccttatgcagacacgagatcttgtacaaccagataaacctgcaagtcccaagtttatagtgacgctggatggtgtccccagccccccaggatacatgtcagatcaagaggaggacatgtgctttgaaggaatgaaacccgtaaaccaaactgcagcctcaaacaagggactcagaggtctcctccacccacagcagttgcacttgctgagcaggcagcttgaggacccaaatggtagcttttctaacgctgagatgagtgaactgagtgtggcacagaaaccagaaaaacttttggagcgctgcaagtactggcctgcttgtaaaaatggggatgagtgtgcctaccatcaccccatctcaccctgcaaagccttccccaattgtaaatttgctgaaaaatgtttgtttgttcacccaaattgtaaatatgatgcaaagtgtactaaaccagattgtcccttcactcatgtgagtagaagaattccagtactgtctccaaaaccagcagttgcaccaccagcaccaccttccagtagtcagctctgccgttacttccctgcttgtaagaagatggaatgtcccttctatcatccaaaacattgtaggtttaacactcaatgtacaagaccggactgcacattctaccatcccaccattaatgtcccaccacgacatgccttgaaatggattcgacctcaaaccagcgaatagcacccagtcctgcctggcagaagatcatgcagtttggaagttttcatgtactgatgaaagatactctacagaacttgtcaaatctttgaaacttggaatatattgctttcataatatgaagttttattgcctatctatctgaagtgtctaatttttcaagtttgtaagtttattatgtggttttaacattgggtgtttttgttttgtttttactatgaaaagacagcttaaggaagagctaaattctgttaaaatatttggggcatgtttgtgcactgctgttgtgaggatcagcatatgaaattgacatcatggttagtcatggtactgcagcttagggggctacacggttgctgtgtgagtggagagatgcagtgaggcagttgtcattattctaaaaattgtactactttcacttttcccaaagattatataatgttcataatccaccatgaaaacagcattggccaaaggtactgaggctgcttaaaatattcaattctgctttttaatttttaagtgaatttagtttgaaaagcatgattatacaggcctctcaggctgagtgctactttggtaaagttcccagttttcctgccttctgtgacaggatgaatgaggtgggtatggacagtggaggcagctggaatggcaagtgcagaaaataggaacagttctatacagtgctctcatttactaataacataatgccttctaaataatttttttgggaaactacattatcacaaaattatacaaatttttttacaagtatttacatactgtatctgaaaacagactttaaagtcacaagattataaatgtacatatatattctcacattctgaaaaataacattctcagaatccacagaaaatatacttagttactactgaagataatttttgaaatgtaaaaattagatttaaatagtatattttaaatgacagaactataattacagagatcagatcagataggtaaactgcaagatagataggatgaaacttttggcctactgtattacttacagagtttttttgtgtgtggtttttaaaactgttaaggcaagaagtgtcaaatgctttagagttaaataacagatcactgatttcaaagacttggtgtatagtgttaaaaattaaagcttaaaaggtggttagaaaagtggattaatgcaaaaggggtaataaagactgcaacattctcaggaccaaattaaactgctaaaaaaaaaaaaaaagttcattgacttgcttagtcgtatactcaaatgatgataaacctacatgtgcaaaggctcacgtttaagattgtcaagccagcagtctactgttgtgttgccattgcttttccattgggagaagaaagaattaaccagtcattaaaccatttggtaagttgcactttgctgtgctgatcccacaggaaaggcttgaaacacgagaagcagcaaagacagagcacacaagtgcataaggctgttgtcttcggcttgggtgaaatgacagttcctcttcattctaaaggtttactccattgaatttaaggcatttgttcattccagtgttgagatgctttgcatctctgcagaagaaatttattttaaattgtttaaatatctggaaatacttttagctatcatttataaagatagttttgttctcagtttcactataaattatagaacaaatgggaaacaagggtttaatttagttcagccattttacaaggaaataataaaatactaaaatctga

SEQ ID NO: 34752 - DNA, 2560 bp, Homo sapiens
  source 1..2560: mol_type = unassigned DNA
actccggcgcgcagtgccggccggggcggggatacgccgtgtgcgcggccgggggcggaacggaggaggaggcggtggtgtcccggctgcggggtaggagtccgcggcagcctccgggtaagccaagcgccgcgcagtgctgagttcccgcacgccgcagagccatggagatcggcaccgagatcagccgcaagatccggagtgccattaaggggaaattacaagaattaggagcttatgttgatgaagaacttcctgattacattatggtgatggtggccaacaagaaaagtcaggaccaaatgacagaggatctgtccctgtttctagggaacaacacaattcgattcaccgtatggcttcatggtgtattagataaacttcgctctgttacaactgaaccctctagtctgaagtcttctgataccaacatctttgatagtaacgtgccttcaaacaagagcaatttcagtcggggagatgagaggaggcatgaagctgcagtgccaccacttgccattcctagcgcgagacctgaaaaaagagattccagagtttctacaagttcgcaggagtcaaaaaccacaaatgtcagacagacttacgatgatggagctgcaacccgactaatgtcaacagtgaaacctttgagggagccagcaccctctgaagatgtgattgatattaagccagaaccagatgatctcattgacgaagacctcaactttgtgcaggagaatcccttatctcagaaaaaacctacagtgacacttacatatggttcttctcgcccttctattgaaatttatcgaccacctgcaagtagaaatgcagatagtggtgttcatttaaacaggttgcaatttcaacagcagcagaatagtattcatgctgccaagcagcttgatatgcagagtagttgggtatatgaaacaggacgtttgtgtgaaccagaggtgcttaacagcttagaagaaacgtatagtccgttctttagaaacaactcggagaaaatgagtatggaggatgaaaactttcggaagagaaagttgcctgtggtaagttcagttgttaaagtaaaaaaattcaatcatgatggagaagaggaggaagaagatgatgattacgggtctcgaacaggaagcatctccagcagtgtgtctgtgcctgcaaagcctgaaaggagaccttctcttccaccttctaaacaagctaacaagaatctgattttgaaggctatatctgaagctcaagaatccgtaacaaaaacaactaactactctacagttccacagaaacagacacttccagttgctcccagaactcgaacttctcaagaagaattgctagcagaagtggtccagggacaaagtaggacccccagaataagtccccccattaaagaagaggaaacaaaaggagattctgtagaaaaaaatcaagctgagatgagtgaactgagtgtggcacagaaaccagaaaaacttttggagcgctgcaagtactggcctgcttgtaaaaatggggatgagtgtgcctaccatcaccccatctcaccctgcaaagccttccccaattgtaaatttgctgaaaaatgtttgtttgttcacccaaattgtaaatatgatgcaaagtgtactaaaccagattgtcccttcactcatgtgagtagaagaattccagtactgtctccaaaaccagttgcaccaccagcaccaccttccagtagtcagctctgccgttacttccctgcttgtaagaagatggaatgtcccttctatcatccaaaacattgtaggtttaacactcaatgtacaagaccggactgcacattctaccatcccaccattaatgtcccaccacgacatgccttgaaatggattcgacctcaaaccagcgaatagcacccagtcctgcctggcagaagatcatgcagtttggaagttttcatgtactgatgaaagatactctacagaacttgtcaaatctttgaaacttggaatatattgctttcataatatgaagttttattgcctatctatctgaagtgtctaatttttcaagtttgtaagtttattatgtggttttaacattgggtgtttttgttttgtttttactatgaaaagacagcttaaggaagagctaaattctgttaaaatatttggggcatgtttgtgcactgctgttgtgaggatcagcatatgaaattgacatcatggttagtcatggtactgcagcttagggggctacacggttgctgtgtgagtggagagatgcagtgaggcagttgtcattattctaaaaattgtactactttcacttttcccaaagattatataatgttcataatccaccatgaaaacagcattggccaaaggtactgaggctgcttaaaatattcaattctgctttttaatttttaagtgaatttagtttgaaaagcatgattatacaggcctctcaggctgagtgctactttggtaaagttcccagttttcctgccttctgtgacaggatgaatgaggtgggtatggacagtggaggcagctggaatggcaag

SEQ ID NO: 34753 - DNA, 1384 bp, Homo sapiens
  source 1..1384: mol_type = unassigned DNA
gggtttactggaagaggagctatacagatggtacttagaggatgtagggccctacgtattagggcttcttagttgtagcgaagagcaattggtctggtacgtttagctttttcacatttagttttgaattctgactctagaaatgtacaaccccatcttttgaattacaggttttaagatgttatttgctcttaatacgtcttaaggtaacagccttgatcactgcttttactttcgatgaaataacttaatgagctgtgaagaaaaaattatcagattttaagggagagaattttatgaaaatgtctttgaggttcctgtcacctttatgagaatgtcttcaaagtttccatcaccacctctaccaatttttcttccaccggagccagtggacttaggttccataacaagctcctcttgttcactgaatgagctagacaatatttcccaccttttaaggaaaatatcagctgatatcaatgaaattaaaggaatgaaagcagctattttgacagtggaagcaaatctttttgatctaaatgttagagtgtccaagaatgaagcaaaaatttcatctttggaggttaaaatgaatgaatattcaacaacatatgaatgcaacagacagtttgaagatcaagaagaagatactgaatcacagtcaagaactactgatgtaaaaataatcggcttccttagaaacgttgagaaaggaactcaacagaggcaattattatcccgactgcaaatcgacccagtaatggcagaaactctgcagatgagtcaagctgagatgagtgaactgagtgtggcacagaaaccagaaaaacttttggagcgctgcaagtactggcctgcttgtaaaaatggggatgagtgtgcctaccatcaccccatctcaccctgcaaagccttccccaattgtaaatttgctgaaaaatgtttgtttgttcacccaaattgtaaatatgatgcaaagtgtactaaaccagattgtcccttcactcatgtgagtagaagaattccagtactgtctccaaaaccagttgcaccaccagcaccaccttccagtagtcagctctgccgttacttccctgcttgtaagaagatggaatgtcccttctatcatccaaaacattgtaggtttaacactcaatgtacaagaccggactgcacattctaccatcccaccattaatgtcccaccacgacatgccttgaaatggattcgacctcaaaccagcgaatagcacccagtcctgcctggcagaagatcatgcagtttggaagttttcatgtactgatgaaagatactctacagaacttgtcaaatctttgaaacttggaatatattgctttcataatatgaagttttattgcctatc

SEQ ID NO: 34754 - DNA, 2007 bp, Homo sapiens
  source 1..2007: mol_type = unassigned DNA
cggagcgtggctgcggctgaagtagccgccgggaaatggaaggacaggcgcaggcccggctggagccaccaccgcggcgcacggcgccgctttggatccgctgcgggagagtgccattaaggggaaattacaagaattaggagcttatgttgatgaagaacttcctgattacattatggtgatggtggccaacaagaaaagtcaggaccaaatgacagaggatctgtccctgtttctagggaacaacacaattcgattcaccgtatggcttcatggtgtattagataaacttcgctctgttacaactgaaccctctagtctgaagtcttctgataccaacatctttgatagtaacgtgccttcaaacaagagcaatttcagtcggggagatgagaggaggcatgaagctgcagtgccaccacttgccattcctagcgcgagacctgaaaaaagagattccagagtttctacaagttcgcaggagtcaaaaaccacaaatgtcagacagacttacgatgatggagctgcaacccgactaatgtcaacagtgaaacctttgagggagccagcaccctctgaagatgtgattgatattaagccagaaccagatgatctcattgacgaagacctcaactttgtgcaggagaatcccttatctcagaaaaaacctacagtgacacttacatatggttcttctcgcccttctattgaaatttatcgaccacctgcaagtagaaatgcagatagtggtgttcatttaaacaggttgcaatttcaacagcagcagaatagtattcatgctgccaagcagcttgatatgcagagtagttgggtatatgaaacaggacgtttgtgtgaaccagaggtgcttaacagcttagaagaaacgtatagtccgttctttagaaacaactcggagaaaatgagtatggaggatgaaaactttcggaagagaaagttgcctgtggtaagttcagttgttaaagtaaaaaaattcaatcatgatggagaagaggaggaagaagatgatgattacgggtctcgaacaggaagcatctccagcagtgtgtctgtgcctgcaaagcctgaaaggagaccttctcttccaccttctaaacaagctaacaagaatctgattttgaaggctatatctgaagctcaagaatccgtaacaaaaacaactaactactctacagttccacagaaacagacacttccagttgctcccagaactcgaacttctcaagaagaattgctagcagaagtggtccagggacaaagtaggacccccagaataagtccccccattaaagaagaggaaacaaaaggagattctgtagaaaaaaatcaaggaactcaacagaggcaattattatcccgactgcaaatcgacccagtaatggcagaaactctgcagatgagtcaagctgagatgagtgaactgagtgtggcacagaaaccagaaaaacttttggagcgctgcaagtactggcctgcttgtaaaaatggggatgagtgtgcctaccatcaccccatctcaccctgcaaagccttccccaattgtaaatttgctgaaaaatgtttgtttgttcacccaaattgtaaatatgatgcaaagtgtactaaaccagattgtcccttcactcatgtgagtagaagaattccagtactgtctccaaaaccagcagttgcaccaccagcaccaccttccagtagtcagctctgccgttacttccctgcttgtaagaagatggaatgtcccttctatcatccaaaacattgtaggtttaacactcaatgtacaagaccggactgcacattctaccatcccaccattaatgtcccaccacgacatgccttgaaatggattcgacctcaaaccagcgaatagcacccagtcctgcctggcagaagatcatgcagtttggaagttttcatgtactgatgaaagatactctacagaacttgtcaaatctttgaaacttggaatatattgctttcataata

SEQ ID NO: 34755 - DNA, 4004 bp, Homo sapiens
  source 1..4004: mol_type = unassigned DNA
tgagcacaggtttcgcgggtagaaggcgtgcgcaggcgcggacacgggcgcatgcgcgttcactccggcgcgcagtgccggccggggcggggatacgccgtgtgcgcggccgggggcggaacggaggaggaggcggtggtgtcccggctgcggggtaggagtccgcggcagcctccgggtaagccaagcgccgcgcagtgctgagttcccgcacgccgcagagccatggagatcggcaccgagatcagccgcaagatccggagtgccattaaggggaaattacaagaattaggagcttatatagatgaagaacttcctgattacattatggtgatggtggccaacaagaaaagtcaggaccaaatgacagaggatctgtccctgtttctagggaacaacacaattcgattcaccgtatggcttcatggtgtattagataaacttcgctctgttacaactgaaccctctagtctgaagtcttctgataccaacatctttgatagtaacgtgccttcaaacaagagcaatttcagtcggggagatgagaggaggcatgaagctgcagtgccaccacttgccattcctagcgcgagacctgaaaaaagagattccagagtttctacaagttcgcaggagtcaaaaaccacaaatgtcagacagacttacgatgatggagctgcaacccgactaatgtcaacagtgaaacctttgagggagccagcaccctctgaagatgtgattgatattaagccagaaccagatgatctcattgacgaagacctcaactttgtgcaggagaatcccttatctcagaaaaaacctacagtgacacttacatatggttcttctcgcccttctattgaaatttatcgaccacctgcaagtagaaatgcagatagtggtgttcatttaaacaggttgcaatttcaacagcagcagaatagtattcatgctgccaagcagcttgatatgcagagtagttgggtatatgaaacaggacgtttgtgtgaaccagaggtgcttaacagcttagaagaaacgtatagtccgttctttagaaacaactcggagaaaatgagtatggaggatgaaaactttcggaagagaaagttgcctgtggtaagttcagttgttaaagtaaaaaaattcaatcatgatggagaagaggaggaagaagatgatgattacgggtctcgaacaggaagcatctccagcagtgtgtctgtgcctgcaaagcctgaaaggagaccttctcttccaccttctaaacaagctaacaagaatctgattttgaaggctatatctgaagctcaagaatccgtaacaaaaacaactaactactctacagttccacagaaacagacacttccagttgctcccagaactcgaacttctcaagaagaattgctagcagaagtggtccagggacaaagtaggacccccagaataagtccccccattaaagaagaggaaacaaaaggagattctgtagaaaaaaatcaaggaactcaacagaggcaattattatcccgactgcaaatcgacccagtaatggcagaaactctgcagatgagtcaagattactatgacatggaatccatggtccatgcagacacaagatcatttattctgaagaagccaaagctgtctgaggaagtagtagtggcaccaaaccaagagtcggggatgaagactgcagattcccttcgggtactttcaggacaccttatgcagacacgagatcttgtacaaccagataaacctgcaagtcccaagtttatagtgacgctggatggtgtccccagccccccaggatacatgtcagatcaagaggaggacatgtgctttgaaggaatgaaacccgtaaaccaaactgcagcctcaaacaagggactcagaggtctcctccacccacagcagttgcacttgctgagcaggcagcttgaggacccaaattgtaaatatgatgcaaagtgtactaaaccagattgtcccttcactcatgtgagtagaagaattccagtactgtctccaaaaccagcagttgcaccaccagcaccaccttccagtagtcagctctgccgttacttccctgcttgtaagaagatggaatgtcccttctatcatccaaaacattgtaggtttaacactcaatgtacaagaccggactgcacattctaccatcccaccattaatgtcccaccacgacatgccttgaaatggattcgacctcaaaccagcgaatagcacccagtcctgcctggcagaagatcatgcagtttggaagttttcatgtactgatgaaagatactctacagaacttgtcaaatctttgaaacttggaatatattgctttcataatatgaagttttattgcctatctatctgaagtgtctaatttttcaagtttgtaagtttattatgtggttttaacattgggtgtttttgttttgtttttactatgaaaagacagcttaaggaagagctaaattctgttaaaatatttggggcatgtttgtgcactgctgttgtgaggatcagcatatgaaattgacatcatggttagtcatggtactgcagcttagggggctacacggttgctgtgtgagtggagagatgcagtgaggcagttgtcattattctaaaaattgtactactttcacttttcccaaagattatataatgttcataatccaccatgaaaacagcattggccaaaggtactgaggctgcttaaaatattcaattctgctttttaatttttaagtgaatttagtttgaaaagcatgattatacaggcctctcaggctgagtgctactttggtaaagttcccagttttcctgccttctgtgacaggatgaatgaggtgggtatggacagtggaggcagctggaatggcaagtgcagaaaataggaacagttctatacagtgctctcatttactaataacataatgccttctaaataatttttttgggaaactacattatcacaaaattatacaaatttttttacaagtatttacatactgtatctgaaaacagactttaaagtcacaagattataaatgtacatatatattctcacattctgaaaaataacattctcagaatccacagaaaatatacttagttactactgaagataatttttgaaatgtaaaaattagatttaaatagtatattttaaatgacagaactataattacagagatcagatcagataggtaaactgcaagatagataggatgaaacttttggcctactgtattacttacagagtttttttgtgtgtggtttttaaaactgttaaggcaagaagtgtcaaatgctttagagttaaataacagatcactgatttcaaagacttggtgtatagtgttaaaaattaaagcttaaaaggtggttagaaaagtggattaatgcaaaaggggtaataaagactgcaacattctcaggaccaaattaaactgctaaaaaaaaaaaaaaagttcattgacttgcttagtcgtatactcaaatgatgataaacctacatgtgcaaaggctcacgtttaagattgtcaagccagcagtctactgttgtgttgccattgcttttccattgggagaagaaagaattaaccagtcattaaaccatttggtaagttgcactttgctgtgctgatcccacaggaaaggcttgaaacacgagaagcagcaaagacagagcacacaagtgcataaggctgttgtcttcggcttgggtgaaatgacagttcctcttcattctaaaggtttactccattgaatttaaggcatttgttcattccagtgttgagatgctttgcatctctgcagaagaaatttattttaaattgtttaaatatctggaaatacttttagctatcatttataaagatagttttgttctcagtttcactataaattatagaacaaatgggaaacaagggtttaatttagttcagccattttacaaggaaataataaaatactaaaatctg

SEQ ID NO: 34756 - DNA, 3800 bp, Homo sapiens
  source 1..3800: mol_type = unassigned DNA
tgagcacaggtttcgcgggtagaaggcgtgcgcaggcgcggacacgggcgcatgcgcgttcactccggcgcgcagtgccggccggggcggggatacgccgtgtgcgcggccgggggcggaacggaggaggaggcggtggtgtcccggctgcggggtaggagtccgcggcagcctccgggtaagccaagcgccgcgcagtgctgagttcccgcacgccgcagagccatggagatcggcaccgagatcagccgcaagatccggagtgccattaaggggaaattacaagaattaggagcttatgttgatgaagaacttcctgattacattatggtgatggtggccaacaagaaaagtcaggaccaaatgacagaggatctgtccctgtttctagggaacaacacaattcgattcaccgtatggcttcatggtgtattagataaacttcgctctgttacaactgaaccctctagtctgaagtcttctgataccaacatctttgatagtaacgtgccttcaaacaagagcaatttcagtcggggagatgagaggaggcatgaagctgcagtgccaccacttgccattcctagcgcgagacctgaaaaaagagattccagagtttctacaagttcgcaggagtcaaaaaccacaaatgtcagacagacttacgatgatggagctgcaacccgactaatgtcaacagtgaaacctttgagggagccagcaccctctgaagatgtgattgatattaagccagaaccagatgatctcattgacgaagacctcaactttgtgcaggagaatcccttatctcagaaaaaacctacagtgacacttacatatggttcttctcgcccttctattgaaatttatcgaccacctgcaagtagaaatgcagatagtggtgttcatttaaacaggttgcaatttcaacagcagcagaatagtattcatgctgccaagcagcttgatatgcagagtagttgggtatatgaaacaggacgtttgtgtgaaccagaggtgcttaacagcttagaagaaacgtatagtccgttctttagaaacaactcggagaaaatgagtatggaggatgaaaactttcggaagagaaagttgcctgtggtaagttcagttgttaaagtaaaaaaattcaatcatgatggagaagaggaggaagaagatgatgattacgggtctcgaacaggaagcatctccagcagtgtgtctgtgcctgcaaagcctgaaaggagaccttctcttccaccttctaaacaagctaacaagaatctgattttgaaggctatatctgaagctcaagaatccgtaacaaaaacaactaactactctacagttccacagaaacagacacttccagttgctcccagaactcgaacttctcaagaagaattgctagcagaagtggtccagggacaaagtaggacccccagaataagtccccccattaaagaagaggaaacaaaaggagattctgtagaaaaaaatcaaggaactcaacagaggcaattattatcccgactgcaaatcgacccagtaatggcagaaactctgcagatgagtcaagctgagatgagtgaactgagtgtggcacagaaaccagaaaaacttttggagcgctgcaagtactggcctgcttgtaaaaatggggatgagtgtgcctaccatcaccccatctcaccctgcaaagccttccccaattgtaaatttgctgaaaaatgtttgtttgttcacccaaattgtaaatatgatgcaaagtgtactaaaccagattgtcccttcactcatgtgagtagaagaattccagtactgtctccaaaaccagcagttgcaccaccagcaccaccttccagtagtcagctctgccgttacttccctgcttgtaagaagatggaatgtcccttctatcatccaaaacattgtaggtttaacactcaatgtacaagaccggactgcacattctaccatcccaccattaatgtcccaccacgacatgccttgaaatggattcgacctcaaaccagcgaatagcacccagtcctgcctggcagaagatcatgcagtttggaagttttcatgtactgatgaaagatactctacagaacttgtcaaatctttgaaacttggaatatattgctttcataatatgaagttttattgcctatctatctgaagtgtctaatttttcaagtttgtaagtttattatgtggttttaacattgggtgtttttgttttgtttttactatgaaaagacagcttaaggaagagctaaattctgttaaaatatttggggcatgtttgtgcactgctgttgtgaggatcagcatatgaaattgacatcatggttagtcatggtactgcagcttagggggctacacggttgctgtgtgagtggagagatgcagtgaggcagttgtcattattctaaaaattgtactactttcacttttcccaaagattatataatgttcataatccaccatgaaaacagcattggccaaaggtactgaggctgcttaaaatattcaattctgctttttaatttttaagtgaatttagtttgaaaagcatgattatacaggcctctcaggctgagtgctactttggtaaagttcccagttttcctgccttctgtgacaggatgaatgaggtgggtatggacagtggaggcagctggaatggcaagtgcagaaaataggaacagttctatacagtgctctcatttactaataacataatgccttctaaataatttttttgggaaactacattatcacaaaattatacaaatttttttacaagtatttacatactgtatctgaaaacagactttaaagtcacaagattataaatgtacatatatattctcacattctgaaaaataacattctcagaatccacagaaaatatacttagttactactgaagataatttttgaaatgtaaaaattagatttaaatagtatattttaaatgacagaactataattacagagatcagatcagataggtaaactgcaagatagataggatgaaacttttggcctactgtattacttacagagtttttttgtgtgtggtttttaaaactgttaaggcaagaagtgtcaaatgctttagagttaaataacagatcactgatttcaaagacttggtgtatagtgttaaaaattaaagcttaaaaggtggttagaaaagtggattaatgcaaaaggggtaataaagactgcaacattctcaggaccaaattaaactgctaaaaaaaaaaaaaaagttcattgacttgcttagtcgtatactcaaatgatgataaacctacatgtgcaaaggctcacgtttaagattgtcaagccagcagtctactgttgtgttgccattgcttttccattgggagaagaaagaattaaccagtcattaaaccatttggtaagttgcactttgctgtgctgatcccacaggaaaggcttgaaacacgagaagcagcaaagacagagcacacaagtgcataaggctgttgtcttcggcttgggtgaaatgacagttcctcttcattctaaaggtttactccattgaatttaaggcatttgttcattccagtgttgagatgctttgcatctctgcagaagaaatttattttaaattgtttaaatatctggaaatacttttagctatcatttataaagatagttttgttctcagtttcactataaattatagaacaaatgggaaacaagggtttaatttagttcagccattttacaaggaaataataaaatactaaaatctg

SEQ ID NO: 34757 - DNA, 1899 bp, Homo sapiens
  source 1..1899: mol_type = unassigned DNA
gtgtgcgcggccgggggcggaacggaggaggaggcggtggtgtcccggctgcggggtaggagtccgcggcagcctccgggtaagccaagcgccgcgcagtgctgagttcccgcacgccgcagagccatggagatcggcaccgagatcagccgcaagatccggagtgccattaaggggaaattacaagaattaggagcttatgttgatgaagaacttcctgattacattatggtgatggtggccaacaagaaaagtcaggaccaaatgacagaggatctgtccctgtttctagggaacaacacaattcgattcaccgtatggcttcatggtgtattagataaacttcgctctgttacaactgaaccctctagtctgaagtcttctgataccaacatctttgatagtaacgtgccaccacttgccattcctagcgcgagacctgaaaaaagagattccagagtttctacaagttcgcaggagtcaaaaaccacaaatgtcagacagacttacgatgatggagctgcaacccgactaatgtcaacagtgaaacctttgagggagccagcaccctctgaagatgtgattgatattaagccagaaccagatgatctcattgacgaagacctcaactttgtgcaggagaatcccttatctcagaaaaaacctacagtgacacttacatatggttcttctcgcccttctattgaaatttatcgaccacctgcaagtagaaatgcagatagtggtgttcatttaaacaggttgcaatttcaacagcagcagaatagtattcatgctgccaagcagcttgatatgcagagtagttgggtatatgaaacaggacgtttgtgtgaaccagaggtgcttaacagcttagaagaaacgtatagtccgttctttagaaacaactcggagaaaatgagtatggaggatgaaaactttcggaagagaaagttgcctgtggtaagttcagttgttaaagtaaaaaaattcaatcatgatggagaagaggaggaagaagatgatgattacgggtctcgaacaggaagcatctccagcagtgtgtctgtgcctgcaaagcctgaaaggagaccttctcttccaccttctaaacaagctaacaagaatctgattttgaaggctatatctgaagctcaagaatccgtaacaaaaacaactaactactctacagttccacagaaacagacacttccagttgctcccagaactcgaacttctcaagaagaattgctagcagaagtggtccagggacaaagtaggacccccagaataagtccccccattaaagaagaggaaacaaaaggagattctgtagaaaaaaatcaaggaactcaacagaggcaattattatcccgactgcaaatcgacccagtaatggcagaaactctgcagatgagtcaagctgagatgagtgaactgagtgtggcacagaaaccagaaaaacttttggagcgctgcaagtactggcctgcttgtaaaaatggggatgagtgtgcctaccatcaccccatctcaccctgcaaagccttccccaattgtaaatttgctgaaaaatgtttgtttgttcacccaaattgtaaatatgatgcaaagtgtactaaaccagattgtcccttcactcatgtgagtagaagaattccagtactgtctccaaaaccagttgcaccaccagcaccaccttccagtagtcagctctgccgttacttccctgcttgtaagaagatggaatgtcccttctatcatccaaaacattgtaggtttaacactcaatgtacaagaccggactgcacattctaccatcccaccattaatgtcccaccacgacatgccttgaaatggattcgacctcaaaccagcgaatagcacccagtcctgcct

SEQ ID NO: 34758 - DNA, 2195 bp, Homo sapiens
  source 1..2195: mol_type = unassigned DNA
atggagatcggcaccgagatcagccgcaagatccggagtgccattaaggggaaattacaagaattaggagcttatgttgatgaagaacttcctgattacattatggtgatggtggccaacaagaaaagtcaggaccaaatgacagaggatctgtccctgtttctagggaacaacacaattcgattcaccgtatggcttcatggtgtattagataaacttcgctctgttacaactgaaccctctagtctgaagtcttctgataccaacatctttgatagtaacgtgccttcaaacaagagcaatttcagtcggggagatgagaggaggcatgaagctgcagtgccaccacttgccattcctagcgcgagacctgaaaaaagagattccagagtttctacaagttcgcaggagtcaaaaaccacaaatgtcagacagacttacgatgatggagctgcaacccgactaatgtcaacagtgaaacctttgagggagccagcaccctctgaagatgtgattgatattaagccagaaccagatgatctcattgacgaagacctcaactttgtgcaggagaatcccttatctcagaaaaaacctacagtgacacttacatatggttcttctcgcccttctattgaaatttatcgaccacctgcaagtagaaatgcagatagtggtgttcatttaaacaggttgcaatttcaacagcagcagaatagtattcatgctgccaagcagcttgatatgcagagtagttgggtatatgaaacaggacgtttgtgtgaaccagaggtgcttaacagcttagaagaaacgtatagtccgttctttagaaacaactcggagaaaatgagtatggaggatgaaaactttcggaagagaaagttgcctgtggtaagttcagttgttaaagtaaaaaaattcaatcatgatggagaagaggaggaagaagatgatgattacgggtctcgaacaggaagcatctccagcagtgtgtctgtgcctgcaaagcctgaaaggagaccttctcttccaccttctaaacaagctaacaagaatctgattttgaaggctatatctgaagctcaagaatccgtaacaaaaacaactaactactctacagttccacagaaacagacacttccagttgctcccagaactcgaacttctcaagaagaattgctagcagaagtggtccagggacaaagtaggacccccagaataagtccccccattaaagaagaggaaacaaaaggagattctgtagaaaaaaatcaagattactatgacatggaatccatggtccatgcagacacaagatcatttattctgaagaagccaaagctgtctgaggaagtagtagtggcaccaaaccaagagtcggggatgaagactgcagattcccttcgggtactttcaggacaccttatgcagacacgagatcttgtacaaccagataaacctgcaagtcccaagtttatagtgacgctggatggtgtccccagccccccaggatacatgtcagatcaagaggaggacatgtgctttgaaggaatgaaacccgtaaaccaaactgcagcctcaaacaagggactcagaggtctcctccacccacagcagttgcacttgctgagcaggcagcttgaggacccaaatggtagcttttctaacgctgagatgagtgaactgagtgtggcacagaaaccagaaaaacttttggagcgctgcaagtactggcctgcttgtaaaaatggggatgagtgtgcctaccatcaccccatctcaccctgcaaagccttccccaattgtaaatttgctgaaaaatgtttgtttgttcacccaaattgtaaatatgatgcaaagtgtactaaaccagattgtcccttcactcatgtgagtagaagaattccagtactgtctccaaaaccagcagttgcaccaccagcaccaccttccagtagtcagctctgccgttacttccctgcttgtaagaagatggaatgtcccttctatcatccaaaacattgtaggtttaacactcaatgtacaagaccggactgcacattctaccatcccaccattaatgtcccaccacgacatgccttgaaatggattcgacctcaaaccagcgaatagcacccagtcctgcctggcagaagatcatgcagtttggaagttttcatgtactgatgaaa

SEQ ID NO: 34759 - DNA, 4118 bp, Homo sapiens
  source 1..4118: mol_type = unassigned DNA
tgagcacaggtttcgcgggtagaaggcgtgcgcaggcgcggacacgggcgcatgcgcgttcactccggcgcgcagtgccggccggggcggggatacgccgtgtgcgcggccgggggcggaacggaggaggaggcggtggtgtcccggctgcggggtaggagtccgcggcagcctccgggtaagccaagcgccgcgcagtgctgagttcccgcacgccgcagagccatggagatcggcaccgagatcagccgcaagatccggagtgccattaaggggaaattacaagaattaggagcttatatagatgaagaacttcctgattacattatggtgatggtggccaacaagaaaagtcaggaccaaatgacagaggatctgtccctgtttctagggaacaacacaattcgattcaccgtatggcttcatggtgtattagataaacttcgctctgttacaactgaaccctctagtctgaagtcttctgataccaacatctttgatagtaacgtgccttcaaacaagagcaatttcagtcggggagatgagaggaggcatgaagctgcagtgccaccacttgccattcctagcgcgagacctgaaaaaagagattccagagtttctacaagttcgcaggagtcaaaaaccacaaatgtcagacagacttacgatgatggagctgcaacccgactaatgtcaacagtgaaacctttgagggagccagcaccctctgaagatgtgattgatattaagccagaaccagatgatctcattgacgaagacctcaactttgtgcaggagaatcccttatctcagaaaaaacctacagtgacacttacatatggttcttctcgcccttctattgaaatttatcgaccacctgcaagtagaaatgcagatagtggtgttcatttaaacaggttgcaatttcaacagcagcagaatagtattcatgctgccaagcagcttgatatgcagagtagttgggtatatgaaacaggacgtttgtgtgaaccagaggtgcttaacagcttagaagaaacgtatagtccgttctttagaaacaactcggagaaaatgagtatggaggatgaaaactttcggaagagaaagttgcctgtggtaagttcagttgttaaagtaaaaaaattcaatcatgatggagaagaggaggaagaagatgatgattacgggtctcgaacaggaagcatctccagcagtgtgtctgtgcctgcaaagcctgaaaggagaccttctcttccaccttctaaacaagctaacaagaatctgattttgaaggctatatctgaagctcaagaatccgtaacaaaaacaactaactactctacagttccacagaaacagacacttccagttgctcccagaactcgaacttctcaagaagaattgctagcagaagtggtccagggacaaagtaggacccccagaataagtccccccattaaagaagaggaaacaaaaggagattctgtagaaaaaaatcaagattactatgacatggaatccatggtccatgcagacacaagatcatttattctgaagaagccaaagctgtctgaggaagtagtagtggcaccaaaccaagagtcggggatgaagactgcagattcccttcgggtactttcaggacaccttatgcagacacgagatcttgtacaaccagataaacctgcaagtcccaagtttatagtgacgctggatggtgtccccagccccccaggatacatgtcagatcaagaggaggacatgtgctttgaaggaatgaaacccgtaaaccaaactgcagcctcaaacaagggactcagaggtctcctccacccacagcagttgcacttgctgagcaggcagcttgaggacccaaatggtagcttttctaacgctgagatgagtgaactgagtgtggcacagaaaccagaaaaacttttggagcgctgcaagtactggcctgcttgtaaaaatggggatgagtgtgcctaccatcaccccatctcaccctgcaaagccttccccaattgtaaatttgctgaaaaatgtttgtttgttcacccaaattgtaaatatgatgcaaagtgtactaaaccagattgtcccttcactcatgtgagtagaagaattccagtactgtctccaaaaccagcagttgcaccaccagcaccaccttccagtagtcagctctgccgttacttccctgcttgtaagaagatggaatgtcccttctatcatccaaaacattgtaggtttaacactcaatgtacaagaccggactgcacattctaccatcccaccattaatgtcccaccacgacatgccttgaaatggattcgacctcaaaccagcgaatagcacccagtcctgcctggcagaagatcatgcagtttggaagttttcatgtactgatgaaagatactctacagaacttgtcaaatctttgaaacttggaatatattgctttcataatatgaagttttattgcctatctatctgaagtgtctaatttttcaagtttgtaagtttattatgtggttttaacattgggtgtttttgttttgtttttactatgaaaagacagcttaaggaagagctaaattctgttaaaatatttggggcatgtttgtgcactgctgttgtgaggatcagcatatgaaattgacatcatggttagtcatggtactgcagcttagggggctacacggttgctgtgtgagtggagagatgcagtgaggcagttgtcattattctaaaaattgtactactttcacttttcccaaagattatataatgttcataatccaccatgaaaacagcattggccaaaggtactgaggctgcttaaaatattcaattctgctttttaatttttaagtgaatttagtttgaaaagcatgattatacaggcctctcaggctgagtgctactttggtaaagttcccagttttcctgccttctgtgacaggatgaatgaggtgggtatggacagtggaggcagctggaatggcaagtgcagaaaataggaacagttctatacagtgctctcatttactaataacataatgccttctaaataatttttttgggaaactacattatcacaaaattatacaaatttttttacaagtatttacatactgtatctgaaaacagactttaaagtcacaagattataaatgtacatatatattctcacattctgaaaaataacattctcagaatccacagaaaatatacttagttactactgaagataatttttgaaatgtaaaaattagatttaaatagtatattttaaatgacagaactataattacagagatcagatcagataggtaaactgcaagatagataggatgaaacttttggcctactgtattacttacagagtttttttgtgtgtggtttttaaaactgttaaggcaagaagtgtcaaatgctttagagttaaataacagatcactgatttcaaagacttggtgtatagtgttaaaaattaaagcttaaaaggtggttagaaaagtggattaatgcaaaaggggtaataaagactgcaacattctcaggaccaaattaaactgctaaaaaaaaaaaaaaagttcattgacttgcttagtcgtatactcaaatgatgataaacctacatgtgcaaaggctcacgtttaagattgtcaagccagcagtctactgttgtgttgccattgcttttccattgggagaagaaagaattaaccagtcattaaaccatttggtaagttgcactttgctgtgctgatcccacaggaaaggcttgaaacacgagaagcagcaaagacagagcacacaagtgcataaggctgttgtcttcggcttgggtgaaatgacagttcctcttcattctaaaggtttactccattgaatttaaggcatttgttcattccagtgttgagatgctttgcatctctgcagaagaaatttattttaaattgtttaaatatctggaaatacttttagctatcatttataaagatagttttgttctcagtttcactataaattatagaacaaatgggaaacaagggtttaatttagttcagccattttacaaggaaataataaaatactaaaatctg

SEQ ID NO: 34760 - DNA, 1341 bp, Homo sapiens
  source 1..1341: mol_type = unassigned DNA
agaggatgtagggccctacgtattagggcttcttagttgtagcgaagagcaattggtctggtacgtttagctttttcacatttagttttgaattctgactctagaaatgtacaaccccatcttttgaattacaggttttaagatgttatttgctcttaatacgtcttaaggtaacagccttgatcactgcttttactttcgatgaaataacttaatgagctgtgaagaaaaaattatcagattttaagggagagaattttatgaaaatgtctttgaggttcctgtcacctttatgagaatgtcttcaaagtttccatcaccacctctaccaatttttcttccaccggagccagtggacttaggttccataacaagctcctcttgttcactgaatgagctagacaatatttcccaccttttaaggaaaatatcagctgatatcaatgaaattaaaggaatgaaagcagctattttgacagtggaagcaaatctttttgatctaaatgttagagtgtccaagaatgaagcaaaaatttcatctttggaggttaaaatgaatgaatattcaacaacatatgaatgcaacagacagtttgaagatcaagaagaagatactgaatcacagtcaagaactactgatgtaaaaataatcggcttccttagaaacgttgagaaagctgagatgagtgaactgagtgtggcacagaaaccagaaaaacttttggagcgctgcaagtactggcctgcttgtaaaaatggggatgagtgtgcctaccatcaccccatctcaccctgcaaagccttccccaattgtaaatttgctgaaaaatgtttgtttgttcacccaaattgtaaatatgatgcaaagtgtactaaaccagattgtcccttcactcatgtgagtagaagaattccagtactgtctccaaaaccagcagttgcaccaccagcaccaccttccagtagtcagctctgccgttacttccctgcttgtaagaagatggaatgtcccttctatcatccaaaacattgtaggtttaacactcaatgtacaagaccggactgcacattctaccatcccaccattaatgtcccaccacgacatgccttgaaatggattcgacctcaaaccagcgaatagcacccagtcctgcctggcagaagatcatgcagtttggaagttttcatgtactgatgaaagatactctacagaacttgtcaaatctttgaaacttggaatatattgctttcataatatgaagttttattgcctatctatctgaagtgtctaatttttcaagtttgtaagtttattatgtggttttaacattgggtgttttt

SEQ ID NO: 34761 - DNA, 652 bp, Homo sapiens
  source 1..652: mol_type = unassigned DNA
agtgccggccggggcggggatacgccgtgtgcgcggccgggggcggaacggaggaggaggcggtggtgtcccggctgcggggtaggagtccgcggcagcctccgggtaagccaagcgccgcgcagtgctgagttcccgcacgccgcagagccatggagatcggcaccgagatcagccgcaagatccggagtgccattaaggggaaattacaagaattaggagcttatgttgtatttgaaatacctgtggaatgaagagaaaaaaattaaagctaagccatcttgtccaatgtaattccagtagagctctgcgactctaaagcttagagctacatctatattttcaagcacatcaactttaagaagaaagttttgaggaaacaaagttttgatctacctttccttttaaatagatgaagaacttcctgattacattatggtgatggtggccaacaagaaaagtcaggaccaaatgacagaggatctgtccctgtttctagggaacaacacaattcgattcaccgtatggcttcatggtgtattagataaacttcgctctgttacaactgaaccctctagtctgaagtcttctgataccaacatctttgatagtaacgtgccttcaaacaagagcaatttcagtcggggagatg

SEQ ID NO: 34762 - DNA, 580 bp, Homo sapiens
  source 1..580: mol_type = unassigned DNA
ttttcctagagccgcctttctcacatgcacgtttgctctttttctctcagagtgccattaaggggaaattacaagaattaggagcttatgttgtatttgaaatacctgtggaatgaagagaaaaaaattaaagctaagccatcttgtccaatgtaattccagtagagctctgcgactctaaagcttagagctacatctatattttcaagcacatcaactttaagaagaaagttttgaggaaacaaagttttgatctacctttccttttaaatagatgaagaacttcctgattacattatggtgatggtggccaacaagaaaagtcaggaccaaatgacagaggatctgtccctgtttctagggaacaacacaattcgattcaccgtatggcttcatggtgtattagataaacttcgctctgttacaactgaaccctctagtctgaagtcttctgataccaacatctttgatagtaacgtgccttcaaacaagagcaatttcagtcggggagatgagaggaggcatgaagctgcagtgccaccacttgccattcctagcgcgagacctgaaaaaagagatt

SEQ ID NO: 34763 - DNA, 813 bp, Homo sapiens
  source 1..813: mol_type = unassigned DNA
ggaacggaggaggaggcggtggtgtcccggctgcggggtaggagtccgcggcagcctccgggtaagccaagcgccgcgcagtgctgagttcccgcacgccgcagagccatggagatcggcaccgagatcagccgcaagatccggatgaagaacttcctgattacattatggtgatggtggccaacaagaaaagtcaggaccaaatgacagaggatctgtccctgtttctagggaacaacacaattcgattcaccgtatggcttcatggtgtattagataaacttcgctctgttacaactgaaccctctagtctgaagtcttctgataccaacatctttgatagtaacgtgccttcaaacaagagcaatttcagtcggggagatgagaggaggcatgaagctgcagtgccaccacttgccattcctagcgcgagacctgaaaaaagagattccagagtttctacaagttcgcaggagtcaaaaaccacaaatgtcagacagacttacgatgatggagctgcaacccgactaatgtcaacagtgaaacctttgagggagccagcaccctctgaagatgtgattgatattaagccagaaccagatgatctcattgacgaagacctcaactttgtgcaggagaatcccttatctcagaaaaaacctacagtgacacttacatatggttcttctcgcccttctattgaaatttatcgaccacctgcaagtagaaatgcagatagtggtgttcatttaaacaggttgcaatttcaacagcagcagaatagtattcatgctgccaagcagcttgatatgc

SEQ ID NO: 34764 - DNA, 2092 bp, Homo sapiens
  source 1..2092: mol_type = unassigned DNA
cttctgataccaacatctttgatagtaacgtgccttcaaacaagagcaatttcagtcggggagatgagaggaggcatgaagctgcagtgccaccacttgccattcctagcgcgagacctgaaaaaagagattccagagtttctacaagttcgcaggagtcaaaaaccacaaatgtcagacagacttacgatgatggagctgcaacccgactaatgtcaacagtgaaacctttgagggagccagcaccctctgaagatgtgattgatattaagccagaaccagatgatctcattgacgaagacctcaactttgtgcaggagaatcccttatctcagaaaaaacctacagtgacacttacatatggttcttctcgcccttctattgaaatttatcgaccacctgcaagtagaaatgcagatagtggtgttcatttaaacaggttgcaatttcaacagcagcagaatagtattcatgctgccaagcagcttgatatgcagagtagttgggtatatgaaacaggacgtttgtgtgaaccagaggtgcttaacagcttagaagaaacgtatagtccgttctttagaaacaactcggagaaaatgagtatggaggatgaaaactttcggaagagaaagttgcctgtggtaagttcagttgttaaagtaaaaaaattcaatcatgatggagaagaggaggaagaagatgatgattacgggtctcgaacaggaagcatctccagcagtgtgtctgtgcctgcaaagcctgaaaggagaccttctcttccaccttctaaacaagctaacaagaatctgattttgaaggctatatctgaagctcaagaatccgtaacaaaaacaactaactactctacagttccacagaaacagacacttccagttgctcccagaactcgaacttctcaagaagaattgctagcagaagtggtccagggacaaagtaggacccccagaataagtccccccattaaagaagaggaaacaaaaggagattctgtagaaaaaaatcaaggaactcaacagaggcaattattatcccgactgcaaatcgacccagtaatggcagaaactctgcagatgagtcaagattactatgacatggaatccatggtccatgcagacacaagatcatttattctgaagaagccaaagctgtctgaggaagtagtagtggcaccaaaccaagagtcggggatgaagactgcagattcccttcgggtactttcaggacaccttatgcagacacgagatcttgtacaaccagataaacctgcaagtcccaagtttatagtgacgctggatggtgtccccagccccccaggatacatgtcagatcaagaggaggacatgtgctttgaaggaatgaaacccgtaaaccaaactgcagcctcaaacaagggactcagaggtctcctccacccacagcagttgcacttgctgagcaggcagcttgaggacccaaatggtagcttttctaacgctgagatgagtgaactgagtgtggcacagaaaccagaaaaacttttggagcgctgcaagtactggcctgcttgtaaaaatggggatgagtgtgcctaccatcaccccatctcaccctgcaaagccttccccaattgtaaatttgctgaaaaatgtttgtttgttcacccaaattgtaaatatgatgcaaagtgtactaaaccagattgtcccttcactcatgtgagtagaagaattccagtactgtctccaaaaccagttgcaccaccagcaccaccttccagtagtcagctctgccgttacttccctgcttgtaagaagatggaatgtcccttctatcatccaaaacattgtaggtttaacactcaatgtacaagaccggactgcacattctaccatcccaccattaatgtcccaccacgacatgccttgaaatggattcgacctcaaaccagcgaatagcacccagtcctgcctggcagaagatcatgcagtttggaagttttcatgtactgatgaaagatactctacagaacttgtcaaatctttgaaacttggaatatattgctttcataatatgaagttttattgcctatcta

SEQ ID NO: 34765 - DNA, 593 bp, Homo sapiens
  source 1..593: mol_type = unassigned DNA
ctcctcccagcccccgcccgggggatccgaggtgcgcgcaccagcaaagtggcctcagccgctgcagagtccggtcttgttttcctagagccgcctttctcacatgcacgtttgctctttttctctcagagtgccattaaggggaaattacaagaattaggagcttatgttgatgaagaacttcctgattacattatggtgatggtggccaacaagaaaagtcaggaccaaatgacagaggatctgtccctgtttctagggaacaacacaattcgattcaccgtatggcttcatggtgtattagataaacttcgctctgttacaactgaaccctctagtctgaagtcttctgataccaacatctttgatagtaacgtgccttcaaacaagagcaatttcagtcggggagatgagaggaggcatgaagctgcagtgccaccacttgccattcctagcgcgagacctgaaaaaagagattccagagtttctacaagttcgcaggagtcaaaaaccacaaatgtcagacagacttacgatgatggagctgcaacccgactaatgtcaacagtgaaacctttgagggagccagcacc

SEQ ID NO: 34766 - DNA, 2529 bp, Homo sapiens
  source 1..2529: mol_type = unassigned DNA
gaggcggtggtgtcccggctgcggggtaggagtccgcggcagcctccgggtaagccaagcgccgcgcagtgctgagttcccgcacgccgcagagccatggagatcggcaccgagatcagccgcaagatccggagtgccattaaggggaaattacaagaattaggagcttatgttgatgaagaacttcctgattacattatggtgatggtggccaacaagaaaagtcaggaccaaatgacagaggatctgtccctgtttctagggaacaacacaattcgattcaccgtatggcttcatggtgtattagataaacttcgctctgttacaactgaaccctctagtctgaagtcttctgataccaacatctttgatagtaacgtgccttcaaacaagagcaatttcagtcggggagatgagaggaggcatgaagctgcagtgccaccacttgccattcctagcgcgagacctgaaaaaagagattccagagtttctacaagttcgcaggagtcaaaaaccacaaatgtcagacagacttacgatgatggagctgcaacccgactaatgtcaacagtgaaacctttgagggagccagcaccctctgaagatgtgattgatattaagccagaaccagatgatctcattgacgaagacctcaactttgtgcaggagaatcccttatctcagaaaaaacctacagtgacacttacatatggttcttctcgcccttctattgaaatttatcgaccacctgcaagtagaaatgcagatagtggtgttcatttaaacaggttgcaatttcaacagcagcagaatagtattcatgctgccaagcagcttgatatgcagagtagttgggtatatgaaacaggacgtttgtgtgaaccagaggtgcttaacagcttagaagaaacgtatagtccgttctttagaaacaactcggagaaaatgagtatggaggatgaaaactttcggaagagaaagttgcctgtggtaagttcagttgttaaagtaaaaaaattcaatcatgatggagaagaggaggaagaagatgatgattacgggtctcgaacaggaagcatctccagcagtgtgtctgtgcctgcaaagcctgaaaggagaccttctcttccaccttctaaacaagctaacaagaatctgattttgaaggctatatctgaagctcaagaatccgtaacaaaaacaactaactactctacagttccacagaaacagacacttccagttgctcccagaactcgaacttctcaagaagaattgctagcagaagtggtccagggacaaagtaggacccccagaataagtccccccattaaagaagaggaaacaaaaggagattctgtagaaaaaaatcaaggaactcaacagaggcaattattatcccgactgcaaatcgacccagtaatggcagaaactctgcagatgagtcaagattactatgacatggaatccatggtccatgcagacacaagatcatttattctgaagaagccaaagctgtctgaggaagtagtagtggcaccaaaccaagagtcggggatgaagactgcagattcccttcgggtactttcaggacaccttatgcagacacgagatcttgtacaaccagataaacctgcaagtcccaagtttatagtgacgctggatggtgtccccagccccccaggatacatgtcagatcaagaggaggacatgtgctttgaaggaatgaaacccgtaaaccaaactgcagcctcaaacaagggactcagaggtctcctccacccacagcagttgcacttgctgagcaggcagcttgaggacccaaatgctgagatgagtgaactgagtgtggcacagaaaccagaaaaacttttggagcgctgcaagtactggcctgcttgtaaaaatggggatgagtgtgcctaccatcaccccatctcaccctgcaaagccttccccaattgtaaatttgctgaaaaatgtttgtttgttcacccaaattgtaaatatgatgcaaagtgtactaaaccagattgtcccttcactcatgtgagtagaagaattccagtactgtctccaaaaccagttgcaccaccagcaccaccttccagtagtcagctctgccgttacttccctgcttgtaagaagatggaatgtcccttctatcatccaaaacattgtaggtttaacactcaatgtacaagaccggactgcacattctaccatcccaccattaatgtcccaccacgacatgccttgaaatggattcgacctcaaaccagcgaatagcacccagtcctgcctggcagaagatcatgcagtttggaagttttcatgtactgatgaaagatactctacagaacttgtcaaatctttgaaacttggaatatattgctttcataatatgaagttttattgcctatctatctgaagtgtctaatttttcaagtttgtaagtttattatgtggttttaacattgggtgtttttgttttgtttttactatgaaaagacagcttaaggaagagct

SEQ ID NO: 34767 - DNA, 7100 bp, Homo sapiens
  source 1..7100: mol_type = unassigned DNA
gaaccgagagggggccaccccaggcggtcaccagcagatttgcccgcgcgttctctttctttccacccagttgcccttgcggccggctgtaaacctgccactaggacccggtcggtgagatctagcctcttgacctgagagccgagagtggatcgctgggctgggctaacggcgacggagagcgcgccctcgctgactccgggcgcgcccagcagtagcaccgcccgcgcccgcccctggacacttgtaagtttcgatttccgatttccgcggaaccgagtcccgcgccgcggcagagccagcacagccagcgcgccatggcggacccggaggtgtgctgcttcatcaccaaaatcctgtgcgcccacgggggccgcatggccctggacgcgctgctccaggagatcgcgctgtctgagccgcagctctgtgaggtgctgcaggtggccgggcccgaccgctttgtggtgttggagaccggcggcgaggccgggatcacccgatcggtggtggccaccactcgagcccgggtctgccgtcgcaagtactgccagagaccctgcgataacctgcatctctgcaaactcaacttgctgggccggtgcaactattcgcagtccgagcggaatttatgcaaatattctcatgaggttctctcagaagagaacttcaaagtcctgaaaaatcacgaactctctggactgaacaaagaggaattagcagtgctcctcctccaaagtgatcctttttttatgcccgagatatgcaaaagttataagggagagggtcggcagcagatttgtaaccagcagccaccgtgttcaagactccacatctgtgaccacttcacccgagggaactgtcgttttcccaactgcctccggtcccataacctgatggacagaaaggtgctggccatcatgagggagcacgggctgaaccccgacgtggtccagaacatccaggacatctgcaacagcaagcacatgcagaagaatcccccagggcccagagctccttcttcacatcgtagaaacatggcatatagggctagaagcaagagtagagatcggttctttcagggcagccaagaatttcttgcgtctgcttcagcgtctgctgagaggtcctgcacacctagtccagatcagatcagccacagggcttccctggaggacgcgcctgtggacgatctcacccgcaagttcacgtatctggggagtcaggatcgcgctcggcctccctcaggctcgtccaaggctactgatcttggaggaacaagtcaggccgggacaagccagaggtttttagagaacggcagtcaagaggacctcttgcatggaaatccaggcagcacttaccttgcttccaattcaacatcagcccccaactggaagagcctcacatcctggacgaatgaccaaggcgccaggagaaagactgtgttttctcccacgctacctgccgcccgctcttctcttggctctctgcaaacacctgaagctgtgaccaccagaaagggcacaggcttgctttcctcagactacaggatcatcaatggcaaaagtggaactcaggacatccagcctggccctctttttaataataatgctgatggagtggccacagatataacttctaccagatccttaaattacaaaagcactagcagcggtcacagagaaatatcatcacctaggattcaggatgctggacctgcttcccgagatgtccaggccactggcagaatcgcagatgatgctgacccaagagtagcacttgttaacgattctttatctgatgtcacaagtaccacatcttctagggtggatgatcatgactcagaggaaatttgtcttgaccatctgtgtaagggttgtccgcttaatggtagctgcagcaaagtccacttccatctgccttaccggtggcagatgcttattggtaaaacctggacggactttgagcacatggagacgatcgagaaaggctactgtaaccccggaatccacctctgttctgtaggaagttatacaatcaattttcgggtaatgagttgtgattcctttcccatccgacgcctctccactccttcttctgtcaccaagccagccaattctgtcttcaccaccaaatggatttggtattggaagaatgaatctggcacatggattcagtatggagaagagaaagacaaacggaaaaattcaaacgtcgactcttcatacctggagtctctctatcaatcctgtccgaggggagttgtgccatttcaggcgggctcacggaactatgagctgagtttccaagggatgattcagacaaacatagcttccaaaactcaaaaggatgtcatcagaagaccaacatttgtgcctcagtggtatgtgcagcagatgaagagagggccagaccatcagccagcaaagacctcgtcagtgtctttaactgcgacctttcgtcctcaggaggacttttgcttcctatcctcaaagaaatataagttgtcagagatccatcacctacatccagaatatgtcagagtaagtgagcattttaaagcttccatgaaaaatttcaagattgaaaagataaagaagatcgagaactcagagctcctggataaatttacatggaagaaatcgcagatgaaggaagaaggaaaactcctattttatgcgacaagccgtgcctatgtggaatctatctgttcgaataattttgacagtttcctacatgaaactcatgaaaacaaatacggaaaaggaatttactttgcaaaagatgccatctattcccacaaaaattgcccgtatgatgccaaaaacgtcgttatgtttgtagcccaagttctggttggaaagtttactgaaggaaatataacgtacacgagccctcctccacagttcgacagctgtgtggataccagatcgaatccctccgtttttgtcatctttcagaaagatcaggtttacccacaatatgtgattgaatatactgaagacaaagcctgcgtgattagttagaaccgatgaatacagcgtcagaaggatgccataaccattctgttcctttacagaactaaattgccgcagacaggagttaaagttttatattttcctgctcagttatctaatgtcttagatcagtggtccccaaattttgctacatattagaatcatctgggaggttttaaacaaattctgatgcccaggttgcaccccatgccaatgaaatcatttctgggcgtcagcgccaggcagttgtatttttttttttttttttttttttgagactgaatctcactccatcgtccaggctggagtgcagtggcgcgatctcggctcactgcaacctctgcctcccgggttcaagcaattctcctgcctcagcctcccgagtagctggaactacaggcacacactgccgcgcccagctaattttttgtattttttagtagagacagggtttcactgtgttgcccaggctggtctcaaactcctgagctcaggcaatctgcccgccttggcctcccaaagtgctaggattacaggtatgagccaccatgcccggctggcagttgtattttttaaagcccttctgatgattccaatgtgttggaaagtttaccttgtctcagatgtaactggtaaaggctgatttctaaattttctgtaattgcagcaacctttctctcctgtctacccttttagtttactgtatgccatggttttgttttggttacattgaaagaaagttaatttggaaaatttgggagaaatctaatcatgcctattaaggatgtaagacattacagccttagaagaaagattgtgaaaagctggggagaaaatgcttaaggacatgctaggggaaaaaaaagtaaaattgaagtgctattgcagacatggctgcagtactgtaccttatcattctgatgaaactgatttggagcacccttttctttatcgctacatttatttaggggacaaactccatccaggttgactctctctggaatgcggtaataagagctggcaagtaaggctcagagagaagcaaccaactggagttaattgcccatttgggctctttgtataattatggcaaagtagacatttatgttctaattaatatgattacagagaaggctttttctcaggtcaggcttttcatgaaagtattttgagaacaatgaattgcaataaccagcttcacacaagcataactgataaacgcgagtgctattgtagtcttggcaagtgagccaagaacctaggagcagggccattcctactgaaggacgggccccctacggagatgaaatttgtttcctggtgagcacagaatcagaacaaagaacaatatcccaaagaggccctgtgtctaccaggagcttctttttccaaatgtaatggattatgtggaattgtagtgccatcggtttttacttagagcccttgacgtgcttggaccaatatttccttccttcttatgaaccaggtttttccttctgattttcccttttcaacattccttaccagtcaccaaagtttcctgttataatttcttttagcagacaagttataagtcagatttaattagcatcagagttgattttatattagtcagattttggatcatcacagagatctccacaactccttggcttaaacagctccaccggtaaaaaaaaaaaaaaaaaaaaaaaaaaaaaatagtttttttagagtagagttattttctgggagagttactacaaatgcttattctcattgacttatttctttcatggtaactttcgttttggagtgttcattttctgaacttgaccctcacattgtaggggtgcagtttgtccaactctttccaacagcccattagacaccactagctggatatttcacaggcatctttgattcaatatgtccaaagtggaactctccatctacctccctcacatgaacctgttcctctctcaggatctgtatgtaagtgaaaagcatcaccatctacccattggctcaagcagaaatctggaagtcatctttgactccttcctctccctcctgataaacatctaagcagtttctaagtctagttttacctcttaaatatctctgttcccttctaagttgtttgctgtgttttcttcagagcaagaaggttatattttttaaaatttacttagtaatgcacattcaaaacacacatcaagtcttcaggataaagttcaaaaccgctgtcatggccccatgtgatctctccctcccctacccctctatcatttagtttcttctgcgcaagccactctggcttcctttcagttttgtggttcccatttttagctagttcagtggttttcaatgggcatttctgcctttttttttctaaacgacaaatagaaatacatcttctttattatcctccaaatccaattcagaggtaatatgctccacctacacacaattttagaaataaattaaaaattaaataaaactaatatgaacataaagaggaaataaaaggtacctaacttgggcacagctgtaactgaagacctaatgaagtagtcagatgcttacaactatttataatgcatcaatttgaacttagaaggtaggagatcagatcatatgtgggaaaatgtaaaagcagggatatcagtgggcattagaataaaaactagggatacaataacttctttgcatatgacaatacttatttgtatataagagaaagaacgaaataacctttattgaaataaagatactatgcaagaaaatgtacagttgtcgaagtggagaaaatgaggatatattcttgcagacgagctataggtcatacatgaatgtctagtgagacattcaaaattcgtatagggtgcagagtaatttcttattgtgaggaactgtccaatgtattgcaagatgttctgcatacttggctctcacatactaaatgctagtagcgcccccacccccacgcccagtcacggtgacaaccacaaaccctatcagatctattcacctttttcagagcagatattttgtaacattctctttgctgacctgaaatgactcatagataatacaatctacttacacacatgaatttcttaaaaaaatcaatttaatgccctaactctcttattaaggagaaatagaaaagaagaaatttataatgaaaagaagatgaatttcattatgtaaacgctcaggcatgactacgctgtttgaaacagacagatgtttactcttccttgtaatgagtaggtttggatttaagagccgattagaggctacttcctgtaaacaagtacaggaaaatgaaactagacgggtgggggacactagaatgaaaaccagtgttagggtaaagacaaaacagactatgtacataatctgtatatgggaaaagaaagagcgaaattaccttacttaaggataataggacaagacaaattacagattgtctcagagaaaacaaatgagttactctctcggacaagctgtaggtcctacctaaatgtccagcaggacattagacagtcgtacagggtacagaataattcttcgttgtgtggcactaacccacacactgcaggacatcgttctccctggctgcatccactcagtgctgggagtagtccccagttattatgaaaccaccaataacccactgaccacagtgagaaccactgattttttccactgacctactgaatatctagcatccttagattggctcaactgttactttcctaaggagtccttctacagaataggtcagatcttggcctcccaaaccccttatttttaaaatactttgcgccttgctttgataatttgtattatgtatccaaactgaaattatctgctttctgcattagaatgtaagccccctgagggttgagtcagtctgtcttgtttgctgtgccacgcctgatgcccagcccagcagcatgctttgtacactgatatattgggtaaattttgttgaataaattaagctcaactatttgtatttcaatagttgagttgtattgcttcctgttcttcaagcttaatttgaactgtctaataaaaagaagtaattaa

SEQ ID NO: 34768 - DNA, 3182 bp, Homo sapiens
  source 1..3182: mol_type = unassigned DNA
cttttagtttctcttctttctaaagaaggctcgcggagcccggctggagaacctcaccctcgccgagcctagaaccgagagggggccaccccaggcggtcaccagcagatttgcccgcgcgttctctttctttccacccagttgcccttgcggccggctgtaaacctgccactaggacccggtcggtgagatctagcctcttgacctgagagccgagagtggatcgctgggctgggctaacggcgacggagagcgcgccctcgctgactccgggcgcgcccagcagtagcaccgcccgcgcccgcccctggacacttgtaagtttcgatttccgatttccgcggaaccgagtcccgcgccgcggcagagccagcacagccagcgcgccatggcggacccggaggtgtgctgcttcatcaccaaaatcctgtgcgcccacgggggccgcatggccctggacgcgctgctccaggagatcgcgctgtctgagccgcagctctgtgaggtgctgcaggtggccgggcccgaccgctttgtggtgttggagaccggcggcgaggccgggatcacccgatcggtggtggccaccactcgagcccgggtctgccgtcgcaagtactgccagagaccctgcgataacctgcatctctgcaaactcaacttgctgggccggtgcaactattcgcagtccgagcggaatttatgcaaatattctcatgaggttctctcagaagagaacttcaaagtcctgaaaaatcacgaactctctggactgaacaaagaggaattagcagtgctcctcctccaaagtgatcctttttttatgcccgagatatgcaaaagttataagggagagggtcggcagcagatttgtaaccagcagccaccgtgttcaagactccacatctgtgaccacttcacccgagggaactgtcgttttcccaactgcctccggtcccataacctgatggacagaaaggtgctggccatcatgagggagcacgggctgaaccccgacgtggtccagaacatccaggacatctgcaacagcaagcacatgcagaagaatcccccagggcccagagctccttcttcacatcgtagaaacatggcatatagggctagaagcaagagtagagatcggttctttcagggcagccaagaatttcttgcgtctgcttcagcgtctgctgagaggtcctgcacacctagtccagatcagatcagccacagggcttccctggaggacgcgcctgtggacgatctcacccgcaagttcacgtatctggggagtcaggatcgcgctcggcctccctcaggctcgtccaaggctactgatcttggaggaacaagtcaggccgggacaagccagaggtttttagagaacggcagtcaagaggacctcttgcatggaaatccaggcagcacttaccttgcttccaattcaacatcagcccccaactggaagagcctcacatcctggacgaatgaccaaggcgccaggagaaagactgtgttttctcccacgctacctgccgcccgctcttctcttggctctctgcaaacacctgaagctgtgaccaccagaaagggcacaggcttgctttcctcagactacaggatcatcaatggcaaaagtggaactcaggacatccagcctggccctctttttaataataatgctgatggagtggccacagatataacttctaccagatccttaaattacaaaagcactagcagcggtcacagagaaatatcatcacctaggattcaggatgctggacctgcttcccgagatgtccaggccactggcagaatcgcagatgatgctgacccaagagtagcacttgttaacgattctttatctgatgtcacaagtaccacatcttctagggtggatgatcatgactcagaggaaatttgtcttgaccatctgtgtaagggttgtccgcttaatggtagctgcagcaaagtccacttccatctgccttaccggtggcagatgcttattggtaaaacctggacggactttgagcacatggagacgatcgagaaaggctactgtaaccccggaatccacctctgttctgtaggaagttatacaatcaattttcgggtaatgagttgtgattcctttcccatccgacgcctctccactccttcttctgtcaccaagccagccaattctgtcttcaccaccaaatggatttggtattggaagaatgaatctggcacatggattcagtatggagaagagaaagacaaacggaaaaattcaaacgtcgactcttcatacctggagtctctctatcaatcctgtccgaggggagttgtgccatttcaggcgggctcacggaactatgagctgagtttccaagggatgattcagacaaacatagcttccaaaactcaaaaggatgtcatcagaagaccaacatttgtgcctcagtggtatgtgcagcagatgaagagagggccagagtaagtgttctgaagcagctgtttgctgacagatgcttgagatgttcatgccctgggctcatcaagtcactcgtgaatctggagcctgttttcctgaaaagttcctgtttgcattactctgcagtttccatttgcattatcgatgagtaagatgcttgttaagcagcatggtgtgactgaaaggatactagatcggaaaatgaattttctttctgaaagggaagtctgagcgagtctcctaaatactctgggctttagcttctccagctgtgaagagctggattgatgcagtacacctaaggaataatcatatatactgggtttttgttttgctgtggattcttttttttttttttttttttagagggggtctcactttgttgcccaggctggtcttgaactcctgagctcaagtgatcctcctacctcagtctcccaaagtgctgggattacaggcatgagccaccgtgcctggctttgctgtggattcttttgggtgtcttttgttttcctacacgatttatagaggatgaggggcggagaaagagatagaaaaaagggatgagctagctgttagagcaagggttttggtgagagataatattgattgaagggattttaaaggaaatgttgctgtgggggattcattgtaactctccttgtgaactgctcagtaaactctacattgttcatgaaca

SEQ ID NO: 34769 - DNA, 2264 bp, Homo sapiens
  source 1..2264: mol_type = unassigned DNA
agagccagcacagccagcgcgccatggcggacccggaggtgtgctgcttcatcaccaaaatcctgtgcgcccacgggggccgcatggccctggacgcgctgctccaggagatcgcgctgtctgagccgcagctctgtgaggtgctgcaggtggccgggcccgaccgctttgtggtgttggagaccggcggcgaggccgggatcacccgatcggtggtggccaccactcgagcccgggtctgccgtcgcaagtactgccagagaccctgcgataacctgcatctctgcaaactcaacttgctgggccggtgcaactattcgcagtccgagcggaatttatgcaaatattctcatgaggttctctcagaagagaacttcaaagtcctgaaaaatcacgaactctctggactgaacaaagaggaattagcagtgctcctcctccaaagtgatcctttttttatgcccgagatatgcaaaagttataagggagagggtcggcagcagatttgtaaccagcagccaccgtgttcaagactccacatctgtgaccacttcacccgagggaactgtcgttttcccaactgcctccggtcccataacctgatggacagaaaggtgctggccatcatgagggagcacgggctgaaccccgacgtggtccagaacatccaggacatctgcaacagcaagcacatgcagaagaatcccccagggcccagagctccttcttcacatcgtagaaacatggcatatagggctagaagcaagagtagagatcggttctttcagggcagccaagaatttcttgcgtctgcttcagcgtctgctgagaggtcctgcacacctagtccagatcagatcagccacagggcttccctggaggacgcgcctgtggacgatctcacccgcaagttcacgtatctggggagtcaggatcgcgctcggcctccctcaggctcgtccaaggctactgatcttggaggaacaagtcaggccgggacaagccagaggtttttagagaacggcagtcaagaggacctcttgcatggaaatccaggcagcacttaccttgcttccaattcaacatcagcccccaactggaagagcctcacatcctggacgaatgaccaaggcgccaggagaaagactgtgttttctcccacgctacctgccgcccgctcttctcttggctctctgcaaacacctgaagctgtgaccaccagaaagggcacaggcttgctttcctcagactacaggatcatcaatggcaaaagtggaactcaggacatccagcctggccctctttttaataataatgctgatggagtggccacagatataacttctaccagatccttaaattacaaaagcactagcagcggtcacagagaaatatcatcacctaggattcaggatgctggacctgcttcccgagatgtccaggccactggcagaatcgcagatgatgctgacccaagagtagcacttgttaacgattctttatctgatgtcacaagtaccacatcttctagggtggatgatcatgactcagaggaaatttgtcttgaccatctgtgtaagggttgtccgcttaatggtagctgcagcaaagtccacttccatctgccttaccggtggcagatgcttattggtaaaacctggacggactttgagcacatggagacgatcgagaaaggctactgtaaccccggaatccacctctgttctgtaggaagttatacaatcaattttcgggtaatgagttgtgattcctttcccatccgacgcctctccactccttcttctgtcaccaagccagccaattctgtcttcaccaccaaatggatttggtattggaagaatgaatctggcacatggattcagtatggagaagagaaagacaaacggaaaaattcaaacgtcgactcttcatacctggagtctctctatcaatcctgtccgaggggagttgtgccatttcaggcgggctcacggaactatgagctgagtttccaagggatgattcagacaaacatagcttccaaaactcaaaaggatgtcatcagaagaccaacatttgtgcctcagtggtatgtgcaggaagagagggccagagtaagtgttctgaagcagctgtttgctgacagatgcttgagatgttcatgccctgggctcatcaagtcactcgtgaatctggagcctgttttcctgaaaagttcctgtttgcattactctgcagtttccatttgcattatcgatgagtaa

SEQ ID NO: 34770 - DNA, 1827 bp, Homo sapiens
  source 1..1827: mol_type = unassigned DNA
gcccggatctcaaacagtcgggaagaagcaccgtggctgctattatctgctctccgcgcctgacccctcccaggactcgtgatgccaaggccgctgcgagcggctacgaagagtcggggttgagccccagctgagccgagggctcgcactcttctggtctcccaggcccaacccacctgaagaaatgagtggtggattggctccaagtaagagcacagtgtatgtatccaacttgcctttttccctgacaaacaatgacttgtaccggatattttccaagtatggcaaagttgtaaaggttaccatcatgaaagataaagataccaggaagagtaaaggggttgcatttattttatttttggataaagactctgcacaaaactgtaccagggcaataaacaacaaacagttatttggtagagtgataaaagcaagcattgctattgacaatggaagagcagctgagttcatccgaaggcgaaactactttgataaatctaagtgttatgaatgtggggaaagtggacacttaagttatgcctgtccgaaaaatatgctcggagaacgtgagcctccaaagaagaaagaaaaaaagaaaaaaaagaaagctcctgaaccagaagaagaaattgaggaagtagaagaaagtgaagatgaaggggaggatcctgctcttgacagcctcagtcaggccatagcattccagcaagccaaaattgaagaagaacaaaaaaaatggaaacccagttcaggagtcccctcaacatcagatgattcaagacgcccaaggataaagaaaagcacatatttcagtgatgaggaagaacttagtgattaaaatcttgccccagcacagtaataaaaatcaagatttgttagtaacaatcttgaagagctaattttaataaaaataagaaaaattaatactatcatgttaatactattattgtcatcccaagaaaaaagatattttaaaaatttatttgaaaagttcattataagggctttattcatgcctgatttgtttacatgaggacttctgaaattaatccttaaaacaaacttcctgaagaccgaaaagttgaatgatttattgttacttatattaataaacttttcaagagaattttgtctttaaatatgggtgttttgtcatcatatttcttgtagctttatcccaatctggataaattgtaaatacctataaaataaattataaatacctataaaatataaagtaacatagctctaaaaggcttaaaatcaaacacaggtgttatttgtctgccctacccatagcaccaaattccattccctagaagaaactacttacatgtgcacacatgtagctaaataaagtacatatatttcagtcacttaataaaagaataaaggagaattattcaatctcttatacttctcctaccttcctcaatattcccaatgtggctgtattaaaaatttgggggaatccatatatatcttttttaataaccaagtaaatacttttcatttctgagccaaggaatatgctatgattacgttttttcctagagttaataattgtctattttttttccatgtattgtctttgtatttatgactaaatcttcccattctgtctgcaggtgggtatatggtaatgggattagagagcctttaattttctgctttgtatatttctatattgtttaactttgtaagaatgcccattacttttttaactagtaaaagcaatagaaataagttaatactatcatagtaatattattattgtcatcccaagaaaaaatatattaaaaagatatttgaaatttcattataaaa

SEQ ID NO: 34771 - DNA, 1354 bp, Homo sapiens
  source 1..1354: mol_type = unassigned DNA
agttcacactggctgttgtcagcggcctctgaggtttcaggctcttggcggtgaaggtcagagtgcagacctgagaccactgctcaccgacttcagactccagtttatctgtgccccagcttcctcacttagtctcagaagacttaggctgaggcctcagaaggagatctccatcctttgtccagagcagaacaggatggccatgtcccaggaatcattgaccttcaaggacgtgtttgtggacttcaccctggaggagtggcagcaactggactctgcccagaagaacctctacagggatgtcatgcttgagaactacagccacctggtgtccgtggggtatctagttgcgaagccagatgtgatcttcaggttgggaccaggtgaagagtcctggatggcagatggggggaccccggtacggacctgtgcagaagtctggcaagttgatgagcagatagatcactacaaggaaagccaagacaaacttccttggcaagctgcattcataggcaaggaaacactgaaggatgaaagcggtcaagaatccagaacatgtagaaaaagcatttatctgagcacagaatttgattctgtaaggcaaagactccctaaatattattcgtgggaaaaggcattcaaaacatcatttaaactttcttggtcaaaatggaagctatgtaagaaagaaagatgatggatgtaaagcatattggaaagtatgcttccattataatcttcataaagctcaacctgcagagagattttttgaccctaatcaacgagggaaagccctccaccaaaagcaagcccttagaaaaagtcagagaagtcaaactggggagaaactctacaaatgtactgaatgtggaaaagtgtttatccagaaagcaaacttagttgtacatcaaagaactcacaccggagagaaaccttatgaatgctgcgaatgtgcaaaagccttcagccagaagtcaaccctcatagcacaccagagaactcacacaggggagaagccctatgaatgcagtgaatgtggaaaaacctttatccagaagtcaactctgattaaacataagaaaattcatatggagagagaccctataaatgcagtgtctgtgagaaagccttcagtaggaagtcaactctcattaaacatcagataattcatatgggagaaaccttatgaatgtaataaatgtgggaaatcttttagtgttaaatcaactctcattgtatgtcacagaacataaatgcataagttgcatgctattgtgaatagtgtgatgaaattttgcactgtcctgctctttcctgctcaggatgcaaatcagtgaatctttttttttttttt

SEQ ID NO: 34772 - DNA, 2774 bp, Homo sapiens
  source 1..2774: mol_type = unassigned DNA
ctattcccaggagggtaaaaaagcgggaacaatggctttcaggacggagggacacaaacacccaatgccgcagcgactgggagggtcgcgatgcaggaggacgaaatgggagaagggggacaagggggacttcggcctccctgcgggcgggagctaggccgctggaaagtccgctcgcctctcgccggcaagggatgacgccctgggccttttgtaccactcgccacggaaaatggtcacacgcttttgtcctcaagccgaacactatcagaaacacggggtccctggaagccgccatcttggccattggcggtggcgcacccacccccgtgctactgcgcgtgcgcggcgctgcgacacactccgaccccatcccgcgttcccagggggcggtgggaagcggaagtgctccgctgacccgggagggcggtccctagttcacactggctgttgtcagcggcctctgaggtttcaggctcttggcggtgaaggtcagagtgcagacctgagaccactgctcaccgacttcagactccagtttatctgtgccccagcttcctcacttagtctcagaagacttaggctgaggcctcagaaggagatctccatcctttgtccagagcagaacaggatggccatgtcccaggaatcattgaccttcaaggacgtgtttgtggacttcaccctggaggagtggcagcaactggactctgcccagaagaacctctacagggatgtcatgcttgagaactacagccacctggtgtccgtggggtatctagttgcgaagccagatgtgatcttcaggttgggaccaggtgaagagtcctggatggcagatggggggaccccggtacggacctgtgcaggtgaggacaggccagaagtctggcaagttgatgagcagatagatcactacaaggaaagccaagacaaacttccttggcaagctgcattcataggcaaggaaacactgaaggatgaaagcggtcaagaatccagaacatgtagaaaaagcatttatctgagcacagaatttgattctgtaaggcaaagactccctaaatattattcgtgggaaaaggcattcaaaacatcatttaaactttcttggtcaaaatggaagctatgtaagaaagaaagatgatggatgtaaagcatattggaaagtatgcttccattataatcttcataaagctcaacctgcagagagattttttgaccctaatcaacgagggaaagccctccaccaaaagcaagcccttagaaaaagtcagagaagtcaaactggggagaaactctacaaatgtactgaatgtggaaaagtgtttatccagaaagcaaacttagttgtacatcaaagaactcacaccggagagaaaccttatgaatgctgcgaatgtgcaaaagccttcagccagaagtcaaccctcatagcacaccagagaactcacacaggggagaagccctatgaatgcagtgaatgtggaaaaacctttatccagaagtcaactctgattaaacataagaaaattcatatggagagagaccctataaatgcagtgtctgtgagaaagccttcagtaggaagtcaactctcattaaacatcagataattcatatgggagaaaccttatgaatgtaataaatgtgggaaatcttttagtgttaaatcaactctcattgtatgtcacagaacataaatgcataagttgcatgctattgtgaatagtgtgatgaaattttgcactgtcctgctctttcctgctcaggatgcaaatcagtgaatctttttttttttttttttgagacagagtcttgctctgtcatccaaactggagtgcagtggcacaatcttggctcactgcaacctccgcctcttgggttcaaccgattctcctgcctcaacctcccaaatagttgggattacaggcacatgccaccatacgcagctaatttgtatttttagtagagacagggtttcaccatgttggccagcctggtcttgaactcctgacctcaagtgatccgcctgcctcagcttcccaaagtgctgggattacaggcatgagccactgcacccggcttgaatcatccttttgtccagtattatatccatgctgtatatgctacccgcccactagtcccttagctgtctcagttgtcagattgactgtcatgggattgcagtgcttgcattaaagctacccttattgtataatgaccccaaagtgcaagagtagtgatgttggcaatttgcatacaccaaaaataagttataaagtgcttccttaaagtgaaatggttaaagttcttgacttaataaagaaaaaaaatgtatgctgaggttgttaagatttacagtaagaatgaatcttctatccaagaaattgtgaaggaggaaaaagaaacttgtgctagttttgctgtcacatctgaaactgcaaaagttgtggccacagtgcatcataagtgctaagacgaaaaagacattaaatttgcggatggaaggcgtgaatagaaatgggttctgacagcaatcaggttcggtactattcacagtttcaggcatccgctagggatcttggaacatatcccccatggataagggaggggtactgtaccttgtcatattgtgcattaaagaattcattgagtgtaatcatgtaagtctaacacacatttaaaaagctctcagatatcatttcgccttcggttgatgtaagaaaattcaaaagctactcaaatcattcaataaatgataaaattattta

SEQ ID NO: 34773 - DNA, 2485 bp, Homo sapiens
  source 1..2485: mol_type = unassigned DNA
ctactgcgcgtgcgcggcgctgcgacacactccgaccccatcccgcgttcccagggggcggtgggaagcggaagtgctccgctgacccgggagggcggtccctagttcacactggctgttgtcagcggcctctgaggtttcaggctcttggcggtgaaggtcagagtgcagacctgagaccactgctcaccgacttcagactccagtttatctgtgccccagcttcctcacttagtctcagaagacttaggctgaggcctcagaaggagatctccatcctttgtccagagcagaacaggatggccatgtcccaggaatcattgaccttcaaggacgtgtttgtggacttcaccctggaggagtggcagcaactggactctgcccagaagaacctctacagggatgtcatgcttgagaactacagccacctggtgtccgtggggtatctagttgcgaagccagatgtgatcttcaggttgggaccaggtgaagagtcctggatggcagatggggggaccccggtacggacctgtgcaggtgaggacaggccagatgtatccatttttgcctcatgtattttgaagtgctgttattagaagtctggcaagttgatgagcagatagatcactacaaggaaagccaagacaaacttccttggcaagctgcattcataggcaaggaaacactgaaggatgaaagcggtcaagaatccagaacatgtagaaaaagcatttatctgagcacagaatttgattctgtaaggcaaagactccctaaatattattcgtgggaaaaggcattcaaaacatcatttaaactttcttggtcaaaatggaagctatgtaagaaagaaagatgatggatgtaaagcatattggaaagtatgcttccattataatcttcataaagctcaacctgcagagagattttttgaccctaatcaacgagggaaagccctccaccaaaagcaagcccttagaaaaagtcagagaagtcaaactggggagaaactctacaaatgtactgaatgtggaaaagtgtttatccagaaagcaaacttagttgtacatcaaagaactcacaccggagagaaaccttatgaatgctgcgaatgtgcaaaagccttcagccagaagtcaaccctcatagcacaccagagaactcacacaggggagaagccctatgaatgcagtgaatgtggaaaaacctttatccagaagtcaactctgattaaacataagaaaattcatatggagagagaccctataaatgcagtgtctgtgagaaagccttcagtaggaagtcaactctcattaaacatcagataattcatatgggagaaaccttatgaatgtaataaatgtgggaaatcttttagtgttaaatcaactctcattgtatgtcacagaacataaatgcataagttgcatgctattgtgaatagtgtgatgaaattttgcactgtcctgctctttcctgctcaggatgcaaatcagtgaatctttttttttttttttttgagacagagtcttgctctgtcatccaaactggagtgcagtggcacaatcttggctcactgcaacctccgcctcttgggttcaaccgattctcctgcctcaacctcccaaatagttgggattacaggcacatgccaccatacgcagctaatttgtatttttagtagagacagggtttcaccatgttggccagcctggtcttgaactcctgacctcaagtgatccgcctgcctcagcttcccaaagtgctgggattacaggcatgagccactgcacccggcttgaatcatccttttgtccagtattatatccatgctgtatatgctacccgcccactagtcccttagctgtctcagttgtcagattgactgtcatgggattgcagtgcttgcattaaagctacccttattgtataatgaccccaaagtgcaagagtagtgatgttggcaatttgcatacaccaaaaataagttataaagtgcttccttaaagtgaaatggttaaagttcttgacttaataaagaaaaaaaatgtatgctgaggttgttaagatttacagtaagaatgaatcttctatccaagaaattgtgaaggaggaaaaagaaacttgtgctagttttgctgtcacatctgaaactgcaaaagttgtggccacagtgcatcataagtgctaagacgaaaaagacattaaatttgcggatggaaggcgtgaatagaaatgggttctgacagcaatcaggttcggtactattcacagtttcaggcatccgctagggatcttggaacatatcccccatggataagggaggggtactgtaccttgtcatattgtgcattaaagaattcattgagtgtaatcatgtaagtctaacacacatttaaaaagctctcagatatcatttcgccttcggttgatgtaagaaaattcaaaagctactcaaatcattcaataaatgataaaattattt

SEQ ID NO: 34774 - DNA, 993 bp, Homo sapiens
  source 1..993: mol_type = unassigned DNA
ttcacactggctgttgtcagcggcctctgaggtttcaggctcttggcggtgaaggtcagagtgcagacctgagaccactgctcaccgacttcagactccagtttatctgtgccccagcttcctcacttagtctcagaagacttaggctgaggcctcagaaggagatctccatcctttgtccagagcagaacaggatggccatgtcccaggaatcattgaccttcaaggacgtgtttgtggacttcaccctggaggagtggcagcaactggactctgcccagaagaacctctacagggatgtcatgcttgagaactacagccacctggtgtccgtggggtatctagttgcgaagccagatgtgatcttcaggttgggaccaggtgaagagtcctggatggcagatggggggaccccggtacggacctgtgcaggtgaggacaggccagatgtatccatttttgcctcatgtattttgaagtgctgttattagtgagagttattttccatggaaattctgtgtaccctaagctatgaaagcatcactgcagaactatttggattgccactgctggggcccactggtttcactaatgcaggaacaatttataggtgaatttatcaacttcgggggttttgtattatacttcaaatgtccatttggaatgcactcctacatgtggtacaggactgtggttctgacttcttgtaagtaacccctgattcttcttaacattttcattagccagtgggtgacatctttctagttcctattttacacacagagatgtcctttgtgactcccagctttaagcaggtagctcaattctaattctctgcacatttgtgccctgtggcctagaattcacctcacactcatgattagagccttagtcccccaactgcaaagccacacagcttcaatttctgttcactccctcactttaaatttcttcttcatttttgtcacataataaatttattttctggtttga

SEQ ID NO: 34775 - DNA, 2142 bp, Homo sapiens
  source 1..2142: mol_type = unassigned DNA
gttgcaatgagccaagaatcattgaccttcaaggacgtgtttgtggacttcaccctggaggagtggcagcaactggactctgcccagaagaacctctacagggatgtcatgcttgagaactacagccacctggtgtccgtggggtatctagttgcgaagccagatgtgatcttcaggttgggaccaggtgaagagtcctggatggcagatggggggaccccggtacggacctgtgcaggtgaggacaggccagaagtctggcaagttgatgagcagatagatcactacaaggaaagccaagacaaacttccttggcaagctgcattcataggcaaggaaacactgaaggatgaaagcggtcaagaatccagaacatgtagaaaaagcatttatctgagcacagaatttgattctgtaaggcaaagactccctaaatattattcgtgggaaaaggcattcaaaacatcatttaaactttcttggtcaaaatggaagctatgtaagaaagaaagatgatggatgtaaagcatattggaaagtatgcttccattataatcttcataaagctcaacctgcagagagattttttgaccctaatcaacgagggaaagccctccaccaaaagcaagcccttagaaaaagtcagagaagtcaaactggggagaaactctacaaatgtactgaatgtggaaaagtgtttatccagaaagcaaacttagttgtacatcaaagaactcacaccggagagaaaccttatgaatgctgcgaatgtgcaaaagccttcagccagaagtcaaccctcatagcacaccagagaactcacacaggggagaagccctatgaatgcagtgaatgtggaaaaacctttatccagaagtcaactctgattaaacataagaaaattcatatggagagagaccctataaatgcagtgtctgtgagaaagccttcagtaggaagtcaactctcattaaacatcagataattcatatgggagaaaccttatgaatgtaataaatgtgggaaatcttttagtgttaaatcaactctcattgtatgtcacagaacataaatgcataagttgcatgctattgtgaatagtgtgatgaaattttgcactgtcctgctctttcctgctcaggatgcaaatcagtgaatctttttttttttttttttgagacagagtcttgctctgtcatccaaactggagtgcagtggcacaatcttggctcactgcaacctccgcctcttgggttcaaccgattctcctgcctcaacctcccaaatagttgggattacaggcacatgccaccatacgcagctaatttgtatttttagtagagacagggtttcaccatgttggccagcctggtcttgaactcctgacctcaagtgatccgcctgcctcagcttcccaaagtgctgggattacaggcatgagccactgcacccggcttgaatcatccttttgtccagtattatatccatgctgtatatgctacccgcccactagtcccttagctgtctcagttgtcagattgactgtcatgggattgcagtgcttgcattaaagctacccttattgtataatgaccccaaagtgcaagagtagtgatgttggcaatttgcatacaccaaaaataagttataaagtgcttccttaaagtgaaatggttaaagttcttgacttaataaagaaaaaaaatgtatgctgaggttgttaagatttacagtaagaatgaatcttctatccaagaaattgtgaaggaggaaaaagaaacttgtgctagttttgctgtcacatctgaaactgcaaaagttgtggccacagtgcatcataagtgctaagacgaaaaagacattaaatttgcggatggaaggcgtgaatagaaatgggttctgacagcaatcaggttcggtactattcacagtttcaggcatccgctagggatcttggaacatatcccccatggataagggaggggtactgtaccttgtcatattgtgcattaaagaattcattgagtgtaatcatgtaagtctaacacacatttaaaaagctctcagatatcatttcgccttcggttgatgtaagaaaattcaaaagctactcaaatcattcaataaatgataaaattattt

SEQ ID NO: 34776 - DNA, 1247 bp, Homo sapiens
  source 1..1247: mol_type = unassigned DNA
gacttcagactccagtttatctgtgccccagcttcctcacttagtctcagaagacttaggctgaggcctcagaaggagatctccatcctttgtccagagcagaacaggatggccatgtcccaggaatcattgaccttcaaggacgtgtttgtggacttcaccctggaggagtggcagcaactggactctgcccagaagaacctctacagggatgtcatgcttgagaactacagccacctggtgtccgtggggtatctagttgcgaagccagatgtgatcttcaggttgggaccaggtgaagagtcctggatggcagatggggggaccccggtacggacctgtgcaggtgaggacaggccagatgtatccatttttgcctcatgtattttgaagtgctgttattagtctggcaagttgatgagcagatagatcactacaaggaaagccaagacaaacttccttggcaagctgcattcataggcaaggaaacactgaaggatgaaagcggtcaagaatccagaacatgtagaaaaagcatttatctgagcacagaatttgattctgtaaggcaaagactccctaaatattattcgtgggaaaaggcattcaaaacatcatttaaactttcttggtcaaaatggaagctatgtaagaaagaaagatgatggatgtaaagcatattggaaagtatgcttccattataatcttcataaagctcaacctgcagagagattttttgaccctaatcaacgagggaaagccctccaccaaaagcaagcccttagaaaaagtcagagaagtcaaactggggagaaactctacaaatgtactgaatgtggaaaagtgtttatccagaaagcaaacttagttgtacatcaaagaactcacaccggagagaaaccttatgaatgctgcgaatgtgcaaaagccttcagccagaagtcaaccctcatagcacaccagagaactcacacaggggagaagccctatgaatgcagtgaatgtggaaaaacctttatccagaagtcaactctgattaaacataagaaaattcatatggagagagaccctataaatgcagtgtctgtgagaaagccttcagtaggaagtcaactctcattaaacatcagataattcatatgggagaaaccttatgaatgtaataaatgtgggaaatcttttagtgttaaatcaactctcattgtatgtcacagaacataaatgcataagttgcatgctattgtgaa

SEQ ID NO: 34777 - DNA, 1874 bp, Homo sapiens
  source 1..1874: mol_type = unassigned DNA
ggagccgcgcgcccccgtgcccgcgtctgtccgtgcgcccgagcgcccactcccgggtctgaggtctgcccggcgcgccgcttgcagagcatactcagggccgcgcacctgccccgcgcacctgcccgccgcccgctcggcgctccgggcttcgctagccagcctccctgcgacagcgcgggggctccggccgtgcctccgcgtccgccccgcgcctcagccgggcccgggcgcagcgctgcggagggcgagggccgcccggagtccggccagggccggcgcggcgatgatgaacaggttccgaaagtggctctacaaacccaagaggtcggatccgcagctgcttgcccggttctactatgccgacgaggagctgaaccaggtggccgcggagctggacagcctggatgggcggaaggacccccagcggtgcacgctgctggtcagccagttccgctcctgtcaggacaatgtgttgaacatcattaaccagatcatggatgagtgcatcccccaggaccgcgcccccagagatttctgcgtcaagttccctgaggagatccggcacgacaacctggccggccagctgtggttcggtgccgagtgcctggccgccggctccatcatcatgaaccgggagctggagagcatggccatgcgcccgctggccaaggagctgacgcgcagcctggaggacgtgcggggcgccctccgtgaccaggcgctgcgggacctgaacacctacacagagaagatgagggaagcgctgaggcacttcgacgtcctgttcgcagagtttgagctcagctacgtctcggccatggtgcctgtgaagtcccccagggagtactacgtgcagcaggaggtcatcgtgctcttctgcgagacggtggagagggccctggacttcgggtacctgactcaggacatgattgatgactacgagccggccctcatgttcagcatccccaggctggccatcgtgtgccccctccttccagcccatcccagaacacgtgcaggagccaccgcccacgtggcctgcaggatggttgccggatcctcttcaggggccctcacccatccacctgtgtcaaaacaaggtgtcatctctgccctgctcagacccttgccggagctcccaccgtgatctgcctgcaccgtgcccacaccagtcctctctccccagtccccacgcacccgctgccctgggtctccaccatgctgtccccttcgctcagggtccccttgactgtcctatccctactgccacactgtcccctcccccgcactgtccccttttccatgatgtttcctcctccacgctgtcccctctgctccagtgtcctcttggccatgctgtcctctccatggtgctggcccctccactacactgtcccctcctctatgctgtccccttgtctatgctgttccctcctctatgctatcccattctccatgctatcccattctccatgctgtcccctcctccatgctgtcccttcctctgcaatgtcctctcccctgtgctcctctgcactgtcccctcctccatgctgtcccctcctttatgatgttccctcctccgtgctgtcccctccatgatgtcccctcttccgtgctgtcctctcctctgcactgtcccctactccctgctgtacctccctctgcgatgtccccaccactgcaccgctcacccaagccctctcccaccagcaggttgcgtgacttactctgttatttatttttccatgttactgagataaaattcattaccctatgactcacccatctacagtgcacagtcgtttttggtacattcagaattgtgcagccatcaccacaaatttcataacattttcattactcacaaa

SEQ ID NO: 34778 - DNA, 1135 bp, Homo sapiens
  source 1..1135: mol_type = unassigned DNA
gcggccgtgaccagcggagcgctgggtgtcagtgagcagcgaggagccgcgcgcccccgtgcccgcgtctgtccgtgcgcccgagcgcccactcccgggtctgaggtctgcccggcgcgccgcttgcagagcatactcagggccgcgcacctgccccgcgcacctgcccgccgcccgctcggcgctccgggcttcgctagccagcctccctgcgacagcgcgggggctccggccgtgcctccgcgtccgccccgcgcctcagccgggcccgggcgcagcgctgcggagggcgagggccgcccggagtccggccagggccggcgcggcgatgatgaacaggttccgaaagtggctctacaaacccaaggacaatgtgttgaacatcattaaccagatcatggatgagtgcatcccccaggaccgcgcccccagagatttctgcgtcaagttccctgaggagatccggcacgacaacctggccggccagctgtggttcggtgccgagtgcctggccgccggctccatcatcatgaaccgggagctggagagcatggccatgcgcccgctggccaaggagctgacgcgcagcctggaggacgtgcggggcgccctccgtgaccaggcgctgcgggacctgaacacctacacagagaagatgagggaagcgctgaggcacttcgacgtcctgttcgcagagtttgagctcagctacgtctcggccatggtgcctgtgaagtcccccagggagtactacgtgcagcaggaggtcatcgtgctcttctgcgagacggtggagagaaatggaaaaggtgttctaaaattcatgtggaactgcaatgggccctaaatagccaaaacaatattgaaaaacaaaaacaaaattggaagattcatacgtcctgatttcaaaacttactacaagtcaaaaccttatggtactggcataaagatagatgtatagaccaatggaataaaattgagaagccataaataaacccaaacatctatggtgaactgattattgacaagggggccaagatcattcaataaggaaagaacagtctcttcagtgaatgttcctggagcaactggataaccacatgcaaaagaacaaagttggaaaaaaaaaaaaaaa

SEQ ID NO: 34779 - DNA, 1590 bp, Homo sapiens
  source 1..1590: mol_type = unassigned DNA
gtcacccgctcggaggccgtgggcgccttgacgagggcgcggcggcgggaatgcacaacgttatgctcatcacctgcgtccaccactgtcacccctgacggcgagacgcgaggtgctaagggcttgtccaggctaagcgggttctctgcgtccttaagcccactttgcagatgctaatcagaggggacaggcggccaagaacctggagcccacccgggcgtctgtgcccagtgccgaccgtctaaattcccttcccacgtggctcctgttgcgtctgggctgtggaggattcctctaaacaggcacagccaccctctggaggtcggatccgcagctgcttgcccggttctactatgccgacgaggagctgaaccaggtggccgcggagctggacagcctggatgggcggaaggacccccagcggtgcacgctgctggtcagccagttccgctcctgtcaggacaatgtgttgaacatcattaaccagatcatggatgagtgcatcccccaggaccgcgcccccagagatttctgcgtcaagttccctgaggagatccggcacgacaacctggccggccagctgtggttcggtgccgagtgcctggccgccggctccatcatcatgaaccgggagctggagagcatggccatgcgcccgctggccaaggagctgacgcgcagcctggaggacgtgcggggcgccctccgtgaccaggcgctgcgggacctgaacacctacacagagaagatgagggaagcgctgaggcacttcgacgtcctgttcgcagagtttgagctcagctacgtctcggccatggtgcctgtgaagtcccccagggagtactacgtgcagcaggaggtcatcgtgctcttctgcgagacggtggagagggccctggacttcgggtacctgactcaggacatgattgatgactacgagccggccctcatgttcagcatccccaggctggccatcgtgtgaaatggaaaaggtgttctaaaattcatgtggaactgcaatgggccctaaatagccaaaacaatattgaaaaacaaaaacaaaattggaagattcatacgtcctgatttcaaaacttactacaagtcaaaaccttatggtactggcataaagatagatgtatagaccaatggaataaaattgagaagccataaataaacccaaacatctatggtgaactgattattgacaagggggccaagatcattcaataaggaaagaacagtctcttcagtgaatgttcctggagcaactggataaccacatgcaaaagaacaaagttggaaaaaaaaaaaaaaaagaacaaagttggaccctgcgatggttaacttcatgtgtcatcttgggtaggccacattacccagatatttggtaaaataccagtctgaatgttgctgtgaaggtatttttttttctttttataatgataaactggcaatttataattgcgcagatttatagcatgcaaagttgtgttataatctatgaatgcagtgtggaataattaaatcaagctggttaacatatccatcacctcaaatatttaacatcttttgaatgagatcatttta

SEQ ID NO: 34780 - DNA, 16064 bp, Homo sapiens
  source 1..16064: mol_type = unassigned DNA
ccgcgcgtccctgtgcgtccccgggtccctgcgggcgggcgggcgcggtcgccgccgagcaacccggcctgcgcccggcacgactgtagatgtcaggctttgcccggggagccgagcggcagcggggctgtgagtttcaaattaaccttccgctttgttgctgtgtaatgtggatccccgaaggccccccgccccgcccgccccccttccccgggcggtgcgcgctgcaaactgcgagttgggcttcatttacataaagcgattccgggcgggcggcggcagaggaggaggcggcggcggcgggcaggccggggacccggacgccagcgccgcgccccgtgggtgaatccccgccgcgtcccggggacctccctccggggacgggccgaccgccagccctgccgccaccatgagctcccctcccctgtctccgggccccctgctcctgaccagagccacctccgagtcctggggccagcgggaggtggggagcatgccgcctggggtgggtgagctcggggctcgggtgccactggaatttcccgttgttgcgcatggcggcgcggcccccggacctgcaagtgccgcctccctccggaggtgcgcggaggcttggtgtgccaggtccgagcctccgtactgggtgcaatgaaagctccacgcaggccttaccatggaaggctgtgactcgcccgtcgtctcggggaaggacaatgggtgcggtatccctcagcaccagcaatggactgaactcaacagcacccacctccctgacaaacccagtagcatggagcagtccacaggcgagagccacgggcccttggacagcctgagggcccccttcaatgagcgcctcgcggagagcaccgcgtcggccgggcccccctccgagcccgccagcaaggaggtcacctgcaacgaatgttcggcctcctttgccagcctccagacctacatggagcaccactgccccagcgcgcgccccccgccacccctgagagaggagagcgccagcgacaccggtgaggagggggacgaggagagtgacgtggagaacctggccggggagatcgtctaccagccggacggctccgcgtacattgtggagagcctgagccagctgacccagggcgggggcgcctgtgggagtggcagtggcagtgggcctctcccctcgcttttcctgaactctctccctggcgcggggggcaagcaaggggacccttcgtgtgctgcacccgtgtacccgcagatcatcaacactttccacatagcctcatccttcgggaaatggtttgagggcccagaccaggctttcccgaatacctcagccctggcggggctcagccccgtcctgcacagcttccgcgtgtttgacgtgcgacacaaaagcaacaaggattacctgaacagcgacggttctgccaaaagctcctgcgtatccaaagatgttcccaacaatgtggacctgtccaaattcgatggctttgtgctctatggcaagaggaagcccatcctgatgtgtttcttgtgcaaactctcctttgggtacgtccgttcgtttgtgacccacgcggtgcatgaccatcgaatgaccctgagcgaagacgagcggaaaattcttagcaataagaacatctccgctatcatccaagggatcggcaaagacaaggaaccccttgtaagttttctggaaccaaaaaacaaaaactttcaacaccctttagtttccacagctaacctcataggccccggacacagtttttatggtaaatttagtggcattcgaatggaaggggaggaagctctcccagcgggctccgccgctggccccgagcagccccaggctggtctcttgacccccagcaccctgttgaaccttggcgggctcaccagctcggtactgaagacccccattacctcagtccccctggggcctctggcttccagtcctaccaaatcctcagagggcaaggactctggggcggcagaaggagagaagcaggaagtgggcgacggggattgcttctctgagaaggtagagccagccgaagaggaggcggaggaggaagaggaggaggaagaggcggaggaggaggaggaagaagaggaggaggaagaagaggaggaggaagacgagggttgcaaaggactctttccaagcgagttggatgaggaactggaggacaggccccatgaggagcctggggccgcagcaggtagtagcagcaaaaaggaccttgctctctcaaaccaaagcatttctaactcccccttaatgcctaacgtgctccagaccctgtcgaggggcacagcttctactagttctaattctgcttcttcctttgttgtctttgatggtgcgaacaggaggaatcgtttaagctttaacagtgagggcgtcagggccaatgtggcagagggcggcaggaggctggacttcgctgacgaaagtgccaataaagacaatgccacagcaccagaaccaaatgaaagcacagagggtgacgatgggggcttcgttccccatcaccagcacgctggctccctctgcgagcttggggttggggagtgcccctcggggagtggcgtggagtgccccaaatgcgacacggtcctgggctcctcccgctcgctgggcggccacatgaccatgatgcattctcgtaactcgtgtaagacactcaagtgccccaagtgcaactggcactataagtaccagcagaccctggaggcacacatgaaggagaagcacccggagccggggggctcctgtgtctactgcaaaagcgggcagccccacccccggctggcacgaggcgagagctacacgtgtggttacaagcctttccgctgcgaggtgtgtaactactccacaactaccaaaggcaacctcagtattcatatgcagtctgacaagcatctcaacaacatgcagaacctgcagaatggagggggggagcaggtcttcagccacactgccggggcggcggcggcggcggtggctgcggcggcggcggcagccaatatcagtagctcctgcggggccccctcgccgaccaaaccaaaaaccaaacccacctggcggtgcgaggtgtgtgattatgagaccaacgtggccaggaacctccgcattcacatgaccagtgagaagcacatgcataacatgatgttactgcaacagaacatgacccagatccaacacaaccgccacctgggcctcggcagcctgccctcacccgccgaggccgagctctaccaatactacctggcccagaacatgaacctgcccaacctgaagatggacagtgctgcctcggacgcccagttcatgatgagcggattccagctggatcccgccgggcccatggccgccatgacgcctgctctagtgggcggtgagatccccctagacatgcggctcgggggcgggcagctggtgtcagaggagctgatgaacctgggcgagagcttcatccagaccaacgacccgtcgctgaagctcttccagtgcgccgtctgcaacaagttcacgacggacaacctggacatgctgggcctgcacatgaacgtggagcgcagcctgtcggaggacgagtggaaggcggtgatgggggactcataccagtgcaagctctgccgctacaacacccagctcaaggccaacttccagctgcactgcaagacagacaagcacgtgcagaagtaccagctggtggcccacatcaaggagggcggcaaggccaacgagtggaggctcaagtgtgtggccatcggcaaccccgtgcacctcaagtgcaacgcctgtgactactacaccaacagcctggagaagctgcggctgcacacggtcaactccaggcacgaggccagcctgaagttgtacaagcacctgcagcagcatgagagtggtgtagaaggtgagagctgctactaccactgcgttctgtgcaactactccaccaaggccaagctcaacctcatccagcatgtgcgctccatgaagcaccagcgaagcgagagcctgcgaaagctgcagcggctgcagaagggccttccagaggaggacgaggacctggggcagatcttcaccatccgcaggtgcccctccacggacccagaagaagccattgaagatgttgaaggacccagtgaaacagctgctgatccagaggagcttgctaaggaccaagagggcggagcatcgtccagccaagcagagaaggagctgacagattctcctgcaacctccaaacgcatctccttcccaggtagctcagagtctcccctctcttcgaagcgaccaaaaacagctgaggagatcaaaccggagcagatgtaccagtgtccctactgcaagtacagtaatgccgatgtcaaccggctccgggtgcatgccatgacgcagcactcggtgcaacccatgcttcgctgccccctgtgccaggacatgctcaacaacaagatccacctccagctgcacctcacccacctccacagcgtggcacctgactgcgtggagaagctcattatgacggtgaccacccctgagatggtgatgccaagcagcatgttcctcccagcagctgttccagatcgagatgggaattccaatttggaagaggcaggaaagcagcctgaaacctcagaggatctgggaaagaacatcttgccatccgcaagcacagagcaaagcggagatttgaaaccatcccctgctgacccaggctctgtgagagaagactcaggcttcatctgctggaagaaggggtgcaaccaggttttcaaaacttctgctgcccttcagacgcattttaatgaagtgcatgccaagaggcctcagctgccggtgtcagatcgccatgtgtacaagtaccgctgtaatcagtgtagcctggccttcaagaccattgaaaagttgcagctccattctcagtaccatgtgatcagagctgccaccatgtgctgtctttgtcagcgcagtttccgaactttccaggctctgaagaagcaccttgagacaagccacctggagctgagtgaggctgacatccaacagctttatggtggcctgctggccaatggggacctcctggcaatgggagaccccactctggcagaggaccataccataattgttgaggaagacaaggaggaagagagtgacttggaagataaacagagcccaacgggcagtgactctgggtcagtacaagaagactcgggctcagagccaaagagagctctgcctttcagaaaaggtcccaattttactatggaaaagttcctagacccttctcgcccttacaagtgtaccgtctgcaaggaatctttcactcaaaagaatatcctgctagtacactacaattctgtctcccacctgcataagttaaagagagcccttcaagaatcagcaaccggtcagccagaacccaccagcagcccagacaacaaaccttttaagtgtaacacttgtaatgtggcctacagccagagttccactctggagatccatatgaggtctgtgttacatcaaaccaaggcccgggcagccaagctggaggctgcaagtggcagcagcaatgggactgggaacagcagcagtatttccttgagctcctccacgccaagtcctgtgagcaccagtggcagtaacacctttaccacctccaatccaagcagtgctggcattgctccaagctctaacttactaagccaagtgcccactgagagtgtagggatgccacccctggggaatcctattggtgccaacattgcttccccttcagagcccaaagaggccaatcggaagaaactggcagatatgattgcatccaggcagcagcaacaacagcagcagcaacagcaacaacaacaacaacaacaacaacaacaagcacaaacgctggcccaggcccaggctcaagttcaagctcacctgcagcaggagctgcagcaacaggctgccctgatccagtctcagctgtttaaccccaccctccttcctcacttccccatgacaactgagaccctgctgcaactacagcagcagcagcacctcctcttccctttctacatccccagtgctgagttccagcttaaccccgaggtgagcttgccagtgaccagtggggcactgacactgactgggacaggcccaggcctgctggaagatctgaaggctcaggttcaggtcccacagcagagccatcagcagatcttgccgcagcagcagcagaaccaactctctatagcccagagtcactctgccctccttcagccaagccagcaccccgaaaagaagaacaaattggtcatcaaagaaaaggaaaaagaaagccagagagagagggacagcgccgaggggggagagggcaacaccggtccgaaggaaacactgccagatgccttgaaggccaaagagaagaaagagttggcaccagggggtggttctgagccttccatgctccctccacgcattgcttcagatgccagagggaacgccaccaaggccctgctggagaactttggctttgagttggtcatccagtataatgagaacaagcagaaggtgcagaaaaagaatgggaagactgaccagggagagaacctggaaaagctcgagtgtgactcctgcggcaagttgttttccaacatcttgattttaaagagtcatcaagagcacgttcatcagaattactttcctttcaaacagctcgagaggtttgccaaacagtacagagaccactacgataaactgtacccactgaggccccagaccccagagccaccaccacctccccctccaccccctccacccccacttccggcagcgccgcctcagccggcgtccacaccagccatccccgcatcagccccacccatcacctcacctacaattgcaccggcccagccatcagtgccgctcacccagctctccatgccgatggagctgcccatcttctcgccgctgatgatgcagacgatgccgctgcagaccttgccggctcagctacccccgcagctgggacctgtggagcctctgcctgcggacctggcccaactctaccagcatcagctcaatccaaccctgctccagcagcagaacaagaggcctcgcaccaggatcacagatgatcagctccgagtcttgcggcaatattttgacattaacaactcccccagtgaagagcaaataaaagagatggcagacaagtccgggttgccccagaaagtgatcaagcactggttcaggaacactctcttcaaagagaggcagcgtaacaaggactccccttacaacttcagtaatcctcctatcaccagcctggaggagctcaagattgactcccggcccccttcgccggaacctccaaagcaggagtactggggaagcaagaggtcttcaagaacaaggtttacggactaccagctgagggtcttacaggacttcttcgatgccaatgcttacccaaaggatgatgaatttgagcaactctctaatttactgaaccttccaacccgagtgatagtggtgtggtttcagaatgcccgacagaaggccaggaagaattatgagaatcagggagagggcaaagatggagagcggcgtgagcttacaaatgatagatacattcgaacaagcaacttgaactaccagtgcaaaaaatgtagcctggtgtttcagcgcatctttgatctcatcaagcaccagaagaagctgtgttacaaggatgaggatgaggaggggcaggacgacagccaaaatgaggattccatggatgccatggaaatcctgacgcctaccagctcatcctgcagtaccccgatgccctcacaggcttacagcgccccagcaccatcagccaataatacagcttcctccgctttcttgcagcttacagcggaggctgaggaactggccaccttcaattcaaaaacagaggcaggcgatgagaaaccaaagctggcggaagctcccagtgcacagccaaaccaaacccaagaaaagcaaggacaaccaaagccagagctgcagcagcaagagcagcccgagcagaagaccaacactccccagcagaagctcccccagctggtgtccctgccttcgttgccacagcctcctccacaagcgccccctccacagtgccccttaccccagtcgagccccagtccttcccagctctcccacctgcccctcaagcccctccacacatcaactcctcaacagctcgcaaacctacctcctcagctaatcccctaccagtgtgaccagtgtaagttggcatttccgtcatttgagcactggcaggagcatcagcagctccacttcctgagcgcgcagaaccagttcatccacccccagtttttggacaggtccctggatatgcctttcatgctctttgatcccagtaacccactcctggccagccagctgctctctggggccatacctcagattccagcaagctcagccacttctccttcaactccaacctccacaatgaacactctcaagaggaagctggaggaaaaggccagtgcaagccctggcgaaaacgacagtgggacaggaggagaagagcctcagagagacaagcgtttgagaacaaccatcacaccggaacaactagaaattctctaccagaagtatctactggattccaatccgactcgaaagatgttggatcacattgcacacgaggtgggcttgaagaaacgtgtggtacaagtctggtttcagaacacccgagctcgggaaaggaaaggacagttccgggctgtaggcccagcgcaggcccacaggagatgccctttttgcagagcgctcttcaaagccaagactgctcttgaggctcatatccggtcccgtcactggcatgaagccaagagagctggctacaacctaactctgtctgcgatgctcttagactgtgatgggggactccagatgaaaggagatatttttgacggaactagcttttcccacctacccccaagcagtagtgatggtcagggtgtccccctctcacctgtgagtaaaaccatggaattgtcacccagaactcttctaagcccttcctccattaaggtggaagggattgaagactttgaaagcccctccatgtcctcagttaatctaaactttgaccaaactaagctggacaacgatgactgttcctctgtcaacacagcaatcacagataccacaactggagacgagggcaacgcagataacgacagtgcaacgggaatagcaactgaaaccaaatcctcttctgcacccaacgaagggttgaccaaagcggccatgatggcaatgtctgagtatgaagatcggttgtcatctggtctggtcagcccggccccgagcttttatagcaaggaatatgacaatgaaggtacagtggactacagtgaaacctcaagccttgcagatccctgctccccgagtcctggtgcgagtggatctgcaggcaaatctggtgacagcggagatcggcctgggcagaaacgttttcgcactcaaatgaccaatctgcagctgaaggtcctcaagtcatgctttaatgactacaggacacccactatgctagaatgtgaggtcctgggcaatgacattggactgccaaagagagtcgttcaggtctggttccagaatgcccgggcaaaagaaaagaagtccaagttaagcatggccaagcattttggtataaaccaaacgagttatgagggacccaaaacagagtgcactttgtgtggcatcaagtacagcgctcggctgtctgtacgtgaccatatcttttcccaacagcatatctccaaagttaaagacaccattggaagccagctggacaaggagaaagaatactttgacccagccaccgtacgtcagttgatggctcaacaagagttggaccggattaaaaaggccaacgaggtccttggactggcagctcagcagcaagggatgtttgacaacacccctcttcaggcccttaaccttcctacagcatatccagcgctccagggcattcctcctgtgttgctcccgggcctcaacagcccctccttgccaggctttactccatccaacacagctttaacgtctcctaagccgaacttgatgggtctgcccagcacaactgttccttcccctggcctccccacttctggattaccaaataaaccgtcctcagcgtcgctgagctccccaaccccagcacaagccacgatggcgatgggccctcagcaacccccccagcagcagcagcagcagcagcaaccacaggtgcagcagcctcccccgccgccagcagcccagccgccacccacaccacagctcccactgcaacagcagcagcaacgcaaggacaaagacagtgagaaagtaaaggagaaggaaaaggcacacaaagggaaaggggaacccctgcctgtccccaagaaggagaaaggagaggcccccacggcaactgcagccacgatctcagccccgctgcccaccatggagtatgcggtagaccctgcacagctgcaggccctgcaggccgcgttgacttcggaccccacagcattgctcacaagccagttccttccttactttgtaccaggcttttctccttattatgctccccagatccctggcgccctgcagagcgggtacctgcagcctatgtatggcatggaaggcctgttcccctacagccctgcactgtcgcaggccctgatggggctgtccccaggctccctactgcagcagtaccagcaataccagcagagtctgcaggaggcaattcagcagcagcagcagcggcaactacagcagcagcagcagcaaaaagtgcagcagcagcagcccaaagcaagccaaaccccagtcccccccggggctccttccccagacaaagaccctgccaaagaatcccccaaaccagaagaacagaaaaacaccccccgtgaggtgtcccccctcctgccgaaactccctgaagagccagaagcagaaagcaaaagtgcggactccctctacgaccccttcattgttccaaaggtgcagtacaagttggtctgccgcaagtgccaggcgggcttcagcgacgaggaggcagcgaggagccacctgaagtccctctgcttcttcggccagtctgtggtgaacctgcaagagatggtgcttcacgtccccaccggcggcggcggcggtggcagtggcggcggcggcggcggtggcggcggcggcggcggcggcggctcgtaccactgcctggcgtgcgagagcgcgctctgtggggaggaagctctgagtcaacatctcgagtcggccttgcacaaacacagaacaatcacgagagcagcaagaaacgccaaagagcaccctagtttattacctcactctgcctgcttccccgatcctagcaccgcatctacctcgcagtctgccgctcactcaaacgacagcccccctcccccgtcggccgccgccccctcctccgcttccccccacgcctccaggaagtcttggccgcaagtggtctcccgggcttcggcagcgaagcccccttcttttcctcctctctcctcatcttcaacggttacctcaagttcatgcagcacctcaggggttcagccctcgatgccaacagacgactattcggaggagtctgacacggatctcagccaaaagtccgacggaccggcgagcccggtggagggtcccaaagaccccagctgccccaaggacagtggtctgaccagtgtaggaacggacaccttcagattgtaagctttgaagatgaacaatacaaacaaatgaatttaaatacaaaaattaataacaaaccaatttcaaaaatagactaactgcaattccaaagcttctaaccaaaaaacaaaaaaaaaaaaaaaaagaaaaaaaagaaaaagcgtgggttgttttcccatatacctatctatgccggtgattttacattcttgtctttttcttttcttttaatattaaaaaaaaaaaaaaagccctaaccctgttacattgtgtccttttgaaggtactattggtctgggaaacagaagtccgcagggcctccctaatgtctttggagcttaaaccccttgtatatttgccccttttcaataaacgccccacgctgatagcacagaggagcccggcatgcactgtatgggaaagcagtccaccttgttacagttttaaatttcttgctatcttagcattcagataccaatggcttgctaaaagaaaaaaagaaatgtaatgtctttttattctcaggtcaatcgctcacactttgttttcagaatcattgttttatatattattgttttttcagtttttttttttttttttgttccagaaaagattttttgttttgttaacttaaaaatgggcagaaagtattcaagaaaaacaatgtgaactgctttagctttctggggatttttaaggatagcttttctgctgaagccaatttcaaggggaaaagttaagcactcccactttcaaaaaaaaaaaaaaataataacccacacacacaaagagtgttgaggacttgtagcttaaaaaaaataagttttaaaaactgactttctgtatttatgatagatatgaccatttttggtgttgagtagattgttgcattggaaatgaactgaagcagtatggtagatttaaaaggaaaaaaaaaaaaaaaccttttgtgtacatttagctttttgtatggtccagctgacagctcctcatttgatgttgtcttgttcattcctagcagatgatagattgcaatccgttgattcgcctaagcttttctccccttgtcccttaattccactttctctttcttgtcccttaattccactttctctttccttctcccacctcccgtcctataatctcccacttaaggtagctgccttcatttcttagagggagctgcagaattattttataaaactaaagaaagaatttcaagggattctaggggtcattaggatcctcacagattatttttggttggggagttgaaactttttaaaggcatataattctagttacctgtgtctgttagctttgtgcatttattttttatttatccttcttttggcttttttttctttgtaccccttcttttcctccttgtttggtaggagcttcaaatattctttttttttctatactaaaggatttgtttccatttgtgtaattggctgtgtacttttcttttctaaaaaaagtttttggttagggatttggtttttggttttgtgtttgttttttctttcctctctcagaaaaaaaaatttcatgctttaaataaaatccaaagacacaccctttcactgctgatgcagaaaaaagggaaagggttcttgttacttgagaatttgtttctgatttaaacaaacaagacttagtttaataaaagaaagagaaaaacaaaagattcccaggttgttatgtgcttcttctgcaagcagagaggcaaatgttaatgacaattccatataccaaaagacacattttttacttcaaagttttgtccttgtgttaggcagtctgagcagcgagtgatccagagcgcagccaacaaagcagcagatagcagtgtacagaaagcaaaaaaggaactgtatgtgaggcacttgtttctgttaatatccatattcctgttaacacacaccctttctcatgtaaaaagaaaaataaataaatggtctgaactttgaaaactttgtgctgctaaaacatagattttggagacaaataaatagatgctttgctgtttcactttcatagctaaacatcaacagaaaccatctccccttgcccccaaagtgtgaaatccttcttcccttcgttttcttccttatgtttcaaaagggaactttgaagactgtgaatacaggttccattggtcacctttcgggcttctttccccagtgctgaagccactcatcgactttgcaaaagactggagcattccaagatctgaaaatggattttttttctttttttcttttttagccgggactattttatttttatgaatttgtttttagtttaatgaaatagtagatcctgaaatgttgtacatatttctaactaggctgatgcacagtgcaaattccttttttaattgttttttttaagtagaaatactaaagaaagaataccatctaactattcataccagtatccagttgtagcataaggtgtcaaaagcaagtacgcaaaacatttactgttttaacaagctatttccttttaacaagaaatcttgtatttcttcctgtgtttgagatgaacatttttaaattttaaagttgtacagttttttgttttccattattttatcttgtttgtaactctatgaaatatatatatatatattttttgccatttaactgttgtatgttactctgtgtctgtaccatatagaaaaaaaattgtttttgtttttggttctctatgtgatatcagttaacaatgtaacactagctttacctgtcaaattctgctaggtcttctctgaaaacgttgtttttaaaaatgatattgcttggtaatagtgcaatttctatccttttccctcccccctcaacttttaagttcttttctttataattttgctgccccctccctgatggtttgggtttttgtttttgtttttgtttttttttttcatggagctactatgccatcctccctctgtgaggcagagtgactgtcagtgttttgttatgccatgccttgagctgtgggtgtttggcgacaataaggtggttgaatagattggctgagcacacttccacccacctagtgttctcagaggggttatgtgattgtttcaacctggagtgggttgcacccttaatgctttcctctgcaactaaaccgcccacatatatgttcattgaaaaaagtaagaataattctcagcactaacccagaagtagcaaagcagtcagtgatggtgaacattagaggtcaaacatgagttagatgtttgtgggctgacagccatcgtggctatgaccagtactatttacaaagcatgaattcactacaatgctcaactgtttgtttagctttatctcacttggggaatttattcctgtctgctgcattgtaggtagctgggtaggatatatttccacttgctttttaaattagttcttcacctccattgacactcgttttttggttttctccctatagtgtgggttggtgctagacaccagtctgacccacagaatgggagttatttcatccatctttcctccatccttccaaaaaccacatatctacacaaggaaaaatttaatacatctaggaattttttttttaattacaagctatttaaagagatgaatgtggccaaagttttacacaattgaaaataaagtaaaacagacggcatgtgtttaaacctgagtttatcaggcatggcaggaagttgcaggagagagaggcagtgacccaagccagtgcacttgatgttcatggacatatattttttttaaataataaattaaaacattttaaatagaagcataaattgagttgtttgttggcgctgagatactgcccactgtgaaacaaagctttgactagttttttgtttgtttactttcttcaggggggaggggggcaagtttgggtaggaaagaaagcataaatgaacgtgaccctgaggtgaagaggtatatgaacagcctttgcaatgtacaaaaagaaaaaaaaacaaaaaacaacaaaaaaaatagagcaagtgaaaccaaaaatgatgttcttggtgtttttctataatgtagtcttgttagcttttttgttactgtaacaatgctgatctcgaactgtaccaaaatacatggagactaacaaacagaaccacatggaactttcaaactgaaaaaaaaatttgtcacaaaaactttgttgtcatagttaagttgattgtagatggtaattgaatatactcctttgaaaatatttcatcaagtatgtttcctgctcattgtgatacattaaaaaaaaaatatgagcaaaa

SEQ ID NO: 34781 - DNA, 9671 bp, Homo sapiens
  source 1..9671: mol_type = unassigned DNA
aatttaaagtggtctctattcgaagtctctgctctttcacttaaacctttactctaagctgtccccctccactaatgcccccattctttggagatgctcttttcctagttaatttaaacattgctgcgtttgcttagagagagagagagagagagagagagagagagagagagaaaggggaaaataataagaaagaaaagagaagggggggaagaagaaaggaaaaaaaaaatcttaaaaagattcttagccaggttcctattgttgctcctatgcattccacttctcggtgtgtgtgtgcgtgtgtgtgtgtgtgtgtgtgtgtgcgcgcgctcgtgtgtgtgtcgtgtgtgtgtgtgtgtgtgtttttaatacatgcataaacttttggagcctctctccctcttctaggctcttctcccatcctctcttcctgctctccttgccctgctcatcactttcccctgtttttttttttttttcctcccttcctcccctctgcctccctccacctcccccttttcttttttgctgaatcttattgatccagaaggtggctaattagcccttcccgtcgtgcctgggtaatgaagcacatgcgcactgaattaatcacagccattttttgcaggaaactaattagcagaataaagatccaaagacttttttttcttttcactcatcagctcccacttccagcgcgtcccctccgaccgctgcagccgccaccgccgccgcctcctcctcctcctcctcccggccgcagccgccgccgccgcctgctttgcatcccaattacagcctagagccgctgccgccgccgccgccgcttctcttccgtggcccctgcccgctccgggggctgtaaactccccgccaaccatgctgctcggcggcagcggcggcggcggctccggctccccggctgcggccgcctcccgccccgggctccgccgagcgcgctccagctccgccgccgccgccgccgccgccgccgccgccagcagcgcgtcctccgccgccgccgacccccgccagccgccgctgctgccttgatgggctccgcggcccgagcgcctcttttcgggattaaaagcgccgccagctcccgccgccgccgccgtcgccagcagcgccgctgcagccgccgccgccggagaagcaaccgctgggcggtgagatccccctagacatgcggctcgggggcgggcagctggtgtcagaggagctgatgaacctgggcgagagcttcatccagaccaacgacccgtcgctgaagctcttccagtgcgccgtctgcaacaagttcacgacggacaacctggacatgctgggcctgcacatgaacgtggagcgcagcctgtcggaggacgagtggaaggcggtgatgggggactcataccagtgcaagctctgccgctacaacacccagctcaaggccaacttccagctgcactgcaagacagacaagcacgtgcagaagtaccagctggtggcccacatcaaggagggcggcaaggccaacgagtggaggctcaagtgtgtggccatcggcaaccccgtgcacctcaagtgcaacgcctgtgactactacaccaacagcctggagaagctgcggctgcacacggtcaactccaggcacgaggccagcctgaagttgtacaagcacctgcagcagcatgagagtggtgtagaaggtgagagctgctactaccactgcgttctgtgcaactactccaccaaggccaagctcaacctcatccagcatgtgcgctccatgaagcaccagcgaagcgagagcctgcgaaagctgcagcggctgcagaagggccttccagaggaggacgaggacctggggcagatcttcaccatccgcaggtgcccctccacggacccagaagaagccattgaagatgttgaaggacccagtgaaacagctgctgatccagaggagcttgctaaggaccaagagggcggagcatcgtccagccaagcagagaaggagctgacagattctcctgcaacctccaaacgcatctccttcccaggtagctcagagtctcccctctcttcgaagcgaccaaaaacagctgaggagatcaaaccggagcagatgtaccagtgtccctactgcaagtacagtaatgccgatgtcaaccggctccgggtgcatgccatgacgcagcactcggtgcaacccatgcttcgctgccccctgtgccaggacatgctcaacaacaagatccacctccagctgcacctcacccacctccacagcgtggcacctgactgcgtggagaagctcattatgacggtgaccacccctgagatggtgatgccaagcagcatgttcctcccagcagctgttccagatcgagatgggaattccaatttggaagaggcaggaaagcagcctgaaacctcagaggatctgggaaagaacatcttgccatccgcaagcacagagcaaagcggagatttgaaaccatcccctgctgacccaggctctgtgagagaagactcaggcttcatctgctggaagaaggggtgcaaccaggttttcaaaacttctgctgcccttcagacgcattttaatgaagtgcatgccaagaggcctcagctgccggtgtcagatcgccatgtgtacaagtaccgctgtaatcagtgtagcctggccttcaagaccattgaaaagttgcagctccattctcagtaccatgtgatcagagctgccaccatgtgctgtctttgtcagcgcagtttccgaactttccaggctctgaagaagcaccttgagacaagccacctggagctgagtgaggctgacatccaacagctttatggtggcctgctggccaatggggacctcctggcaatgggagaccccactctggcagaggaccataccataattgttgaggaagacaaggaggaagagagtgacttggaagataaacagagcccaacgggcagtgactctgggtcagtacaagaagactcgggctcagagccaaagagagctctgcctttcagaaaaggtcccaattttactatggaaaagttcctagacccttctcgcccttacaagtgtaccgtctgcaaggaatctttcactcaaaagaatatcctgctagtacactacaattctgtctcccacctgcataagttaaagagagcccttcaagaatcagcaaccggtcagccagaacccaccagcagcccagacaacaaaccttttaagtgtaacacttgtaatgtggcctacagccagagttccactctggagatccatatgaggtctgtgttacatcaaaccaaggcccgggcagccaagctggaggctgcaagtggcagcagcaatgggactgggaacagcagcagtatttccttgagctcctccacgccaagtcctgtgagcaccagtggcagtaacacctttaccacctccaatccaagcagtgctggcattgctccaagctctaacttactaagccaagtgcccactgagagtgtagggatgccacccctggggaatcctattggtgccaacattgcttccccttcagagcccaaagaggccaatcggaagaaactggcagatatgattgcatccaggcagcagcaacaacagcagcagcaacagcaacaacaacaacaacaacaacaacaacaagcacaaacgctggcccaggcccaggctcaagttcaagctcacctgcagcaggagctgcagcaacaggctgccctgatccagtctcagctgtttaaccccaccctccttcctcacttccccatgacaactgagaccctgctgcaactacagcagcagcagcacctcctcttccctttctacatccccagtgctgagttccagcttaaccccgaggtgagcttgccagtgaccagtggggcactgacactgactgggacaggcccaggcctgctggaagatctgaaggctcaggttcaggtcccacagcagagccatcagcagatcttgccgcagcagcagcagaaccaactctctatagcccagagtcactctgccctccttcagccaagccagcaccccgaaaagaagaacaaattggtcatcaaagaaaaggaaaaagaaagccagagagagagggacagcgccgaggggggagagggcaacaccggtccgaaggaaacactgccagatgccttgaaggccaaagagaagaaagagttggcaccagggggtggttctgagccttccatgctccctccacgcattgcttcagatgccagagggaacgccaccaaggccctgctggagaactttggctttgagttggtcatccagtataatgagaacaagcagaaggtgcagaaaaagaatgggaagactgaccagggagagaacctggaaaagctcgagtgtgactcctgcggcaagttgttttccaacatcttgattttaaagagtcatcaagagcacgttcatcagaattactttcctttcaaacagctcgagaggtttgccaaacagtacagagaccactacgataaactgtacccactgaggccccagaccccagagccaccaccacctccccctccaccccctccacccccacttccggcagcgccgcctcagccggcgtccacaccagccatccccgcatcagccccacccatcacctcacctacaattgcaccggcccagccatcagtgccgctcacccagctctccatgccgatggagctgcccatcttctcgccgctgatgatgcagacgatgccgctgcagaccttgccggctcagctacccccgcagctgggacctgtggagcctctgcctgcggacctggcccaactctaccagcatcagctcaatccaaccctgctccagcagcagaacaagaggcctcgcaccaggatcacagatgatcagctccgagtcttgcggcaatattttgacattaacaactcccccagtgaagagcaaataaaagagatggcagacaagtccgggttgccccagaaagtgatcaagcactggttcaggaacactctcttcaaagagaggcagcgtaacaaggactccccttacaacttcagtaatcctcctatcaccagcctggaggagctcaagattgactcccggcccccttcgccggaacctccaaagcaggagtactggggaagcaagaggtcttcaagaacaaggtttacggactaccagctgagggtcttacaggacttcttcgatgccaatgcttacccaaaggatgatgaatttgagcaactctctaatttactgaaccttccaacccgagtgatagtggtgtggtttcagaatgcccgacagaaggccaggaagaattatgagaatcagggagagggcaaagatggagagcggcgtgagcttacaaatgatagatacattcgaacaagcaacttgaactaccagtgcaaaaaatgtagcctggtgtttcagcgcatctttgatctcatcaagcaccagaagaagctgtgttacaaggatgaggatgaggaggggcaggacgacagccaaaatgaggattccatggatgccatggaaatcctgacgcctaccagctcatcctgcagtaccccgatgccctcacaggcttacagcgccccagcaccatcagccaataatacagcttcctccgctttcttgcagcttacagcggaggctgaggaactggccaccttcaattcaaaaacagaggcaggcgatgagaaaccaaagctggcggaagctcccagtgcacagccaaaccaaacccaagaaaagcaaggacaaccaaagccagagctgcagcagcaagagcagcccgagcagaagaccaacactccccagcagaagctcccccagctggtgtccctgccttcgttgccacagcctcctccacaagcgccccctccacagtgccccttaccccagtcgagccccagtccttcccagctctcccacctgcccctcaagcccctccacacatcaactcctcaacagctcgcaaacctacctcctcagctaatcccctaccagtgtgaccagtgtaagttggcatttccgtcatttgagcactggcaggagcatcagcagctccacttcctgagcgcgcagaaccagttcatccacccccagtttttggacaggtccctggatatgcctttcatgctctttgatcccagtaacccactcctggccagccagctgctctctggggccatacctcagattccagcaagctcagccacttctccttcaactccaacctccacaatgaacactctcaagaggaagctggaggaaaaggccagtgcaagccctggcgaaaacgacagtgggacaggaggagaagagcctcagagagacaagcgtttgagaacaaccatcacaccggaacaactagaaattctctaccagaagtatctactggattccaatccgactcgaaagatgttggatcacattgcacacgaggtgggcttgaagaaacgtgtggtacaagtctggtttcagaacacccgagctcgggaaaggaaaggacagttccgggctgtaggcccagcgcaggcccacaggagatgccctttttgcagagcgctcttcaaagccaagactgctcttgaggctcatatccggtcccgtcactggcatgaagccaagagagctggctacaacctaactctgtctgcgatgctcttagactgtgatgggggactccagatgaaaggagatatttttgacggaactagcttttcccacctacccccaagcagtagtgatggtcagggtgtccccctctcacctgtgagtaaaaccatggaattgtcacccagaactcttctaagcccttcctccattaaggtggaagggattgaagactttgaaagcccctccatgtcctcagttaatctaaactttgaccaaactaagctggacaacgatgactgttcctctgtcaacacagcaatcacagataccacaactggagacgagggcaacgcagataacgacagtgcaacgggaatagcaactgaaaccaaatcctcttctgcacccaacgaagggttgaccaaagcggccatgatggcaatgtctgagtatgaagatcggttgtcatctggtctggtcagcccggccccgagcttttatagcaaggaatatgacaatgaaggtacagtggactacagtgaaacctcaagccttgcagatccctgctccccgagtcctggtgcgagtggatctgcaggcaaatctggtgacagcggagatcggcctgggcagaaacgttttcgcactcaaatgaccaatctgcagctgaaggtcctcaagtcatgctttaatgactacaggacacccactatgctagaatgtgaggtcctgggcaatgacattggactgccaaagagagtcgttcaggtctggttccagaatgcccgggcaaaagaaaagaagtccaagttaagcatggccaagcattttggtataaaccaaacgagttatgagggacccaaaacagagtgcactttgtgtggcatcaagtacagcgctcggctgtctgtacgtgaccatatcttttcccaacagcatatctccaaagttaaagacaccattggaagccagctggacaaggagaaagaatactttgacccagccaccgtacgtcagttgatggctcaacaagagttggaccggattaaaaaggccaacgaggtccttggactggcagctcagcagcaagggatgtttgacaacacccctcttcaggcccttaaccttcctacagcatatccagcgctccagggcattcctcctgtgttgctcccgggcctcaacagcccctccttgccaggctttactccatccaacacagctttaacgtctcctaagccgaacttgatgggtctgcccagcacaactgttccttcccctggcctccccacttctggattaccaaataaaccgtcctcagcgtcgctgagctccccaaccccagcacaagccacgatggcgatgggccctcagcaacccccccagcagcagcagcagcagcagcaaccacaggtgcagcagcctcccccgccgccagcagcccagccgccacccacaccacagctcccactgcaacagcagcagcaacgcaaggacaaagacagtgagaaagtaaaggagaaggaaaaggcacacaaagggaaaggggaacccctgcctgtccccaagaaggagaaaggagaggcccccacggcaactgcagccacgatctcagccccgctgcccaccatggagtatgcggtagaccctgcacagctgcaggccctgcaggccgcgttgacttcggaccccacagcattgctcacaagccagttccttccttactttgtaccaggcttttctccttattatgctccccagatccctggcgccctgcagagcgggtacctgcagcctatgtatggcatggaaggcctgttcccctacagccctgcactgtcgcaggccctgatggggctgtccccaggctccctactgcagcagtaccagcaataccagcagagtctgcaggaggcaattcagcagcagcagcagcggcaactacagcagcagcagcagcaaaaagtgcagcagcagcagcccaaagcaagccaaaccccagtcccccccggggctccttccccagacaaagaccctgccaaagaatcccccaaaccagaagaacagaaaaacaccccccgtgaggtgtcccccctcctgccgaaactccctgaagagccagaagcagaaagcaaaagtgcggactccctctacgaccccttcattgttccaaaggtgcagtacaagttggtctgccgcaagtgccaggcgggcttcagcgacgaggaggcagcgaggagccacctgaagtccctctgcttcttcggccagtctgtggtgaacctgcaagagatggtgcttcacgtccccaccggcggcggcggcggtggcagtggcggcggcggcggcggtggcggcggcggcggcggcggcggctcgtaccactgcctggcgtgcgagagcgcgctctgtggggaggaagctctgagtcaacatctcgagtcggccttgcacaaacacagaacaatcacgagagcagcaagaaacgccaaagagcaccctagtttattacctcactctgcctgcttccccgatcctagcaccgcatctacctcgcagtctgccgctcactcaaacgacagcccccctcccccgtcggccgccgccccctcctccgcttccccccacgcctccaggaagtcttggccgcaagtggtctcccgggcttcggcagcgaagcccccttcttttcctcctctctcctcatcttcaacggttacctcaagttcatgcagcacctcaggggttcagccctcgatgccaacagacgactattcggaggagtctgacacggatctcagccaaaagtccgacggaccggcgagcccggtggagggtcccaaagaccccagctgccccaaggacagtggtctgaccagtgtaggaacggacaccttcagattgtaagctttgaagatgaacaatacaaacaaatgaatttaaatacaaaaattaataacaaaccaatttcaaaaatagactaactgcaattccaaagcttctaaccaaaaaacaa

SEQ ID NO: 34782 - DNA, 11091 bp, Homo sapiens
  source 1..11091: mol_type = unassigned DNA
atttttttaaacagggctaaaacgataataattagcagaataaagacatatcggattttcatttcctttcctccttttcccaaccccttcacaaccaaacagcgagaccgcggtcggcacatgctttaactcctcccggacccccgaggaccgctccatgccccccactttctgctccagcgtttttattttcacccaataaagttcgaggattattttttattttttttgtttttttaatgaaccctctcgttttacttggatgtgatcagctgtaagtaaaataaaagcaaaacaaaaaagaggcgaagatcgagtaggaactgcaggggaaatggaaagtccctgacaggctggatgaaatgagatccccatgtagcaattgccatggaaacctgtgactcccctcctatctcaaggcaggaaaatgggcagagcacatcaaagctatgtggaacgacacaacttgataatgaggtgccagagaaagttgcagggatggagcctgacagggaaaacagctccacagatgacaacctgaaaacggatgagcgcaaaagtgaagccttgctgggtttcagcgttgagaatgcagctgccactcaggttacctcagcaaaggagataccctgcaacgaatgtgccacttcttttcccagtttacagaaatacatggaacaccactgccctaatgcccgccttcctgtcctgaaggatgacaacgagagcgagatcagcgagttagaggacagtgacgtggaaaatctaacaggggagatcgtttaccagcctgatgggtcagcatatataattgaggactccaaagaaagtgggcagaatgcacagactggggcaaatagcaaactcttttctacagcgatgttcctggactccctggcatctgctggagagaagagtgatcagtctgcttctgcacctatgtcgttctacccacagatcatcaacacttttcatatcgcttcatccctcgggaaaccatttacagccgatcaggctttcccaaatacctcagcattagcaggagttggtcctgtgttgcacagtttccgtgtctatgatctccgacacaagagagagaaagactatctaaccagtgatggctcagccaaaaactcctgtgtgtccaaagatgtccctaacaatgtggacttgtccaaattcgatggttgtgttagcgatgggaaaaggaaacctgttttaatgtgtttcttgtgcaagttgtcttttggttatatcaggtcatttgtaacccatgctgtgcatgatcatcggatgaccctcaatgacgaggagcagaagctcctcagtaataaatgcgtctccgccataatacaggggattggcaaagacaaagaacctcttataagctttctggaaccaaaaaaatccacttctgtttatccccatttttctactacaaacctcataggacccgatccaaccttccgcggtttatggagcgcttttcatgttgaaaatggtgactctttgccggctggctttgccttcttaaaaggaagcgcgagcacctcgagctcagcagagcagccgctggggattacccaaatgccaaaggctgaagtgaatctgggggggctgtctagtttagtagtgaacaccccaattacctctgtctccctcagccactcatcgtctgagtctagcaagatgtcagagagcaaagaccaagagaacaactgtgaaaggccaaaagaaagcaacgttttacacccaaacggggagtgccctgtcaaaagtgaacccactgaaccgggagatgaggatgaagaagatgcgtactccaatgaacttgatgacgaggaagtattaggtgaactcaccgatagtattggtaacaaagatttccctctcttaaaccaaagcatttctcctttatcatccagtgtgctaaaatttattgaaaagggtacctcgtcctcctcggcgactgtttctgatgacacagaaaagaaaaaacagactgctgctgttagggccagtggcagtgttgctagtaactatggcatcagtggcaaggactttgcagacgcaagtgccagtaaagacagtgccacagctgctcatccaagtgaaatagcccggggagacgaagacagttcagccactcctcaccagcatggctttaccccgagtactcctggcacaccagggcctggaggagacggctcaccgggcagtggcatcgagtgtccaaagtgcgacactgtgttggggtcttcgaggtctcttggtggtcatatgactatgatgcactcgaggaactcatgcaaaaccctcaaatgtcctaaatgtaactggcactacaaatatcagcagaccctggaggcccatatgaaggagaaacaccctgagccgggtggctcttgtgtttattgtaagactggacagcctcaccccaggcttgcccggggtgagagttacacgtgtggctataaacccttccgttgtgaggtttgtaactactctaccactaccaaaggcaacctcagtattcatatgcagtcggacaagcacctgaacaatgttcagaatctccaaaatggcaatggtgagcaggtgtttggccactctgccccagcccccaacaccagcctcagtggctgcggaacaccctctccgtccaaacccaaacagaaacccacctggcggtgtgaagtttgtgattatgaaaccaatgtcgccaggaacctccgaattcatatgaccagcgaaaagcacatgcataatatgatgcttttgcagcagaacatgaagcagatccagcataatctgcacttgggcctcgccccggcggaagcagagctttatcagtactacctagcccagaacataggcctgaccggaatgaagctggaaaaccctgccgaccctcagctgatgatcaatccattccagctggatccagcgacagcagcggctttggcaccagggctcggagagctgtcaccttatatcagtgacccagcgctgaagctattccagtgtgctgtttgcaacaaattcacctctgacagcctggaggccctaagtgtgcatgtgagcagtgagcgctctctccctgaagaggaatggagggcagtaattggagatatctaccagtgcaagctctgcaactacaacactcagctcaaagccaacttccagctacactgcaagactgataaacatatgcagaaatatcaactggtggctcacattaaagaagggggcaaaagcaatgagtggaggttgaagtgtattgccattggcaaccctgttcacctaaaatgtaacgcctgtgactattacaccaacagtgtggataaattacgcttgcataccaccaatcacaggcacgaggcggccctgaagctctacaagcacttgcagaagcaagagggtgcagtgaatcccgaatcctgctattactactgtgccgtgtgtgattacaccaccaaggtcaagttgaatctggtacaacatgtccgttcggtgaagcatcagcagactgagggcctacggaagctccagctccaccagcaaggcctggcaccagaggaggacaacctcagtgagatcttttttgttaaagattgcccaccaaatgagcttgaaactgcctcattgggagccaggacttgtgatgatgatcttacagagcagcatgaggaggcagaaggagctattaagcctacagcagtggccgaggacgatgaaaaagacacaagtgagagagacaatagtgaaggcaaaaactctaataaagactctgttagtgtggcagggggtacccagccactcctgctggcaaaagaagaggatgttgcaacaaaaaggtcaaaacctacagaggacaataaattctgtcatgaacagttctatcaatgtccttattgtaactacaatagtagggaccaaagtcgtatccagatgcacgtcctatcacagcactcggtgcagccggtcatctgctgtcctctctgtcaggacgtcctcagcaacaaaatgcatctccaactgcatctgacgcatttgcacagtgtgtctccagactgtgtggagaagctgcttatgacagtgcctgtccctgatgtgatgatgccaaacagtatgctactgccagcagctgcctctgagaaatcagagcgggacacacctgcagccgtgacagctgaggggtctgggaaatattcaggtgaaagtccaatggatgacaaaagcatggcaggtctcgaggattcaaaggctaatgtggaagtaaagaatgaggagcagaaaccgactaaagaacccttggaagtctcagaatggaataaaaatagcagtaaggatgtgaaaatccccgacacactgcaagatcaattaaatgaacagcaaaaaaggcaaccgctctctgtttctgaccgtcatgtctacaagtatcgctgtaaccattgtagcttggctttcaaaactatgcagaagcttcagatacattcccagtatcatgcaattcgggctgcgacaatgtgtaacctctgccagcgcagtttccgtacattccaggctttaaaaaaacacttggaagcaggccaccctgaactgagtgaagctgaacttcaacagctatatgcctccttgcccgtgaatggagaactgtgggcagagagcgaaactatgtcccaggatgaccatggcctagagcaggaaatggagagagagtatgaggtggaccacgaagggaaagcaagtcctgtaggaagtgatagtagctctattccagatgacatgggctctgaaccaaagcggaccttaccttttagaaaagggcccaattttacgatggaaaaattccttgatccatctcgtccatataaatgtacagtgtgtaaagagtcattcacccaaaagaacattctcttggtccactataattcagtttctcacttgcataagctgaaaaaagttttgcaggaagcctccagtcctgtcccacaagaaaccaacagcaacacagataacaaaccctacaagtgcagcatctgcaatgttgcatacagccaaagctcaacattggaaatccacatgaggtctgtgctccaccagacaaaggctagggctgcaaagctggagcccagtggtcatgtggctggtgggcacagcattgcagcaaatgtcaacagccctggccaggggatgttagattccatgagtttagcagctgtaaacagcaaagatacccatttagatgccaaagaattaaataaaaagcaaactcctgatttaatctctgctcaacctgcacatcacccaccacagtcaccagcacaaattcagatgcaactacagcacgaattacaacagcaagccgcattctttcagcctcagtttctaaacccagcctttttgcctcattttcctatgaccccagaagcactgctgcagtttcagcagcctcagtttctctttccattttatatacctgggacggagttcagcttggggccagatttgggcttgccaggctctgccacatttgggatgcctggcatgacaggaatggctggctccttgcttgaagacctaaagcagcagattcaaacccaacatcacgttggtcaaactcaactccagatactacagcaacaagcacaacaataccaagccacacagccccagctgcagcctcaaaaacaacagcagcagccaccacctccacagcagcagcagcaacagcaggcaagcaaattattgaaacaagagcaaagtaacatagtgagtgcagactgccaaatcatgaaggatgtgccatcttataaggaggcagaagatatttctgaaaagccagaaaaaccaaagcaggaatttataagtgaaggtgaaggactcaaagaaggcaaagacacaaagaagcaaaaatccttggaaccatccatcccaccaccccgaatagcttcaggggccagaggaaatgctgccaaagcgttattggaaaactttggttttgaactggtcattcagtataacgaaaacaggcagaaggtacagaagaagggcaaaagtggtgaaggcgaaaacactgacaaactagaatgtggaacatgtggtaaattgttttccaatgttcttattttaaagagtcaccaagaacatgtacatgggcaattttttccatatgcagcgctagaaaaatttgctcgtcaatacagggaggcctatgacaagctttatccaatttctccatcttctccagaaacgccgcccccgccacctcctcctcctcccttgcctccggctcctccacagccttcttctatgggtcctgtaaagatccccaacacggtttctactcctctgcaagctccaccacccactcctcccccaccaccaccacctcctcctcctcctcctcctccccccccacctcctccaccttctgctcctccacaggtccaactgccggtttctctggacctgccgctctttccttccattatgatgcaacctgtgcaacaccctgcgcttcctccccagcttgccctgcagctgccacagatggacgcactctctgcagacctcacccaactttgccagcagcagctcggattagatcccaacttcttaagacattctcagttcaaacgcccacggacaagaattacagatgatcagctaaaaatcctgagggcttattttgacattaataattctccaagtgaagaacagatccaggaaatggcagagaaatctggcctctcccaaaaagttatcaaacactggtttagaaatacgctttttaaggaacgacagagaaataaagattcaccatacaacttcagtaaccctcctataacggttttagaagatatcagaattgatccacagcccacctctttagaacattacaaatctgatgcatcattcagtaaaaggtcttctagaacgagatttactgactaccagcttagggttctgcaagacttttttgacacaaacgcttacccaaaagatgatgaaatagaacaactctccactgttctcaatctgcctacccgggttattgttgtatggttccagaatgctcgtcagaaagcacgaaagagttatgagaatcaagcagaaacaaaagataatgaaaaaagagaactcactaatgaacggtacattcgaacaagcaacatgcagtaccagtgtaaaaagtgcaatgtggttttccccaggatctttgacttgattacgcatcagaaaaagcagtgttacaaggatgaagatgatgatgcccaagatgaaagccaaacagaagactccatggatgccactgatcaagtggtatacaagcattgcacagtgtctggccaaacggatgcagctaaaaacgctgctgcccctgcagcaagttctggctctgggaccagcacccccctgattccatcacccaaaccagaacctgagaagacttctccaaaacctgaatatcccgcagaaaagccaaagcagagtgacccctctcccccttctcaaggcaccaaaccagccctgccattagcatcgacttcctcggacccaccacaggcatccacagcccagccacagccacagccacagccaccaaaacaaccccaacttatcggaagacctccctcggcctctcaaacaccggtcccttccagtccactgcaaatttccatgacgtctctccagaacagtctacctccacagttactacaataccaatgtgatcagtgtacagttgccttcccaactctggaactctggcaggaacaccagcacatgcacttccttgctgctcaaaaccaattccttcactctccgttcttggaaaggcccatggacatgccctacatgatatttgaccccaacaatccgctgatgactggacaactgctgggcagttccctcactcaaatgccccctcaggccagttcctcccacaccacagcccccacaacggttgctgcttccctaaaaaggaaactagacgataaagaagataataattgcagtgaaaaagaaggagggaatagcggtgaagaccaacaccgagataaacgcttgagaaccacgatcaccccggaacagctggaaatactctatgaaaaatacttgctggattccaatcctaccagaaaaatgcttgatcatattgcccgcgaagtcgggctgaaaaaaagggtcgtgcaagtctggttccagaatacacgagcgcgggagaggaaaggccagttccgggcggtgggtccagcacagtctcataaacggtgtccgttttgccgagccctgtttaaagcaaagtcggccttagaaagccacattcgctctcggcactggaatgaaggaaagcaggcaggttacagcttgccaccaagccctttaatatccaccgaagatgggggagaaagcccacagaaatacatctattttgattacccatctttgccattaactaaaattgatctatcaagtgagaatgaattggcttctacagtgtcaacacctgttagtaaaacagcagagctgtcaccgaagaatcttttaagcccttcttcttttaaagcagagtgttctgaggatgtagagaatttaaatgcccctcctgctgaggctgggtatgatcaaaataaaaccgattttgatgagacttcatcgattaatacggcaatcagtgacgccaccaccggagacgagggaaacactgaaatggaaagcaccacaggaagttccggagatgtgaaaccggctttgtctcccaaagagccaaaaactctggatactctgccaaaacctgcaaccacacctaccacggaggtctgcgatgacaaatttctcttttctctcacaagcccatccatccatttcaatgacaaagatggcgaccacgaccaaagcttttacatcacagatgacccggatgacaacgccgaccgcagcgaaacgtccagcatagcggacccgagctccccaaatccattcggatccagcaatccctttaaatccaaaagtaatgatcggccgggtcacaagcgttttcgaacgcaaatgagcaatcttcaactcaaggttctcaaggcttgctttagtgactaccgaactccaaccatgcaagaatgtgaaatgttagggaatgagattggtctgcccaaacgcgtagtccaggtgtggttccaaaatgcaagggcaaaggaaaagaaatttaaaattaacatagggaagcctttcatgatcaatcaaggcggaacggaaggcaccaaaccagagtgtaccctctgcggggtgaagtactctgcccgcttgtccatcagagatcacattttctccaaacagcacatttcaaaagtgagggagaccgttggcagtcagctcgatcgggagaaagattacttggctccgaccacggttcggcagctgatggcacagcaagaacttgatcgtataaagaaagcttcagacgtgctgggcttgacggtacagcagccaggcatgatggacagcagttctctccacggcatcagcctgccaacagcctaccccggactccccggccttcctccagtccttctccccggaatgaacggtccatcctccttgccgggatttccacaaaattcaaacatagcatcaggcatgcttgggtttcctacttcagctacttcgtctcctgccctgtctctcagcagtgcccccaccaaacctttgctgcagactccaccacctccaccacctcctcctcctcctcctccttcatcctctctgtcaggacagcagaccgagcaacagaacaaagaatctgagaaaaagcaaactaagccaaacaaggtgaaaaaaatcaaagaggaggaattagaggccaccaaacccgaaaaacaccccaaaaaagaggaaaaaatctcatctgctctttcagtgttgggcaaagttgtaggtgaaacacatgtcgatcctattcagttgcaggcattacagaatgcaattgctggtgacccagcttcctttataggcggacagttcttgccatactttatccctgggtttgcttcttattttacacctcagctccctggaacagtgcaggggggatacttcccacctgtctgtggcatggagagcctctttccttatggccctacaatgccccagacactggcaggtctgtccccaggtgcactgttgcagcagtaccaacagtatcagcagaacctgcaggagtccctgcaaaagcagcaaaagcaacagcaagaacagcagcagaaaccagttcaggcaaagacatccaaagtagaaagtgaccagccgcaaaactccaacgatgcttcagaaacaaaggaagacaaaagtactgctacagaaagcacaaaagaagaaccccagttagaatccaaaagtgcagacttttcagacacttacgttgttccattcgtcaagtatgagtttatatgcagaaagtgccagatgatgtttactgatgaagacgccgcagtaaatcatcaaaagtccttctgttatttcggtcagcctttgattgacccacaagagacagtgcttcgtgtcccagtcagcaaatatcagtgtcttgcctgtgatgtggctatcagtgggaatgaagcacttagccaacacctccagtcaagcttgcacaaagagaaaacaatcaaacaagcaatgagaaatgccaaagagcatgttagattattacctcactcagtctgctcccctaatcctaacaccacatctacctcgcagtctgcagcttcttctaataacacctatcctcatctttcttgcttctccatgaagtcctggcctaatatccttttccaagcgtctgccaggagagctgcttctcccccttcttctcctccttccctttccttgccttcaacggttacctcaagtttgtgcagcacctcaggggttcaaacctcactacccacagaaagttgttcagatgagtctgacagtgagctgagccagaagctagaagacttagataattctttggaagtgaaggctaagcctgcttctggcctagatggtaatttcaatagcatccgaatggatatgttcagtgtgtag

SEQ ID NO: 34783 - DNA, 13909 bp, Homo sapiens
  source 1..13909: mol_type = unassigned DNA
atttttttaaacagggctaaaacgataataattagcagaataaagacatatcggattttcatttcctttcctccttttcccaaccccttcacaaccaaacagcgagaccgcggtcggcacatgctttaactcctcccggacccccgaggaccgctccatgccccccactttctgctccagcgtttttattttcacccaataaagttcgaggattattttttattttttttgtttttttaatgaaccctctcgttttacttggatgtgatcagctgtaagtaaaataaaagcaaaacaaaaaagaggcgaagatcgagtaggaactgcaggggaaatggaaagtccctgacaggctggatgaaatgagatccccatgtagcaattgccatggaaacctgtgactcccctcctatctcaaggcaggaaaatgggcagagcacatcaaagctatgtggaacgacacaacttgataatgaggtgccagagaaagttgcagggatggagcctgacagggaaaacagctccacagatgacaacctgaaaacggatgagcgcaaaagtgaagccttgctgggtttcagcgttgagaatgcagctgccactcaggttacctcagcaaaggagataccctgcaacgaatgtgccacttcttttcccagtttacagaaatacatggaacaccactgccctaatgcccgccttcctgtcctgaaggatgacaacgagagcgagatcagcgagttagaggacagtgacgtggaaaatctaacaggggagatcgtttaccagcctgatgggtcagcatatataattgaggactccaaagaaagtgggcagaatgcacagactggggcaaatagcaaactcttttctacagcgatgttcctggactccctggcatctgctggagagaagagtgatcagtctgcttctgcacctatgtcgttctacccacagatcatcaacacttttcatatcgcttcatccctcgggaaaccatttacagccgatcaggctttcccaaatacctcagcattagcaggagttggtcctgtgttgcacagtttccgtgtctatgatctccgacacaagagagagaaagactatctaaccagtgatggctcagccaaaaactcctgtgtgtccaaagatgtccctaacaatgtggacttgtccaaattcgatggttgtgttagcgatgggaaaaggaaacctgttttaatgtgtttcttgtgcaagttgtcttttggttatatcaggtcatttgtaacccatgctgtgcatgatcatcggatgaccctcaatgacgaggagcagaagctcctcagtaataaatgcgtctccgccataatacaggggattggcaaagacaaagaacctcttataagctttctggaaccaaaaaaatccacttctgtttatccccatttttctactacaaacctcataggacccgatccaaccttccgcggtttatggagcgcttttcatgttgaaaatggtgactctttgccggctggctttgccttcttaaaaggaagcgcgagcacctcgagctcagcagagcagccgctggggattacccaaatgccaaaggctgaagtgaatctgggggggctgtctagtttagtagtgaacaccccaattacctctgtctccctcagccactcatcgtctgagtctagcaagatgtcagagagcaaagaccaagagaacaactgtgaaaggccaaaagaaagcaacgttttacacccaaacggggagtgccctgtcaaaagtgaacccactgaaccgggagatgaggatgaagaagatgcgtactccaatgaacttgatgacgaggaagtattaggtgaactcaccgatagtattggtaacaaagatttccctctcttaaaccaaagcatttctcctttatcatccagtgtgctaaaatttattgaaaagggtacctcgtcctcctcggcgactgtttctgatgacacagaaaagaaaaaacagactgctgctgttagggccagtggcagtgttgctagtaactatggcatcagtggcaaggactttgcagacgcaagtgccagtaaagacagtgccacagctgctcatccaagtgaaatagcccggggagacgaagacagttcagccactcctcaccagcatggctttaccccgagtactcctggcacaccagggcctggaggagacggctcaccgggcagtggcatcgagtgtccaaagtgcgacactgtgttggggtcttcgaggtctcttggtggtcatatgactatgatgcactcgaggaactcatgcaaaaccctcaaatgtcctaaatgtaactggcactacaaatatcagcagaccctggaggcccatatgaaggagaaacaccctgagccgggtggctcttgtgtttattgtaagactggacagcctcaccccaggcttgcccggggtgagagttacacgtgtggctataaacccttccgttgtgaggtttgtaactactctaccactaccaaaggcaacctcagtattcatatgcagtcggacaagcacctgaacaatgttcagaatctccaaaatggcaatggtgagcaggtgtttggccactctgccccagcccccaacaccagcctcagtggctgcggaacaccctctccgtccaaacccaaacagaaacccacctggcggtgtgaagtttgtgattatgaaaccaatgtcgccaggaacctccgaattcatatgaccagcgaaaagcacatgcataatatgatgcttttgcagcagaacatgaagcagatccagcataatctgcacttgggcctcgccccggcggaagcagagctttatcagtactacctagcccagaacataggcctgaccggaatgaagctggaaaaccctgccgaccctcagctgatgatcaatccattccagctggatccagcgacagcagcggctttggcaccagggctcgtaaataatgagctgccgcctgaaatccggcttgccagtggtcagctaatgggtgatgacctgtccctccttactgcaggagagctgtcaccttatatcagtgacccagcgctgaagctattccagtgtgctgtttgcaacaaattcacctctgacagcctggaggccctaagtgtgcatgtgagcagtgagcgctctctccctgaagaggaatggagggcagtaattggagatatctaccagtgcaagctctgcaactacaacactcagctcaaagccaacttccagctacactgcaagactgataaacatatgcagaaatatcaactggtggctcacattaaagaagggggcaaaagcaatgagtggaggttgaagtgtattgccattggcaaccctgttcacctaaaatgtaacgcctgtgactattacaccaacagtgtggataaattacgcttgcataccaccaatcacaggcacgaggcggccctgaagctctacaagcacttgcagaagcaagagggtgcagtgaatcccgaatcctgctattactactgtgccgtgtgtgattacaccaccaaggtcaagttgaatctggtacaacatgtccgttcggtgaagcatcagcagactgagggcctacggaagctccagctccaccagcaaggcctggcaccagaggaggacaacctcagtgagatcttttttgttaaagattgcccaccaaatgagcttgaaactgcctcattgggagccaggacttgtgatgatgatcttacagagcagcagttgagatcgacctcagaagaacaaagtgaggaggcagaaggagctattaagcctacagcagtggccgaggacgatgaaaaagacacaagtgagagagacaatagtgaaggcaaaaactctaataaagactctgggataatcacaccagagaaggaactaaaagttagtgtggcagggggtacccagccactcctgctggcaaaagaagaggatgttgcaacaaaaaggtcaaaacctacagaggacaataaattctgtcatgaacagttctatcaatgtccttattgtaactacaatagtagggaccaaagtcgtatccagatgcacgtcctatcacagcactcggtgcagccggtcatctgctgtcctctctgtcaggacgtcctcagcaacaaaatgcatctccaactgcatctgacgcatttgcacagtgtgtctccagactgtgtggagaagctgcttatgacagtgcctgtccctgatgtgatgatgccaaacagtatgctactgccagcagctgcctctgagaaatcagagcgggacacacctgcagccgtgacagctgaggggtctgggaaatattcaggtgaaagtccaatggatgacaaaagcatggcaggtctcgaggattcaaaggctaatgtggaagtaaagaatgaggagcagaaaccgactaaagaacccttggaagtctcagaatggaataaaaatagcagtaaggatgtgaaaatccccgacacactgcaagatcaattaaatgaacagcaaaaaaggcaaccgctctctgtttctgaccgtcatgtctacaagtatcgctgtaaccattgtagcttggctttcaaaactatgcagaagcttcagatacattcccagtatcatgcaattcgggctgcgacaatgtgtaacctctgccagcgcagtttccgtacattccaggctttaaaaaaacacttggaagcaggccaccctgaactgagtgaagctgaacttcaacagctatatgcctccttgcccgtgaatggagaactgtgggcagagagcgaaactatgtcccaggatgaccatggcctagagcaggaaatggagagagagtatgaggtggaccacgaagggaaagcaagtcctgtaggaagtgatagtagctctattccagatgacatgggctctgaaccaaagcggaccttaccttttagaaaagggcccaattttacgatggaaaaattccttgatccatctcgtccatataaatgtacagtgtgtaaagagtcattcacccaaaagaacattctcttggtccactataattcagtttctcacttgcataagctgaaaaaagttttgcaggaagcctccagtcctgtcccacaagaaaccaacagcaacacagataacaaaccctacaagtgcagcatctgcaatgttgcatacagccaaagctcaacattggaaatccacatgaggtctgtgctccaccagacaaaggctagggctgcaaagctggagcccagtggtcatgtggctggtgggcacagcattgcagcaaatgtcaacagccctggccaggggatgttagattccatgagtttagcagctgtaaacagcaaagatacccatttagatgccaaagaattaaataaaaagcaaactcctgatttaatctctgctcaacctgcacatcacccaccacagtcaccagcacaaattcagatgcaactacagcacgaattacaacagcaagccgcattctttcagcctcagtttctaaacccagcctttttgcctcattttcctatgaccccagaagcactgctgcagtttcagcagcctcagtttctctttccattttatatacctgggacggagttcagcttggggccagatttgggcttgccaggctctgccacatttgggatgcctggcatgacaggaatggctggctccttgcttgaagacctaaagcagcagattcaaacccaacatcacgttggtcaaactcaactccagatactacagcaacaagcacaacaataccaagccacacagccccagctgcagcctcaaaaacaacagcagcagccaccacctccacagcagcagcagcaacagcaggcaagcaaattattgaaacaagagcaaagtaacatagtgagtgcagactgccaaatcatgaaggatgtgccatcttataaggaggcagaagatatttctgaaaagccagaaaaaccaaagcaggaatttataagtgaaggtgaaggactcaaagaaggcaaagacacaaagaagcaaaaatccttggaaccatccatcccaccaccccgaatagcttcaggggccagaggaaatgctgccaaagcgttattggaaaactttggttttgaactggtcattcagtataacgaaaacaggcagaaggtacagaagaagggcaaaagtggtgaaggcgaaaacactgacaaactagaatgtggaacatgtggtaaattgttttccaatgttcttattttaaagagtcaccaagaacatgtacatgggcaattttttccatatgcagcgctagaaaaatttgctcgtcaatacagggaggcctatgacaagctttatccaatttctccatcttctccagaaacgccgcccccgccacctcctcctcctcccttgcctccggctcctccacagccttcttctatgggtcctgtaaagatccccaacacggtttctactcctctgcaagctccaccacccactcctcccccaccttctgctcctccacaggtccaactgccggtttctctggacctgccgctctttccttccattatgatgcaacctgtgcaacaccctgcgcttcctccccagcttgccctgcagctgccacagatggacgcactctctgcagacctcacccaactttgccagcagcagctcggattagatcccaacttcttaagacattctcagttcaaacgcccacggacaagaattacagatgatcagctaaaaatcctgagggcttattttgacattaataattctccaagtgaagaacagatccaggaaatggcagagaaatctggcctctcccaaaaagttatcaaacactggtttagaaatacgctttttaaggaacgacagagaaataaagattcaccatacaacttcagtaaccctcctataacggttttagaagatatcagaattgatccacagcccacctctttagaacattacaaatctgatgcatcattcagtaaaaggtcttctagaacgagatttactgactaccagcttagggttctgcaagacttttttgacacaaacgcttacccaaaagatgatgaaatagaacaactctccactgttctcaatctgcctacccgggttattgttgtatggttccagaatgctcgtcagaaagcacgaaagagttatgagaatcaagcagaaacaaaagataatgaaaaaagagaactcactaatgaacggtacattcgaacaagcaacatgcagtaccagtgtaaaaagtgcaatgtggttttccccaggatctttgacttgattacgcatcagaaaaagcagtgttacaaggatgaagatgatgatgcccaagatgaaagccaaacagaagactccatggatgccactgatcaagtggtatacaagcattgcacagtgtctggccaaacggatgcagctaaaaacgctgctgcccctgcagcaagttctggctctgggaccagcacccccctgattccatcacccaaaccagaacctgagaagacttctccaaaacctgaatatcccgcagaaaagccaaagcagagtgacccctctcccccttctcaaggcaccaaaccagccctgccattagcatcgacttcctcggacccaccacaggcatccacagcccagccacagccacagccacagccaccaaaacaaccccaacttatcggaagacctccctcggcctctcaaacaccggtcccttccagtccactgcaaatttccatgacgtctctccagaacagtctacctccacagttactacaataccaatgtgatcagtgtacagttgccttcccaactctggaactctggcaggaacaccagcacatgcacttccttgctgctcaaaaccaattccttcactctccgttcttggaaaggcccatggacatgccctacatgatatttgaccccaacaatccgctgatgactggacaactgctgggcagttccctcactcaaatgccccctcaggccagttcctcccacaccacagcccccacaacggttgctgcttccctaaaaaggaaactagacgataaagaagataataattgcagtgaaaaagaaggagggaatagcggtgaagaccaacaccgagataaacgcttgagaaccacgatcaccccggaacagctggaaatactctatgaaaaatacttgctggattccaatcctaccagaaaaatgcttgatcatattgcccgcgaagtcgggctgaaaaaaagggtcgtgcaagtctggttccagaatacacgagcgcgggagaggaaaggccagttccgggcggtgggtccagcacagtctcataaacggtgtccgttttgccgagccctgtttaaagcaaagtcggccttagaaagccacattcgctctcggcactggaatgaaggaaagcaggcaggttacagcttgccaccaagccctttaatatccaccgaagatgggggagaaagcccacagaaatacatctattttgattacccatctttgccattaactaaaattgatctatcaagtgagaatgaattggcttctacagtgtcaacacctgttagtaaaacagcagagctgtcaccgaagaatcttttaagcccttcttcttttaaagcagagtgttctgaggatgtagagaatttaaatgcccctcctgctgaggctgggtatgatcaaaataaaaccgattttgatgagacttcatcgattaatacggcaatcagtgacgccaccaccggagacgagggaaacactgaaatggaaagcaccacaggaagttccggagatgtgaaaccggctttgtctcccaaagagccaaaaactctggatactctgccaaaacctgcaaccacacctaccacggaggtctgcgatgacaaatttctcttttctctcacaagcccatccatccatttcaatgacaaagatggcgaccacgaccaaagcttttacatcacagatgacccggatgacaacgccgaccgcagcgaaacgtccagcatagcggacccgagctccccaaatccattcggatccagcaatccctttaaatccaaaagtaatgatcggccgggtcacaagcgttttcgaacgcaaatgagcaatcttcaactcaaggttctcaaggcttgctttagtgactaccgaactccaaccatgcaagaatgtgaaatgttagggaatgagattggtctgcccaaacgcgtagtccaggtgtggttccaaaatgcaagggcaaaggaaaagaaatttaaaattaacatagggaagcctttcatgatcaatcaaggcggaacggaaggcaccaaaccagagtgtaccctctgcggggtgaagtactctgcccgcttgtccatcagagatcacattttctccaaacagcacatttcaaaagtgagggagaccgttggcagtcagctcgatcgggagaaagattacttggctccgaccacggttcggcagctgatggcacagcaagaacttgatcgtataaagaaagcttcagacgtgctgggcttgacggtacagcagccaggcatgatggacagcagttctctccacggcatcagcctgccaacagcctaccccggactccccggccttcctccagtccttctccccggaatgaacggtccatcctccttgccgggatttccacaaaattcaaacactttaacacctcccggtgcaggcatgcttgggtttcctacttcagctacttcgtctcctgccctgtctctcagcagtgcccccaccaaacctttgctgcagactccaccacctccaccacctcctcctcctcctcctccttcatcctctctgtcaggacagcagaccgagcaacagaacaaagaatctgagaaaaagcaaactaagccaaacaaggtgaaaaaaatcaaagaggaggaattagaggccaccaaacccgaaaaacaccccaaaaaagaggaaaaaatctcatctgctctttcagtgttgggcaaagttgtaggtgaaacacatgtcgatcctattcagttgcaggcattacagaatgcaattgctggtgacccagcttcctttataggcggacagttcttgccatactttatccctgggtttgcttcttattttacacctcagctccctggaacagtgcaggggggatacttcccacctgtctgtggcatggagagcctctttccttatggccctacaatgccccagacactggcaggtctgtccccaggtgcactgttgcagcagtaccaacagtatcagcagaacctgcaggagtccctgcaaaagcagcaaaagcaacagcaagaacagcagcagaaaccagttcaggcaaagacatccaaagtagaaagtgaccagccgcaaaactccaacgatgcttcagaaacaaaggaagacaaaagtactgctacagaaagcacaaaagaagaaccccagttagaatccaaaagtgcagacttttcagacacttacgttgttccattcgtcaagtatgagtttatatgcagaaagtgccagatgatgtttactgatgaagacgccgcagtaaatcatcaaaagtccttctgttatttcggtcagcctttgattgacccacaagagacagtgcttcgtgtcccagtcagcaaatatcagtgtcttgcctgtgatgtggctatcagtgggaatgaagcacttagccaacacctccagtcaagcttgcacaaagagaaaacaatcaaacaagcaatgagaaatgccaaagagcatgttagattattacctcactcagtctgctcccctaatcctaacaccacatctacctcgcagtctgcagcttcttctaataacacctatcctcatctttcttgcttctccatgaagtcctggcctaatatccttttccaagcgtctgccaggagagctgcttctcccccttcttctcctccttccctttccttgccttcaacggttacctcaagtttgtgcagcacctcaggggttcaaacctcactacccacagaaagttgttcagatgagtctgacagtgagctgagccagaagctagaagacttagataattctttggaagtgaaggctaagcctgcttctggcctagatggtaatttcaatagcatccgaatggatatgttcagtgtgtaggagtgaagacaggatcccgtgcttaaaaaaataaaaaataaaaaaataaaaaaaaaataagactttaactgcagttccaaagcttctctaacccaaaaattacagtaccaaatgattgactcaggattgtttttcccatattgatatgctggcaatataggatggtatgtaatggacagaactgatgcagatggttgaatgcgcttgtactatatgctaaaatatggaaaaggaaaaaaaaatctcacaagttcttttggaacttgtttcaagccaaaaactctcaagaaagcaaattgcacctcagctggattgatttccaaatgctagcatgtactgtatgggaggatgatccagatgtttcaaagagaatttctcttagtttagttaggtgtaattcagtagctttaaattctcaggtcagaacataacatttctcatttgttaaaagcagcaagaagcctggtaaaactgtgacttttccccaaacgtcaatctttattagaaagcattttctaggtgtgtttagtgtacaaagagactttataacccttactggacaacacacagatccttgagctcacgctgcaggatagtacagttttaccgcagagggaatctggaacagtggaatcatgtgtctgccctgtgtattgcagtttgtattgccacaagctatatttataccagtgtcacccttttcttgtagaatatactaataatctgtgccaactctaccttctcacttttacctctgacgtcattctttttttctgaaagaggtaataattctagttttgatagactctgaggattatgtgaacaggacatttttcatttgtgaatttaatgctatactgtcaaggtacttgcttgtgtctgaactctagtgcacttatgattttgtagaccatgtgaaatttaataagataccttttttttcctttctttgtgtgtagtgcagcaacagtttggtctgcatttgttagaagtttaactcctaacaacccaaagacctatttaacaattggtgcataaatgaaagtagtactgtatacttgaaactgtttaagtacaagttgaacaaaaattatgaaaaggtatatttgcttctcgggaaagcaaagaagctgctttaaaaaataaaaaggggactaaaaatttgttttgtataaagaggttagccctgcgcacgtaggactgaattcagtgatatccctatacactgccatttagtggataggttattgtacttccattcatactctgggcacttgtgttgtattgttctgttacatactttttttaacctgttttgttttatcatatatgcattaaaagtattatctttatcaacatttgctgctactgtgttaacatttttgttttgcttgccatgaatttcaacttccaccacccagtgaattgatttataaattgctatgctttgctgtttttctgttgctgtggaacttaaagaatgtgaaagctgtcaaagggtattttacgaatcacttttgtgtttgatatagtaaaacaatgtgattcattccaaagtaacagaaggttatttgtaagaaagttaaaggcttgtgaacaaagaaagctaagctgttgtacatatttgtagttggctgtgcatggtacaaatttattaatatgaagaaatgcaaaatgtattgcttttgatatttctcttccgagatgaacaagtagcatgtaatgcaactgtttgacagtttaactcaagtcatgcttcaaactgttttaatgatcaaatcaagacacatttcattttacattttattattgtacagtttttgtttcggatgatgatcacagcaatctttattctatacattttatgtgaacttttttaatgtctttaatttggattttttttttttttagtattttaacatttattttaatcctgaagacacttttttgattgtgtttcgtaagagacaacatggcctcctaaggtgcaatcctgccgctatagtgagctaatgtcctgaatccaaaggcttcagaaaattgcttttgcctttttcatgaatgttaagcagcagcattgtgagatcgatctgtcctggcagttaacacgatgtgcaacagtgtgttagcatggaacagaacgcttttcacaaaacaaaggactgttttacaaatgattattccgacagtgtgtcgacataaacttttacaactgcacagcagccaaaaaaagaaaaaaaaaagaaaaaaaactttaactggatggacgttgttagggtgagaaataaaaggacagcctccaaaggttgagaatgagaattgttttttcctggatatcaaagggattatcacagcgcaatcattgtctacacaacatgtactctcaacgcctgggttacataggaaatgcaccctgaggttttaataaaagcccctatggctataactttaaataaactaaaccaaaaatgttattgatgttttatatatagagagtagtctcattagtttttgttactgtaatgtttgaagtctcaaatgcaccgtattacggtaaataacatggttttgaaaacttttttttattttgtcacagacctgttgtcatagttgaaatgatgtttattgtagatggtatttgaacttattcttctggaaatagttcatcaagtatgtttgttgctcattgtgatacattaaaaactgtatctacatattt

SEQ ID NO: 34784 - DNA, 13822 bp, Homo sapiens
  source 1..13822: mol_type = unassigned DNA
atttttttaaacagggctaaaacgataataattagcagaataaagacatatcggattttcatttcctttcctccttttcccaaccccttcacaaccaaacagcgagaccgcggtcggcacatgctttaactcctcccggacccccgaggaccgctccatgccccccactttctgctccagcgtttttattttcacccaataaagttcgaggattattttttattttttttgtttttttaatgaaccctctcgttttacttggatgtgatcagctgtaagtaaaataaaagcaaaacaaaaaagaggcgaagatcgagtaggaactgcaggggaaatggaaagtccctgacaggctggatgaaatgagatccccatgtagcaattgccatggaaacctgtgactcccctcctatctcaaggcaggaaaatgggcagagcacatcaaagctatgtggaacgacacaacttgataatgaggtgccagagaaagttgcagggatggagcctgacagggaaaacagctccacagatgacaacctgaaaacggatgagcgcaaaagtgaagccttgctgggtttcagcgttgagaatgcagctgccactcaggttacctcagcaaaggagataccctgcaacgaatgtgccacttcttttcccagtttacagaaatacatggaacaccactgccctaatgcccgccttcctgtcctgaaggatgacaacgagagcgagatcagcgagttagaggacagtgacgtggaaaatctaacaggggagatcgtttaccagcctgatgggtcagcatatataattgaggactccaaagaaagtgggcagaatgcacagactggggcaaatagcaaactcttttctacagcgatgttcctggactccctggcatctgctggagagaagagtgatcagtctgcttctgcacctatgtcgttctacccacagatcatcaacacttttcatatcgcttcatccctcgggaaaccatttacagccgatcaggctttcccaaatacctcagcattagcaggagttggtcctgtgttgcacagtttccgtgtctatgatctccgacacaagagagagaaagactatctaaccagtgatggctcagccaaaaactcctgtgtgtccaaagatgtccctaacaatgtggacttgtccaaattcgatggttgtgttagcgatgggaaaaggaaacctgttttaatgtgtttcttgtgcaagttgtcttttggttatatcaggtcatttgtaacccatgctgtgcatgatcatcggatgaccctcaatgacgaggagcagaagctcctcagtaataaatgcgtctccgccataatacaggggattggcaaagacaaagaacctcttataagctttctggaaccaaaaaaatccacttctgtttatccccatttttctactacaaacctcataggacccgatccaaccttccgcggtttatggagcgcttttcatgttgaaaatggtgactctttgccggctggctttgccttcttaaaaggaagcgcgagcacctcgagctcagcagagcagccgctggggattacccaaatgccaaaggctgaagtgaatctgggggggctgtctagtttagtagtgaacaccccaattacctctgtctccctcagccactcatcgtctgagtctagcaagatgtcagagagcaaagaccaagagaacaactgtgaaaggccaaaagaaagcaacgttttacacccaaacggggagtgccctgtcaaaagtgaacccactgaaccgggagatgaggatgaagaagatgcgtactccaatgaacttgatgacgaggaagtattaggtgaactcaccgatagtattggtaacaaagatttccctctcttaaaccaaagcatttctcctttatcatccagtgtgctaaaatttattgaaaagggtacctcgtcctcctcggcgactgtttctgatgacacagaaaagaaaaaacagactgctgctgttagggccagtggcagtgttgctagtaactatggcatcagtggcaaggactttgcagacgcaagtgccagtaaagacagtgccacagctgctcatccaagtgaaatagcccggggagacgaagacagttcagccactcctcaccagcatggctttaccccgagtactcctggcacaccagggcctggaggagacggctcaccgggcagtggcatcgagtgtccaaagtgcgacactgtgttggggtcttcgaggtctcttggtggtcatatgactatgatgcactcgaggaactcatgcaaaaccctcaaatgtcctaaatgtaactggcactacaaatatcagcagaccctggaggcccatatgaaggagaaacaccctgagccgggtggctcttgtgtttattgtaagactggacagcctcaccccaggcttgcccggggtgagagttacacgtgtggctataaacccttccgttgtgaggtttgtaactactctaccactaccaaaggcaacctcagtattcatatgcagtcggacaagcacctgaacaatgttcagaatctccaaaatggcaatggtgagcaggtgtttggccactctgccccagcccccaacaccagcctcagtggctgcggaacaccctctccgtccaaacccaaacagaaacccacctggcggtgtgaagtttgtgattatgaaaccaatgtcgccaggaacctccgaattcatatgaccagcgaaaagcacatgcataatatgatgcttttgcagcagaacatgaagcagatccagcataatctgcacttgggcctcgccccggcggaagcagagctttatcagtactacctagcccagaacataggcctgaccggaatgaagctggaaaaccctgccgaccctcagctgatgatcaatccattccagctggatccagcgacagcagcggctttggcaccagggctcggagagctgtcaccttatatcagtgacccagcgctgaagctattccagtgtgctgtttgcaacaaattcacctctgacagcctggaggccctaagtgtgcatgtgagcagtgagcgctctctccctgaagaggaatggagggcagtaattggagatatctaccagtgcaagctctgcaactacaacactcagctcaaagccaacttccagctacactgcaagactgataaacatatgcagaaatatcaactggtggctcacattaaagaagggggcaaaagcaatgagtggaggttgaagtgtattgccattggcaaccctgttcacctaaaatgtaacgcctgtgactattacaccaacagtgtggataaattacgcttgcataccaccaatcacaggcacgaggcggccctgaagctctacaagcacttgcagaagcaagagggtgcagtgaatcccgaatcctgctattactactgtgccgtgtgtgattacaccaccaaggtcaagttgaatctggtacaacatgtccgttcggtgaagcatcagcagactgagggcctacggaagctccagctccaccagcaaggcctggcaccagaggaggacaacctcagtgagatcttttttgttaaagattgcccaccaaatgagcttgaaactgcctcattgggagccaggacttgtgatgatgatcttacagagcagcatgaggaggcagaaggagctattaagcctacagcagtggccgaggacgatgaaaaagacacaagtgagagagacaatagtgaaggcaaaaactctaataaagactctgttagtgtggcagggggtacccagccactcctgctggcaaaagaagaggatgttgcaacaaaaaggtcaaaacctacagaggacaataaattctgtcatgaacagttctatcaatgtccttattgtaactacaatagtagggaccaaagtcgtatccagatgcacgtcctatcacagcactcggtgcagccggtcatctgctgtcctctctgtcaggacgtcctcagcaacaaaatgcatctccaactgcatctgacgcatttgcacagtgtgtctccagactgtgtggagaagctgcttatgacagtgcctgtccctgatgtgatgatgccaaacagtatgctactgccagcagctgcctctgagaaatcagagcgggacacacctgcagccgtgacagctgaggggtctgggaaatattcaggtgaaagtccaatggatgacaaaagcatggcaggtctcgaggattcaaaggctaatgtggaagtaaagaatgaggagcagaaaccgactaaagaacccttggaagtctcagaatggaataaaaatagcagtaaggatgtgaaaatccccgacacactgcaagatcaattaaatgaacagcaaaaaaggcaaccgctctctgtttctgaccgtcatgtctacaagtatcgctgtaaccattgtagcttggctttcaaaactatgcagaagcttcagatacattcccagtatcatgcaattcgggctgcgacaatgtgtaacctctgccagcgcagtttccgtacattccaggctttaaaaaaacacttggaagcaggccaccctgaactgagtgaagctgaacttcaacagctatatgcctccttgcccgtgaatggagaactgtgggcagagagcgaaactatgtcccaggatgaccatggcctagagcaggaaatggagagagagtatgaggtggaccacgaagggaaagcaagtcctgtaggaagtgatagtagctctattccagatgacatgggctctgaaccaaagcggaccttaccttttagaaaagggcccaattttacgatggaaaaattccttgatccatctcgtccatataaatgtacagtgtgtaaagagtcattcacccaaaagaacattctcttggtccactataattcagtttctcacttgcataagctgaaaaaagttttgcaggaagcctccagtcctgtcccacaagaaaccaacagcaacacagataacaaaccctacaagtgcagcatctgcaatgttgcatacagccaaagctcaacattggaaatccacatgaggtctgtgctccaccagacaaaggctagggctgcaaagctggagcccagtggtcatgtggctggtgggcacagcattgcagcaaatgtcaacagccctggccaggggatgttagattccatgagtttagcagctgtaaacagcaaagatacccatttagatgccaaagaattaaataaaaagcaaactcctgatttaatctctgctcaacctgcacatcacccaccacagtcaccagcacaaattcagatgcaactacagcacgaattacaacagcaagccgcattctttcagcctcagtttctaaacccagcctttttgcctcattttcctatgaccccagaagcactgctgcagtttcagcagcctcagtttctctttccattttatatacctgggacggagttcagcttggggccagatttgggcttgccaggctctgccacatttgggatgcctggcatgacaggaatggctggctccttgcttgaagacctaaagcagcagattcaaacccaacatcacgttggtcaaactcaactccagatactacagcaacaagcacaacaataccaagccacacagccccagctgcagcctcaaaaacaacagcagcagccaccacctccacagcagcagcagcaacagcaggcaagcaaattattgaaacaagagcaaagtaacatagtgagtgcagactgccaaatcatgaaggatgtgccatcttataaggaggcagaagatatttctgaaaagccagaaaaaccaaagcaggaatttataagtgaaggtgaaggactcaaagaaggcaaagacacaaagaagcaaaaatccttggaaccatccatcccaccaccccgaatagcttcaggggccagaggaaatgctgccaaagcgttattggaaaactttggttttgaactggtcattcagtataacgaaaacaggcagaaggtacagaagaagggcaaaagtggtgaaggcgaaaacactgacaaactagaatgtggaacatgtggtaaattgttttccaatgttcttattttaaagagtcaccaagaacatgtacatgggcaattttttccatatgcagcgctagaaaaatttgctcgtcaatacagggaggcctatgacaagctttatccaatttctccatcttctccagaaacgccgcccccgccacctcctcctcctcccttgcctccggctcctccacagccttcttctatgggtcctgtaaagatccccaacacggtttctactcctctgcaagctccaccacccactcctcccccaccaccaccacctcctcctcctcctcctcctccccccccacctcctccaccttctgctcctccacaggtccaactgccggtttctctggacctgccgctctttccttccattatgatgcaacctgtgcaacaccctgcgcttcctccccagcttgccctgcagctgccacagatggacgcactctctgcagacctcacccaactttgccagcagcagctcggattagatcccaacttcttaagacattctcagttcaaacgcccacggacaagaattacagatgatcagctaaaaatcctgagggcttattttgacattaataattctccaagtgaagaacagatccaggaaatggcagagaaatctggcctctcccaaaaagttatcaaacactggtttagaaatacgctttttaaggaacgacagagaaataaagattcaccatacaacttcagtaaccctcctataacggttttagaagatatcagaattgatccacagcccacctctttagaacattacaaatctgatgcatcattcagtaaaaggtcttctagaacgagatttactgactaccagcttagggttctgcaagacttttttgacacaaacgcttacccaaaagatgatgaaatagaacaactctccactgttctcaatctgcctacccgggttattgttgtatggttccagaatgctcgtcagaaagcacgaaagagttatgagaatcaagcagaaacaaaagataatgaaaaaagagaactcactaatgaacggtacattcgaacaagcaacatgcagtaccagtgtaaaaagtgcaatgtggttttccccaggatctttgacttgattacgcatcagaaaaagcagtgttacaaggatgaagatgatgatgcccaagatgaaagccaaacagaagactccatggatgccactgatcaagtggtatacaagcattgcacagtgtctggccaaacggatgcagctaaaaacgctgctgcccctgcagcaagttctggctctgggaccagcacccccctgattccatcacccaaaccagaacctgagaagacttctccaaaacctgaatatcccgcagaaaagccaaagcagagtgacccctctcccccttctcaaggcaccaaaccagccctgccattagcatcgacttcctcggacccaccacaggcatccacagcccagccacagccacagccacagccaccaaaacaaccccaacttatcggaagacctccctcggcctctcaaacaccggtcccttccagtccactgcaaatttccatgacgtctctccagaacagtctacctccacagttactacaataccaatgtgatcagtgtacagttgccttcccaactctggaactctggcaggaacaccagcacatgcacttccttgctgctcaaaaccaattccttcactctccgttcttggaaaggcccatggacatgccctacatgatatttgaccccaacaatccgctgatgactggacaactgctgggcagttccctcactcaaatgccccctcaggccagttcctcccacaccacagcccccacaacggttgctgcttccctaaaaaggaaactagacgataaagaagataataattgcagtgaaaaagaaggagggaatagcggtgaagaccaacaccgagataaacgcttgagaaccacgatcaccccggaacagctggaaatactctatgaaaaatacttgctggattccaatcctaccagaaaaatgcttgatcatattgcccgcgaagtcgggctgaaaaaaagggtcgtgcaagtctggttccagaatacacgagcgcgggagaggaaaggccagttccgggcggtgggtccagcacagtctcataaacggtgtccgttttgccgagccctgtttaaagcaaagtcggccttagaaagccacattcgctctcggcactggaatgaaggaaagcaggcaggttacagcttgccaccaagccctttaatatccaccgaagatgggggagaaagcccacagaaatacatctattttgattacccatctttgccattaactaaaattgatctatcaagtgagaatgaattggcttctacagtgtcaacacctgttagtaaaacagcagagctgtcaccgaagaatcttttaagcccttcttcttttaaagcagagtgttctgaggatgtagagaatttaaatgcccctcctgctgaggctgggtatgatcaaaataaaaccgattttgatgagacttcatcgattaatacggcaatcagtgacgccaccaccggagacgagggaaacactgaaatggaaagcaccacaggaagttccggagatgtgaaaccggctttgtctcccaaagagccaaaaactctggatactctgccaaaacctgcaaccacacctaccacggaggtctgcgatgacaaatttctcttttctctcacaagcccatccatccatttcaatgacaaagatggcgaccacgaccaaagcttttacatcacagatgacccggatgacaacgccgaccgcagcgaaacgtccagcatagcggacccgagctccccaaatccattcggatccagcaatccctttaaatccaaaagtaatgatcggccgggtcacaagcgttttcgaacgcaaatgagcaatcttcaactcaaggttctcaaggcttgctttagtgactaccgaactccaaccatgcaagaatgtgaaatgttagggaatgagattggtctgcccaaacgcgtagtccaggtgtggttccaaaatgcaagggcaaaggaaaagaaatttaaaattaacatagggaagcctttcatgatcaatcaaggcggaacggaaggcaccaaaccagagtgtaccctctgcggggtgaagtactctgcccgcttgtccatcagagatcacattttctccaaacagcacatttcaaaagtgagggagaccgttggcagtcagctcgatcgggagaaagattacttggctccgaccacggttcggcagctgatggcacagcaagaacttgatcgtataaagaaagcttcagacgtgctgggcttgacggtacagcagccaggcatgatggacagcagttctctccacggcatcagcctgccaacagcctaccccggactccccggccttcctccagtccttctccccggaatgaacggtccatcctccttgccgggatttccacaaaattcaaacactttaacacctcccggtgcaggcatgcttgggtttcctacttcagctacttcgtctcctgccctgtctctcagcagtgcccccaccaaacctttgctgcagactccaccacctccaccacctcctcctcctcctcctccttcatcctctctgtcaggacagcagaccgagcaacagaacaaagaatctgagaaaaagcaaactaagccaaacaaggtgaaaaaaatcaaagaggaggaattagaggccaccaaacccgaaaaacaccccaaaaaagaggaaaaaatctcatctgctctttcagtgttgggcaaagttgtaggtgaaacacatgtcgatcctattcagttgcaggcattacagaatgcaattgctggtgacccagcttcctttataggcggacagttcttgccatactttatccctgggtttgcttcttattttacacctcagctccctggaacagtgcaggggggatacttcccacctgtctgtggcatggagagcctctttccttatggccctacaatgccccagacactggcaggtctgtccccaggtgcactgttgcagcagtaccaacagtatcagcagaacctgcaggagtccctgcaaaagcagcaaaagcaacagcaagaacagcagcagaaaccagttcaggcaaagacatccaaagtagaaagtgaccagccgcaaaactccaacgatgcttcagaaacaaaggaagacaaaagtactgctacagaaagcacaaaagaagaaccccagttagaatccaaaagtgcagacttttcagacacttacgttgttccattcgtcaagtatgagtttatatgcagaaagtgccagatgatgtttactgatgaagacgccgcagtaaatcatcaaaagtccttctgttatttcggtcagcctttgattgacccacaagagacagtgcttcgtgtcccagtcagcaaatatcagtgtcttgcctgtgatgtggctatcagtgggaatgaagcacttagccaacacctccagtcaagcttgcacaaagagaaaacaatcaaacaagcaatgagaaatgccaaagagcatgttagattattacctcactcagtctgctcccctaatcctaacaccacatctacctcgcagtctgcagcttcttctaataacacctatcctcatctttcttgcttctccatgaagtcctggcctaatatccttttccaagcgtctgccaggagagctgcttctcccccttcttctcctccttccctttccttgccttcaacggttacctcaagtttgtgcagcacctcaggggttcaaacctcactacccacagaaagttgttcagatgagtctgacagtgagctgagccagaagctagaagacttagataattctttggaagtgaaggctaagcctgcttctggcctagatggtaatttcaatagcatccgaatggatatgttcagtgtgtaggagtgaagacaggatcccgtgcttaaaaaaataaaaaataaaaaaataaaaaaaaaataagactttaactgcagttccaaagcttctctaacccaaaaattacagtaccaaatgattgactcaggattgtttttcccatattgatatgctggcaatataggatggtatgtaatggacagaactgatgcagatggttgaatgcgcttgtactatatgctaaaatatggaaaaggaaaaaaaaatctcacaagttcttttggaacttgtttcaagccaaaaactctcaagaaagcaaattgcacctcagctggattgatttccaaatgctagcatgtactgtatgggaggatgatccagatgtttcaaagagaatttctcttagtttagttaggtgtaattcagtagctttaaattctcaggtcagaacataacatttctcatttgttaaaagcagcaagaagcctggtaaaactgtgacttttccccaaacgtcaatctttattagaaagcattttctaggtgtgtttagtgtacaaagagactttataacccttactggacaacacacagatccttgagctcacgctgcaggatagtacagttttaccgcagagggaatctggaacagtggaatcatgtgtctgccctgtgtattgcagtttgtattgccacaagctatatttataccagtgtcacccttttcttgtagaatatactaataatctgtgccaactctaccttctcacttttacctctgacgtcattctttttttctgaaagaggtaataattctagttttgatagactctgaggattatgtgaacaggacatttttcatttgtgaatttaatgctatactgtcaaggtacttgcttgtgtctgaactctagtgcacttatgattttgtagaccatgtgaaatttaataagataccttttttttcctttctttgtgtgtagtgcagcaacagtttggtctgcatttgttagaagtttaactcctaacaacccaaagacctatttaacaattggtgcataaatgaaagtagtactgtatacttgaaactgtttaagtacaagttgaacaaaaattatgaaaaggtatatttgcttctcgggaaagcaaagaagctgctttaaaaaataaaaaggggactaaaaatttgttttgtataaagaggttagccctgcgcacgtaggactgaattcagtgatatccctatacactgccatttagtggataggttattgtacttccattcatactctgggcacttgtgttgtattgttctgttacatactttttttaacctgttttgttttatcatatatgcattaaaagtattatctttatcaacatttgctgctactgtgttaacatttttgttttgcttgccatgaatttcaacttccaccacccagtgaattgatttataaattgctatgctttgctgtttttctgttgctgtggaacttaaagaatgtgaaagctgtcaaagggtattttacgaatcacttttgtgtttgatatagtaaaacaatgtgattcattccaaagtaacagaaggttatttgtaagaaagttaaaggcttgtgaacaaagaaagctaagctgttgtacatatttgtagttggctgtgcatggtacaaatttattaatatgaagaaatgcaaaatgtattgcttttgatatttctcttccgagatgaacaagtagcatgtaatgcaactgtttgacagtttaactcaagtcatgcttcaaactgttttaatgatcaaatcaagacacatttcattttacattttattattgtacagtttttgtttcggatgatgatcacagcaatctttattctatacattttatgtgaacttttttaatgtctttaatttggattttttttttttttagtattttaacatttattttaatcctgaagacacttttttgattgtgtttcgtaagagacaacatggcctcctaaggtgcaatcctgccgctatagtgagctaatgtcctgaatccaaaggcttcagaaaattgcttttgcctttttcatgaatgttaagcagcagcattgtgagatcgatctgtcctggcagttaacacgatgtgcaacagtgtgttagcatggaacagaacgcttttcacaaaacaaaggactgttttacaaatgattattccgacagtgtgtcgacataaacttttacaactgcacagcagccaaaaaaagaaaaaaaaaagaaaaaaaactttaactggatggacgttgttagggtgagaaataaaaggacagcctccaaaggttgagaatgagaattgttttttcctggatatcaaagggattatcacagcgcaatcattgtctacacaacatgtactctcaacgcctgggttacataggaaatgcaccctgaggttttaataaaagcccctatggctataactttaaataaactaaaccaaaaatgttattgatgttttatatatagagagtagtctcattagtttttgttactgtaatgtttgaagtctcaaatgcaccgtattacggtaaataacatggttttgaaaacttttttttattttgtcacagacctgttgtcatagttgaaatgatgtttattgtagatggtatttgaacttattcttctggaaatagttcatcaagtatgtttgttgctcattgtgatacattaaaaactgtatctacatattt

SEQ ID NO: 34785 - DNA, 613 bp, Homo sapiens
  source 1..613: mol_type = unassigned DNA
atagcacaatccccttgtttaaccaatacggaaaccaaagctcatggaaattcctgggaaacatcacataactacagagtgcagctgaagaaattgagtgtgtccctgacaggctggatgaaatgagatccccatgtagcaattgccatggaaacctgtgactcccctcctatctcaaggcaggaaaatgggcagagcacatcaaagctatgtggaacgacacaacttgataatgaggtgccagagaaagttgcagggatggagcctgacagggaaaacagctccacagatgacaacctgaaaacggatgagcgcaaaagtgaagccttgctgggtttcagcgttgagaatgcagctgccactcaggttacctcagcaaaggagataccctgcaacgaatgtgccacttcttttcccagtttacagaaatacatggaacaccactgccctaatgcccgccttcctgtcctgaaggatgacaacgagagcgagatcagcgagttagaggacagtgacgtggaaaatctaacaggggagatcgtttaccagcctgatgggtcagcatatataattgaggactccaaagaaagtgggcagaatgcacagactgggg

SEQ ID NO: 34786 - DNA, 12175 bp, Homo sapiens
  source 1..12175: mol_type = unassigned DNA
ccctgacaggctggatgaaatgagatccccatgtagcaattgccatggaaacctgtgactcccctcctatctcaaggcaggaaaatgggcagagcacatcaaagctatgtggaacgacacaacttgataatgaggtgccagagaaagttgcagggatggagcctgacagggaaaacagctccacagatgacaacctgaaaacggatgagcgcaaaagtgaagccttgctgggtttcagcgttgagaatgcagctgccactcaggttacctcagcaaaggagataccctgcaacgaatgtgccacttcttttcccagtttacagaaatacatggaacaccactgccctaatgcccgccttcctgtcctgaaggatgacaacgagagcgagatcagcgagttagaggacagtgacgtggaaaatctaacaggggagatcgtttaccagcctgatgggtcagcatatataattgaggactccaaagaaagtgggcagaatgcacagactggggcaaatagcaaactcttttctacagcgatgttcctggactccctggcatctgctggagagaagagtgatcagtctgcttctgcacctatgtcgttctacccacagatcatcaacacttttcatatcgcttcatccctcgggaaaccatttacagccgatcaggctttcccaaatacctcagcattagcaggagttggtcctgtgttgcacagtttccgtgtctatgatctccgacacaagagagagaaagactatctaaccagtgatggctcagccaaaaactcctgtgtgtccaaagatgtccctaacaatgtggacttgtccaaattcgatggttgtgttagcgatgggaaaaggaaacctgttttaatgtgtttcttgtgcaagttgtcttttggttatatcaggtcatttgtaacccatgctgtgcatgatcatcggatgaccctcaatgacgaggagcagaagctcctcagtaataaatgcgtctccgccataatacaggggattggcaaagacaaagaacctcttataagctttctggaaccaaaaaaatccacttctgtttatccccatttttctactacaaacctcataggacccgatccaaccttccgcggtttatggagcgcttttcatgttgaaaatggtgactctttgccggctggctttgccttcttaaaaggaagcgcgagcacctcgagctcagcagagcagccgctggggattacccaaatgccaaaggctgaagtgaatctgggggggctgtctagtttagtagtgaacaccccaattacctctgtctccctcagccactcatcgtctgagtctagcaagatgtcagagagcaaagaccaagagaacaactgtgaaaggccaaaagaaagcaacgttttacacccaaacggggagtgccctgtcaaaagtgaacccactgaaccgggagatgaggatgaagaagatgcgtactccaatgaacttgatgacgaggaagtattaggtgaactcaccgatagtattggtaacaaagatttccctctcttaaaccaaagcatttctcctttatcatccagtgtgctaaaatttattgaaaagggtacctcgtcctcctcggcgactgtttctgatgacacagaaaagaaaaaacagactgctgctgttagggccagtggcagtgttgctagtaactatggcatcagtggcaaggactttgcagacgcaagtgccagtaaagacagtgccacagctgctcatccaagtgaaatagcccggggagacgaagacagttcagccactcctcaccagcatggctttaccccgagtactcctggcacaccagggcctggaggagacggctcaccgggcagtggcatcgagtgtccaaagtgcgacactgtgttggggtcttcgaggtctcttggtggtcatatgactatgatgcactcgaggaactcatgcaaaaccctcaaatgtcctaaatgtaactggcactacaaatatcagcagaccctggaggcccatatgaaggagaaacaccctgagccgggtggctcttgtgtttattgtaagactggacagcctcaccccaggcttgcccggggtgagagttacacgtgtggctataaacccttccgttgtgaggtttgtaactactctaccactaccaaaggcaacctcagtattcatatgcagtcggacaagcacctgaacaatgttcagaatctccaaaatggcaatggtgagcaggtgtttggccactctgccccagcccccaacaccagcctcagtggctgcggaacaccctctccgtccaaacccaaacagaaacccacctggcggtgtgaagtttgtgattatgaaaccaatgtcgccaggaacctccgaattcatatgaccagcgaaaagcacatgcataatatgatgcttttgcagcagaacatgaagcagatccagcataatctgcacttgggcctcgccccggcggaagcagagctttatcagtactacctagcccagaacataggcctgaccggaatgaagctggaaaaccctgccgaccctcagctgatgatcaatccattccagctggatccagcgacagcagcggctttggcaccagggctcggagagctgtcaccttatatcagtgacccagcgctgaagctattccagtgtgctgtttgcaacaaattcacctctgacagcctggaggccctaagtgtgcatgtgagcagtgagcgctctctccctgaagaggaatggagggcagtaattggagatatctaccagtgcaagctctgcaactacaacactcagctcaaagccaacttccagctacactgcaagactgataaacatatgcagaaatatcaactggtggctcacattaaagaagggggcaaaagcaatgagtggaggttgaagtgtattgccattggcaaccctgttcacctaaaatgtaacgcctgtgactattacaccaacagtgtggataaattacgcttgcataccaccaatcacaggcacgaggcggccctgaagctctacaagcacttgcagaagcaagagggtgcagtgaatcccgaatcctgctattactactgtgccgtgtgtgattacaccaccaaggtcaagttgaatctggtacaacatgtccgttcggtgaagcatcagcagactgagggcctacggaagctccagctccaccagcaaggcctggcaccagaggaggacaacctcagtgagatcttttttgttaaagattgcccaccaaatgagcttgaaactgcctcattgggagccaggacttgtgatgatgatcttacagagcagcagttgagatcgacctcagaagaacaaagtgaggaggcagaaggagctattaagcctacagcagtggccgaggacgatgaaaaagacacaagtgagagagacaatagtgaaggcaaaaactctaataaagactctgggataatcacaccagagaaggaactaaaagttagtgtggcagggggtacccagccactcctgctggcaaaagaagaggatgttgcaacaaaaaggtcaaaacctacagaggacaataaattctgtcatgaacagttctatcaatgtccttattgtaactacaatagtagggaccaaagtcgtatccagatgcacgtcctatcacagcactcggtgcagccggtcatctgctgtcctctctgtcaggacgtcctcagcaacaaaatgcatctccaactgcatctgacgcatttgcacagtgtgtctccagactgtgtggagaagctgcttatgacagtgcctgtccctgatgtgatgatgccaaacagtatgctactgccagcagctgcctctgagaaatcagagcgggacacacctgcagccgtgacagctgaggggtctgggaaatattcaggtgaaagtccaatggatgacaaaagcatggcaggtctcgaggattcaaaggctaatgtggaagtaaagaatgaggagcagaaaccgactaaagaacccttggaagtctcagaatggaataaaaatagcagtaaggatgtgaaaatccccgacacactgcaagatcaattaaatgaacagcaaaaaaggcaaccgctctctgtttctgaccgtcatgtctacaagtatcgctgtaaccattgtagcttggctttcaaaactatgcagaagcttcagatacattcccagtatcatgcaattcgggctgcgacaatgtgtaacctctgccagcgcagtttccgtacattccaggctttaaaaaaacacttggaagcaggccaccctgaactgagtgaagctgaacttcaacagctatatgcctccttgcccgtgaatggagaactgtgggcagagagcgaaactatgtcccaggatgaccatggcctagagcaggaaatggagagagagtatgaggtggaccacgaagggaaagcaagtcctgtaggaagtgatagtagctctattccagatgacatgggctctgaaccaaagcggaccttaccttttagaaaagggcccaattttacgatggaaaaattccttgatccatctcgtccatataaatgtacagtgtgtaaagagtcattcacccaaaagaacattctcttggtccactataattcagtttctcacttgcataagctgaaaaaagttttgcaggaagcctccagtcctgtcccacaagaaaccaacagcaacacagataacaaaccctacaagtgcagcatctgcaatgttgcatacagccaaagctcaacattggaaatccacatgaggtctgtgctccaccagacaaaggctagggctgcaaagctggagcccagtggtcatgtggctggtgggcacagcattgcagcaaatgtcaacagccctggccaggggatgttagattccatgagtttagcagctgtaaacagcaaagatacccatttagatgccaaagaattaaataaaaagcaaactcctgatttaatctctgctcaacctgcacatcacccaccacagtcaccagcacaaattcagatgcaactacagcacgaattacaacagcaagccgcattctttcagcctcagtttctaaacccagcctttttgcctcattttcctatgaccccagaagcactgctgcagtttcagcagcctcagtttctctttccattttatatacctgggacggagttcagcttggggccagatttgggcttgccaggctctgccacatttgggatgcctggcatgacaggaatggctggctccttgcttgaagacctaaagcagcagattcaaacccaacatcacgttggtcaaactcaactccagatactacagcaacaagcacaacaataccaagccacacagccccagctgcagcctcaaaaacaacagcagcagccaccacctccacagcagcagcagcaacagcaggcaagcaaattattgaaacaagagcaaagtaacatagtgagtgcagactgccaaatcatgaaggatgtgccatcttataaggaggcagaagatatttctgaaaagccagaaaaaccaaagcaggaatttataagtgaaggtgaaggactcaaagaaggcaaagacacaaagaagcaaaaatccttggaaccatccatcccaccaccccgaatagcttcaggggccagaggaaatgctgccaaagcgttattggaaaactttggttttgaactggtcattcagtataacgaaaacaggcagaaggtacagaagaagggcaaaagtggtgaaggcgaaaacactgacaaactagaatgtggaacatgtggtaaattgttttccaatgttcttattttaaagagtcaccaagaacatgtacatgggcaattttttccatatgcagcgctagaaaaatttgctcgtcaatacagggaggcctatgacaagctttatccaatttctccatcttctccagaaacgccgcccccgccacctcctcctcctcccttgcctccggctcctccacagccttcttctatgggtcctgtaaagatccccaacacggtttctactcctctgcaagctccaccacccactcctcccccaccaccaccacctcctcctcctcctcctcctccccccccacctcctccaccttctgctcctccacaggtccaactgccggtttctctggacctgccgctctttccttccattatgatgcaacctgtgcaacaccctgcgcttcctccccagcttgccctgcagctgccacagatggacgcactctctgcagacctcacccaactttgccagcagcagctcggattagatcccaacttcttaagacattctcagttcaaacgcccacggacaagaattacagatgatcagctaaaaatcctgagggcttattttgacattaataattctccaagtgaagaacagatccaggaaatggcagagaaatctggcctctcccaaaaagttatcaaacactggtttagaaatacgctttttaaggaacgacagagaaataaagattcaccatacaacttcagtaaccctcctataacggttttagaagatatcagaattgatccacagcccacctctttagaacattacaaatctgatgcatcattcagtaaaaggtcttctagaacgagatttactgactaccagcttagggttctgcaagacttttttgacacaaacgcttacccaaaagatgatgaaatagaacaactctccactgttctcaatctgcctacccgggttattgttgtatggttccagaatgctcgtcagaaagcacgaaagagttatgagaatcaagcagaaacaaaagataatgaaaaaagagaactcactaatgaacggtacattcgaacaagcaacatgcagtaccagtgtaaaaagtgcaatgtggttttccccaggatctttgacttgattacgcatcagaaaaagcagtgttacaaggatgaagatgatgatgcccaagatgaaagccaaacagaagactccatggatgccactgatcaagtggtatacaagcattgcacagtgtctggccaaacggatgcagctaaaaacgctgctgcccctgcagcaagttctggctctgggaccagcacccccctgattccatcacccaaaccagaacctgagaagacttctccaaaacctgaatatcccgcagaaaagccaaagcagagtgacccctctcccccttctcaaggcaccaaaccagccctgccattagcatcgacttcctcggacccaccacaggcatccacagcccagccacagccacagccacagccaccaaaacaaccccaacttatcggaagacctccctcggcctctcaaacaccggtcccttccagtccactgcaaatttccatgacgtctctccagaacagtctacctccacagttactacaataccaatgtgatcagtgtacagttgccttcccaactctggaactctggcaggaacaccagcacatgcacttccttgctgctcaaaaccaattccttcactctccgttcttggaaaggcccatggacatgccctacatgatatttgaccccaacaatccgctgatgactggacaactgctgggcagttccctcactcaaatgccccctcaggccagttcctcccacaccacagcccccacaacggttgctgcttccctaaaaaggaaactagacgataaagaagataataattgcagtgaaaaagaaggagggaatagcggtgaagaccaacaccgagataaacgcttgagaaccacgatcaccccggaacagctggaaatactctatgaaaaatacttgctggattccaatcctaccagaaaaatgcttgatcatattgcccgcgaagtcgggctgaaaaaaagggtcgtgcaagtctggttccagaatacacgagcgcgggagaggaaaggccagttccgggcggtgggtccagcacagtctcataaacggtgtccgttttgccgagccctgtttaaagcaaagtcggccttagaaagccacattcgctctcggcactggaatgaaggaaagcaggcaggttacagcttgccaccaagccctttaatatccaccgaagatgggggagaaagcccacagaaatacatctattttgattacccatctttgccattaactaaaattgatctatcaagtgagaatgaattggcttctacagtgtcaacacctgttagtaaaacagcagagctgtcaccgaagaatcttttaagcccttcttcttttaaagcagagtgttctgaggatgtagagaatttaaatgcccctcctgctgaggctgggtatgatcaaaataaaaccgattttgatgagacttcatcgattaatacggcaatcagtgacgccaccaccggagacgagggaaacactgaaatggaaagcaccacaggaagttccggagatgtgaaaccggctttgtctcccaaagagccaaaaactctggatactctgccaaaacctgcaaccacacctaccacggaggtctgcgatgacaaatttctcttttctctcacaagcccatccatccatttcaatgacaaagatggcgaccacgaccaaagcttttacatcacagatgacccggatgacaacgccgaccgcagcgaaacgtccagcatagcggacccgagctccccaaatccattcggatccagcaatccctttaaatccaaaagtaatgatcggccgggtcacaagcgttttcgaacgcaaatgagcaatcttcaactcaaggttctcaaggcttgctttagtgactaccgaactccaaccatgcaagaatgtgaaatgttagggaatgagattggtctgcccaaacgcgtagtccaggtgtggttccaaaatgcaagggcaaaggaaaagaaatttaaaattaacatagggaagcctttcatgatcaatcaaggcggaacggaaggcaccaaaccagagtgtaccctctgcggggtgaagtactctgcccgcttgtccatcagagatcacattttctccaaacagcacatttcaaaagtgagggagaccgttggcagtcagctcgatcgggagaaagattacttggctccgaccacggttcggcagctgatggcacagcaagaacttgatcgtataaagaaagcttcagacgtgctgggcttgacggtacagcagccaggcatgatggacagcagttctctccacggcatcagcctgccaacagcctaccccggactccccggccttcctccagtccttctccccggaatgaacggtccatcctccttgccgggatttccacaaaattcaaacactttaacacctcccggtgcaggcatgcttgggtttcctacttcagctacttcgtctcctgccctgtctctcagcagtgcccccaccaaacctttgctgcagactccaccacctccaccacctcctcctcctcctcctccttcatcctctctgtcaggacagcagaccgagcaacagaacaaagaatctgagaaaaagcaaactaagccaaacaaggtgaaaaaaatcaaagaggaggaattagaggccaccaaacccgaaaaacaccccaaaaaagaggaaaaaatctcatctgctctttcagtgttgggcaaagttgtaggtgaaacacatgtcgatcctattcagttgcaggcattacagaatgcaattgctggtgacccagcttcctttataggcggacagttcttgccatactttatccctgggtttgcttcttattttacacctcagctccctggaacagtgcaggggggatacttcccacctgtctgtggcatggagagcctctttccttatggccctacaatgccccagacactggcaggtctgtccccaggtgcactgttgcagcagtaccaacagtatcagcagaacctgcaggagtccctgcaaaagcagcaaaagcaacagcaagaacagcagcagaaaccagttcaggcaaagacatccaaagtagaaagtgaccagccgcaaaactccaacgatgcttcagaaacaaaggaagacaaaagtactgctacagaaagcacaaaagaagaaccccagttagaatccaaaagtgcagacttttcagacacttacgttgttccattcgtcaagtatgagtttatatgcagaaagtgccagatgatgtttactgatgaagacgccgcagtaaatcatcaaaagtccttctgttatttcggtcagcctttgattgacccacaagagacagtgcttcgtgtcccagtcagcaaatatcagtgtcttgcctgtgatgtggctatcagtgggaatgaagcacttagccaacacctccagtcaagcttgcacaaagagaaaacaatcaaacaagcaatgagaaatgccaaagagcatgttagattattacctcactcagtctgctcccctaatcctaacaccacatctacctcgcagtctgcagcttcttctaataacacctatcctcatctttcttgcttctccatgaagtcctggcctaatatccttttccaagcgtctgccaggagagctgcttctcccccttcttctcctccttccctttccttgccttcaacggttacctcaagtttgtgcagcacctcaggggttcaaacctcactacccacagaaagttgttcagatgagtctgacagtgagctgagccagaagctagaagacttagataattctttggaagtgaaggctaagcctgcttctggcctagatggtaatttcaatagcatccgaatggatatgttcagtgtgtaggagtgaagacaggatcccgtgcttaaaaaaataaaaaataaaaaaataaaaaaaaaataagactttaactgcagttccaaagcttctctaacccaaaaattacagtaccaaatgattgactcaggattgtttttcccatattgatatgctggcaatataggatggtatgtaatggacagaactgatgcagatggttgaatgcgcttgtactatatgctaaaatatggaaaaggaaaaaaaaatctcacaagttcttttggaacttgtttcaagccaaaaactctcaagaaagcaaattgcacctcagctggattgatttccaaatgctagcatgtactgtatgggaggatgatccagatgtttcaaagagaatttctcttagtttagttaggtgtaattcagtagctttaaattctcaggtcagaacataacatttctcatttgttaaaagcagcaagaagcctggtaaaactgtgacttttccccaaacgtcaatctttattagaaagcattttctaggtgtgtttagtgtacaaagagactttataacccttactggacaacacacagatccttgagctcacgctgcaggatagtacagttttaccgcagagggaatctggaacagtggaatcatgtgtctgccctgtgtattgcagtttgtattgccacaagctatatttataccagtgtcacccttttcttgtagaatatactaataatctgtgccaactctaccttctcacttttacctctgacgtcattctttttttctgaaagaggtaataattctagttttgatagactctgaggattatgtgaacaggacatttttcatttgtgaatttaatgctatactgtcaaggtacttgcttgtgtctgaactctagtgcacttatgattttgtagaccatgtgaaatttaataagataccttttttttcctttctttgtgtgtagtgcagcaacagtttggtctgcatttgttagaagtttaactcctaacaacccaaagacctatttaacaattggtgcataaatgaaagtagtactgtatacttgaaactgtttaagtacaagttgaacaaaaattatgaaaaggtatatttgcttctcgggaaagcaaagaagctgctttaaaaaataaaaaggggactaaaaatttgttttgtataaagaggttagccctgcgcacgtaggactgaattcagtgatatccctatacactgccatttagtggataggttattgtacttccattcatactctgggcacttgtgttgtattgttctgttacatactttttttaacctgttttgttttatcatatatgcattaaaagtattatctttatcaaca

SEQ ID NO: 34787 - DNA, 618 bp, Homo sapiens
  source 1..618: mol_type = unassigned DNA
atcgcccggcctctgggccagggacccgcgaggcggcggctgcttgctccgaacggaacgccgccgggtgtgcgttagaccagcggatagacgcccgcggcttggggtccctgacaggctggatgaaatgagatccccatgtagcaattgccatggaaacctgtgactcccctcctatctcaaggcaggaaaatgggcagagcacatcaaagctatgtggaacgacacaacttgataatgaggtgccagagaaagttgcagggatggagcctgacagggaaaacagctccacagatgacaacctgaaaacggatgagcgcaaaagtgaagccttgctgggtttcagcgttgagaatgcagctgccactcaggttacctcagcaaaggagataccctgcaacgaatgtgccacttcttttcccagtttacagaaatacatggaacaccactgccctaatgcccgccttcctgtcctgaaggatgacaacgagagcgagatcagcgagttagaggacagtgacgtggaaaatctaacaggggagatcgtttaccagcctgatgggtcagcatatataattgaggactccaaagaaagtgggcagaatgcacagactgggg

SEQ ID NO: 34788 - DNA, 14019 bp, Homo sapiens
  source 1..14019: mol_type = unassigned DNA
attcccagagtgcatatcgggaatagacacacaaagacatgcgcactcaacttaatcagccatttttttaaacagggctaaaacgataataattagcagaataaagacatatcggattttcatttcctttcctccttttcccaaccccttcacaaccaaacagcgagaccgcggtcggcacatgctttaactcctcccggacccccgaggaccgctccatgccccccactttctgctccagcgtttttattttcacccaataaagttcgaggattattttttattttttttgtttttttaatgaaccctctcgttttacttggatgtgatcagctgtaagtaaaataaaagcaaaacaaaaaagaggcgaagatcgagtaggaactgcaggggaaatggaaagtccctgacaggctggatgaaatgagatccccatgtagcaattgccatggaaacctgtgactcccctcctatctcaaggcaggaaaatgggcagagcacatcaaagctatgtggaacgacacaacttgataatgaggtgccagagaaagttgcagggatggagcctgacagggaaaacagctccacagatgacaacctgaaaacggatgagcgcaaaagtgaagccttgctgggtttcagcgttgagaatgcagctgccactcaggttacctcagcaaaggagataccctgcaacgaatgtgccacttcttttcccagtttacagaaatacatggaacaccactgccctaatgcccgccttcctgtcctgaaggatgacaacgagagcgagatcagcgagttagaggacagtgacgtggaaaatctaacaggggagatcgtttaccagcctgatgggtcagcatatataattgaggactccaaagaaagtgggcagaatgcacagactggggcaaatagcaaactcttttctacagcgatgttcctggactccctggcatctgctggagagaagagtgatcagtctgcttctgcacctatgtcgttctacccacagatcatcaacacttttcatatcgcttcatccctcgggaaaccatttacagccgatcaggctttcccaaatacctcagcattagcaggagttggtcctgtgttgcacagtttccgtgtctatgatctccgacacaagagagagaaagactatctaaccagtgatggctcagccaaaaactcctgtgtgtccaaagatgtccctaacaatgtggacttgtccaaattcgatggttgtgttagcgatgggaaaaggaaacctgttttaatgtgtttcttgtgcaagttgtcttttggttatatcaggtcatttgtaacccatgctgtgcatgatcatcggatgaccctcaatgacgaggagcagaagctcctcagtaataaatgcgtctccgccataatacaggggattggcaaagacaaagaacctcttataagctttctggaaccaaaaaaatccacttctgtttatccccatttttctactacaaacctcataggacccgatccaaccttccgcggtttatggagcgcttttcatgttgaaaatggtgactctttgccggctggctttgccttcttaaaaggaagcgcgagcacctcgagctcagcagagcagccgctggggattacccaaatgccaaaggctgaagtgaatctgggggggctgtctagtttagtagtgaacaccccaattacctctgtctccctcagccactcatcgtctgagtctagcaagatgtcagagagcaaagaccaagagaacaactgtgaaaggccaaaagaaagcaacgttttacacccaaacggggagtgccctgtcaaaagtgaacccactgaaccgggagatgaggatgaagaagatgcgtactccaatgaacttgatgacgaggaagtattaggtgaactcaccgatagtattggtaacaaagatttccctctcttaaaccaaagcatttctcctttatcatccagtgtgctaaaatttattgaaaagggtacctcgtcctcctcggcgactgtttctgatgacacagaaaagaaaaaacagactgctgctgttagggccagtggcagtgttgctagtaactatggcatcagtggcaaggactttgcagacgcaagtgccagtaaagacagtgccacagctgctcatccaagtgaaatagcccggggagacgaagacagttcagccactcctcaccagcatggctttaccccgagtactcctggcacaccagggcctggaggagacggctcaccgggcagtggcatcgagtgtccaaagtgcgacactgtgttggggtcttcgaggtctcttggtggtcatatgactatgatgcactcgaggaactcatgcaaaaccctcaaatgtcctaaatgtaactggcactacaaatatcagcagaccctggaggcccatatgaaggagaaacaccctgagccgggtggctcttgtgtttattgtaagactggacagcctcaccccaggcttgcccggggtgagagttacacgtgtggctataaacccttccgttgtgaggtttgtaactactctaccactaccaaaggcaacctcagtattcatatgcagtcggacaagcacctgaacaatgttcagaatctccaaaatggcaatggtgagcaggtgtttggccactctgccccagcccccaacaccagcctcagtggctgcggaacaccctctccgtccaaacccaaacagaaacccacctggcggtgtgaagtttgtgattatgaaaccaatgtcgccaggaacctccgaattcatatgaccagcgaaaagcacatgcataatatgatgcttttgcagcagaacatgaagcagatccagcataatctgcacttgggcctcgccccggcggaagcagagctttatcagtactacctagcccagaacataggcctgaccggaatgaagctggaaaaccctgccgaccctcagctgatgatcaatccattccagctggatccagcgacagcagcggctttggcaccagggctcgtaaataatgagctgccgcctgaaatccggcttgccagtggtcagctaatgggtgatgacctgtccctccttactgcaggagagctgtcaccttatatcagtgacccagcgctgaagctattccagtgtgctgtttgcaacaaattcacctctgacagcctggaggccctaagtgtgcatgtgagcagtgagcgctctctccctgaagaggaatggagggcagtaattggagatatctaccagtgcaagctctgcaactacaacactcagctcaaagccaacttccagctacactgcaagactgataaacatatgcagaaatatcaactggtggctcacattaaagaagggggcaaaagcaatgagtggaggttgaagtgtattgccattggcaaccctgttcacctaaaatgtaacgcctgtgactattacaccaacagtgtggataaattacgcttgcataccaccaatcacaggcacgaggcggccctgaagctctacaagcacttgcagaagcaagagggtgcagtgaatcccgaatcctgctattactactgtgccgtgtgtgattacaccaccaaggtcaagttgaatctggtacaacatgtccgttcggtgaagcatcagcagactgagggcctacggaagctccagctccaccagcaaggcctggcaccagaggaggacaacctcagtgagatcttttttgttaaagattgcccaccaaatgagcttgaaactgcctcattgggagccaggacttgtgatgatgatcttacagagcagcagttgagatcgacctcagaagaacaaagtgaggaggcagaaggagctattaagcctacagcagtggccgaggacgatgaaaaagacacaagtgagagagacaatagtgaaggcaaaaactctaataaagactctgggataatcacaccagagaaggaactaaaagttagtgtggcagggggtacccagccactcctgctggcaaaagaagaggatgttgcaacaaaaaggtcaaaacctacagaggacaataaattctgtcatgaacagttctatcaatgtccttattgtaactacaatagtagggaccaaagtcgtatccagatgcacgtcctatcacagcactcggtgcagccggtcatctgctgtcctctctgtcaggacgtcctcagcaacaaaatgcatctccaactgcatctgacgcatttgcacagtgtgtctccagactgtgtggagaagctgcttatgacagtgcctgtccctgatgtgatgatgccaaacagtatgctactgccagcagctgcctctgagaaatcagagcgggacacacctgcagccgtgacagctgaggggtctgggaaatattcaggtgaaagtccaatggatgacaaaagcatggcaggtctcgaggattcaaaggctaatgtggaagtaaagaatgaggagcagaaaccgactaaagaacccttggaagtctcagaatggaataaaaatagcagtaaggatgtgaaaatccccgacacactgcaagatcaattaaatgaacagcaaaaaaggcaaccgctctctgtttctgaccgtcatgtctacaagtatcgctgtaaccattgtagcttggctttcaaaactatgcagaagcttcagatacattcccagtatcatgcaattcgggctgcgacaatgtgtaacctctgccagcgcagtttccgtacattccaggctttaaaaaaacacttggaagcaggccaccctgaactgagtgaagctgaacttcaacagctatatgcctccttgcccgtgaatggagaactgtgggcagagagcgaaactatgtcccaggatgaccatggcctagagcaggaaatggagagagagtatgaggtggaccacgaagggaaagcaagtcctgtaggaagtgatagtagctctattccagatgacatgggctctgaaccaaagcggaccttaccttttagaaaagggcccaattttacgatggaaaaattccttgatccatctcgtccatataaatgtacagtgtgtaaagagtcattcacccaaaagaacattctcttggtccactataattcagtttctcacttgcataagctgaaaaaagttttgcaggaagcctccagtcctgtcccacaagaaaccaacagcaacacagataacaaaccctacaagtgcagcatctgcaatgttgcatacagccaaagctcaacattggaaatccacatgaggtctgtgctccaccagacaaaggctagggctgcaaagctggagcccagtggtcatgtggctggtgggcacagcattgcagcaaatgtcaacagccctggccaggggatgttagattccatgagtttagcagctgtaaacagcaaagatacccatttagatgccaaagaattaaataaaaagcaaactcctgatttaatctctgctcaacctgcacatcacccaccacagtcaccagcacaaattcagatgcaactacagcacgaattacaacagcaagccgcattctttcagcctcagtttctaaacccagcctttttgcctcattttcctatgaccccagaagcactgctgcagtttcagcagcctcagtttctctttccattttatatacctgggacggagttcagcttggggccagatttgggcttgccaggctctgccacatttgggatgcctggcatgacaggaatggctggctccttgcttgaagacctaaagcagcagattcaaacccaacatcacgttggtcaaactcaactccagatactacagcaacaagcacaacaataccaagccacacagccccagctgcagcctcaaaaacaacagcagcagccaccacctccacagcagcagcagcaacagcaggcaagcaaattattgaaacaagagcaaagtaacatagtgagtgcagactgccaaatcatgaaggatgtgccatcttataaggaggcagaagatatttctgaaaagccagaaaaaccaaagcaggaatttataagtgaaggtgaaggactcaaagaaggcaaagacacaaagaagcaaaaatccttggaaccatccatcccaccaccccgaatagcttcaggggccagaggaaatgctgccaaagcgttattggaaaactttggttttgaactggtcattcagtataacgaaaacaggcagaaggtacagaagaagggcaaaagtggtgaaggcgaaaacactgacaaactagaatgtggaacatgtggtaaattgttttccaatgttcttattttaaagagtcaccaagaacatgtacatgggcaattttttccatatgcagcgctagaaaaatttgctcgtcaatacagggaggcctatgacaagctttatccaatttctccatcttctccagaaacgccgcccccgccacctcctcctcctcccttgcctccggctcctccacagccttcttctatgggtcctgtaaagatccccaacacggtttctactcctctgcaagctccaccacccactcctcccccaccaccaccacctcctcctcctcctcctcctccccccccacctcctccaccttctgctcctccacaggtccaactgccggtttctctggacctgccgctctttccttccattatgatgcaacctgtgcaacaccctgcgcttcctccccagcttgccctgcagctgccacagatggacgcactctctgcagacctcacccaactttgccagcagcagctcggattagatcccaacttcttaagacattctcagttcaaacgcccacggacaagaattacagatgatcagctaaaaatcctgagggcttattttgacattaataattctccaagtgaagaacagatccaggaaatggcagagaaatctggcctctcccaaaaagttatcaaacactggtttagaaatacgctttttaaggaacgacagagaaataaagattcaccatacaacttcagtaaccctcctataacggttttagaagatatcagaattgatccacagcccacctctttagaacattacaaatctgatgcatcattcagtaaaaggtcttctagaacgagatttactgactaccagcttagggttctgcaagacttttttgacacaaacgcttacccaaaagatgatgaaatagaacaactctccactgttctcaatctgcctacccgggttattgttgtatggttccagaatgctcgtcagaaagcacgaaagagttatgagaatcaagcagaaacaaaagataatgaaaaaagagaactcactaatgaacggtacattcgaacaagcaacatgcagtaccagtgtaaaaagtgcaatgtggttttccccaggatctttgacttgattacgcatcagaaaaagcagtgttacaaggatgaagatgatgatgcccaagatgaaagccaaacagaagactccatggatgccactgatcaagtggtatacaagcattgcacagtgtctggccaaacggatgcagctaaaaacgctgctgcccctgcagcaagttctggctctgggaccagcacccccctgattccatcacccaaaccagaacctgagaagacttctccaaaacctgaatatcccgcagaaaagccaaagcagagtgacccctctcccccttctcaaggcaccaaaccagccctgccattagcatcgacttcctcggacccaccacaggcatccacagcccagccacagccacagccacagccaccaaaacaaccccaacttatcggaagacctccctcggcctctcaaacaccggtcccttccagtccactgcaaatttccatgacgtctctccagaacagtctacctccacagttactacaataccaatgtgatcagtgtacagttgccttcccaactctggaactctggcaggaacaccagcacatgcacttccttgctgctcaaaaccaattccttcactctccgttcttggaaaggcccatggacatgccctacatgatatttgaccccaacaatccgctgatgactggacaactgctgggcagttccctcactcaaatgccccctcaggccagttcctcccacaccacagcccccacaacggttgctgcttccctaaaaaggaaactagacgataaagaagataataattgcagtgaaaaagaaggagggaatagcggtgaagaccaacaccgagataaacgcttgagaaccacgatcaccccggaacagctggaaatactctatgaaaaatacttgctggattccaatcctaccagaaaaatgcttgatcatattgcccgcgaagtcgggctgaaaaaaagggtcgtgcaagtctggttccagaatacacgagcgcgggagaggaaaggccagttccgggcggtgggtccagcacagtctcataaacggtgtccgttttgccgagccctgtttaaagcaaagtcggccttagaaagccacattcgctctcggcactggaatgaaggaaagcaggcaggttacagcttgccaccaagccctttaatatccaccgaagatgggggagaaagcccacagaaatacatctattttgattacccatctttgccattaactaaaattgatctatcaagtgagaatgaattggcttctacagtgtcaacacctgttagtaaaacagcagagctgtcaccgaagaatcttttaagcccttcttcttttaaagcagagtgttctgaggatgtagagaatttaaatgcccctcctgctgaggctgggtatgatcaaaataaaaccgattttgatgagacttcatcgattaatacggcaatcagtgacgccaccaccggagacgagggaaacactgaaatggaaagcaccacaggaagttccggagatgtgaaaccggctttgtctcccaaagagccaaaaactctggatactctgccaaaacctgcaaccacacctaccacggaggtctgcgatgacaaatttctcttttctctcacaagcccatccatccatttcaatgacaaagatggcgaccacgaccaaagcttttacatcacagatgacccggatgacaacgccgaccgcagcgaaacgtccagcatagcggacccgagctccccaaatccattcggatccagcaatccctttaaatccaaaagtaatgatcggccgggtcacaagcgttttcgaacgcaaatgagcaatcttcaactcaaggttctcaaggcttgctttagtgactaccgaactccaaccatgcaagaatgtgaaatgttagggaatgagattggtctgcccaaacgcgtagtccaggtgtggttccaaaatgcaagggcaaaggaaaagaaatttaaaattaacatagggaagcctttcatgatcaatcaaggcggaacggaaggcaccaaaccagagtgtaccctctgcggggtgaagtactctgcccgcttgtccatcagagatcacattttctccaaacagcacatttcaaaagtgagggagaccgttggcagtcagctcgatcgggagaaagattacttggctccgaccacggttcggcagctgatggcacagcaagaacttgatcgtataaagaaagcttcagacgtgctgggcttgacggtacagcagccaggcatgatggacagcagttctctccacggcatcagcctgccaacagcctaccccggactccccggccttcctccagtccttctccccggaatgaacggtccatcctccttgccgggatttccacaaaattcaaacactttaacacctcccggtgcaggcatgcttgggtttcctacttcagctacttcgtctcctgccctgtctctcagcagtgcccccaccaaacctttgctgcagactccaccacctccaccacctcctcctcctcctcctccttcatcctctctgtcaggacagcagaccgagcaacagaacaaagaatctgagaaaaagcaaactaagccaaacaaggtgaaaaaaatcaaagaggaggaattagaggccaccaaacccgaaaaacaccccaaaaaagaggaaaaaatctcatctgctctttcagtgttgggcaaagttgtaggtgaaacacatgtcgatcctattcagttgcaggcattacagaatgcaattgctggtgacccagcttcctttataggcggacagttcttgccatactttatccctgggtttgcttcttattttacacctcagctccctggaacagtgcaggggggatacttcccacctgtctgtggcatggagagcctctttccttatggccctacaatgccccagacactggcaggtctgtccccaggtgcactgttgcagcagtaccaacagtatcagcagaacctgcaggagtccctgcaaaagcagcaaaagcaacagcaagaacagcagcagaaaccagttcaggcaaagacatccaaagtagaaagtgaccagccgcaaaactccaacgatgcttcagaaacaaaggaagacaaaagtactgctacagaaagcacaaaagaagaaccccagttagaatccaaaagtgcagacttttcagacacttacgttgttccattcgtcaagtatgagtttatatgcagaaagtgccagatgatgtttactgatgaagacgccgcagtaaatcatcaaaagtccttctgttatttcggtcagcctttgattgacccacaagagacagtgcttcgtgtcccagtcagcaaatatcagtgtcttgcctgtgatgtggctatcagtgggaatgaagcacttagccaacacctccagtcaagcttgcacaaagagaaaacaatcaaacaagcaatgagaaatgccaaagagcatgttagattattacctcactcagtctgctcccctaatcctaacaccacatctacctcgcagtctgcagcttcttctaataacacctatcctcatctttcttgcttctccatgaagtcctggcctaatatccttttccaagcgtctgccaggagagctgcttctcccccttcttctcctccttccctttccttgccttcaacggttacctcaagtttgtgcagcacctcaggggttcaaacctcactacccacagaaagttgttcagatgagtctgacagtgagctgagccagaagctagaagacttagataattctttggaagtgaaggctaagcctgcttctggcctagatggtaatttcaatagcatccgaatggatatgttcagtgtgtaggagtgaagacaggatcccgtgcttaaaaaaataaaaaataaaaaaataaaaaaaaaataagactttaactgcagttccaaagcttctctaacccaaaaattacagtaccaaatgattgactcaggattgtttttcccatattgatatgctggcaatataggatggtatgtaatggacagaactgatgcagatggttgaatgcgcttgtactatatgctaaaatatggaaaaggaaaaaaaaatctcacaagttcttttggaacttgtttcaagccaaaaactctcaagaaagcaaattgcacctcagctggattgatttccaaatgctagcatgtactgtatgggaggatgatccagatgtttcaaagagaatttctcttagtttagttaggtgtaattcagtagctttaaattctcaggtcagaacataacatttctcatttgttaaaagcagcaagaagcctggtaaaactgtgacttttccccaaacgtcaatctttattagaaagcattttctaggtgtgtttagtgtacaaagagactttataacccttactggacaacacacagatccttgagctcacgctgcaggatagtacagttttaccgcagagggaatctggaacagtggaatcatgtgtctgccctgtgtattgcagtttgtattgccacaagctatatttataccagtgtcacccttttcttgtagaatatactaataatctgtgccaactctaccttctcacttttacctctgacgtcattctttttttctgaaagaggtaataattctagttttgatagactctgaggattatgtgaacaggacatttttcatttgtgaatttaatgctatactgtcaaggtacttgcttgtgtctgaactctagtgcacttatgattttgtagaccatgtgaaatttaataagataccttttttttcctttctttgtgtgtagtgcagcaacagtttggtctgcatttgttagaagtttaactcctaacaacccaaagacctatttaacaattggtgcataaatgaaagtagtactgtatacttgaaactgtttaagtacaagttgaacaaaaattatgaaaaggtatatttgcttctcgggaaagcaaagaagctgctttaaaaaataaaaaggggactaaaaatttgttttgtataaagaggttagccctgcgcacgtaggactgaattcagtgatatccctatacactgccatttagtggataggttattgtacttccattcatactctgggcacttgtgttgtattgttctgttacatactttttttaacctgttttgttttatcatatatgcattaaaagtattatctttatcaacatttgctgctactgtgttaacatttttgttttgcttgccatgaatttcaacttccaccacccagtgaattgatttataaattgctatgctttgctgtttttctgttgctgtggaacttaaagaatgtgaaagctgtcaaagggtattttacgaatcacttttgtgtttgatatagtaaaacaatgtgattcattccaaagtaacagaaggttatttgtaagaaagttaaaggcttgtgaacaaagaaagctaagctgttgtacatatttgtagttggctgtgcatggtacaaatttattaatatgaagaaatgcaaaatgtattgcttttgatatttctcttccgagatgaacaagtagcatgtaatgcaactgtttgacagtttaactcaagtcatgcttcaaactgttttaatgatcaaatcaagacacatttcattttacattttattattgtacagtttttgtttcggatgatgatcacagcaatctttattctatacattttatgtgaacttttttaatgtctttaatttggattttttttttttttagtattttaacatttattttaatcctgaagacacttttttgattgtgtttcgtaagagacaacatggcctcctaaggtgcaatcctgccgctatagtgagctaatgtcctgaatccaaaggcttcagaaaattgcttttgcctttttcatgaatgttaagcagcagcattgtgagatcgatctgtcctggcagttaacacgatgtgcaacagtgtgttagcatggaacagaacgcttttcacaaaacaaaggactgttttacaaatgattattccgacagtgtgtcgacataaacttttacaactgcacagcagccaaaaaaagaaaaaaaaaagaaaaaaaactttaactggatggacgttgttagggtgagaaataaaaggacagcctccaaaggttgagaatgagaattgttttttcctggatatcaaagggattatcacagcgcaatcattgtctacacaacatgtactctcaacgcctgggttacataggaaatgcaccctgaggttttaataaaagcccctatggctataactttaaataaactaaaccaaaaatgttattgatgttttatatatagagagtagtctcattagtttttgttactgtaatgtttgaagtctcaaatgcaccgtattacggtaaataacatggttttgaaaacttttttttattttgtcacagacctgttgtcatagttgaaatgatgtttattgtagatggtatttgaacttattcttctggaaatagttcatcaagtatgtttgttgctcattgtgatacattaaaaactgtatctacatattta

SEQ ID NO: 34789 - DNA, 561 bp, Homo sapiens
  source 1..561: mol_type = unassigned DNA
acggaaaccaaagctcatggaaattcctgggaaacatcacataactacagagtgcagctgaagaaattgagtgttcactgcctgataaagaaaaggtccctgacaggctggatgaaatgagatccccatgtagcaattgccatggaaacctgtgactcccctcctatctcaaggcaggaaaatgggcagagcacatcaaagctatgtggaacgacacaacttgataatgaggtgccagagaaagttgcagggatggagcctgacagggaaaacagctccacagatgacaacctgaaaacggatgagcgcaaaagtgaagccttgctgggtttcagcgttgagaatgcagctgccactcaggttacctcagcaaaggagataccctgcaacgaatgtgccacttcttttcccagtttacagaaatacatggaacaccactgccctaatgcccgccttcctgtcctgaaggatgacaacgagagcgagatcagcgagttagaggacagtgacgtggaaaatctaacaggggagatcgtttaccagcctgatgggtcagcatat

SEQ ID NO: 34790 - DNA, 524 bp, Homo sapiens
  source 1..524: mol_type = unassigned DNA
gtagtattatatttttagttgggtggatggatggaagagtgagagagaggctgcggctgccgctgccttttcgggtgttgcttagattaaggctgagacttggctgcgattgggacgcgacagtgacacgggcatcgatcgcttccattgagagcaatgcaaaaacacagcccgggtccctgacaggctggatgaaatgagatccccatgtagcaattgccatggaaacctgtgactcccctcctatctcaaggcaggaaaatgggcagagcacatcaaagctatgtggaacgacacaacttgataatgaggtgccagagaaagttgcagggatggagcctgacagggaaaacagctccacagatgacaacctgaaaacggatgagcgcaaaagtgaagccttgctgggtttcagcgttgagaatgcagctgccactcaggttacctcagcaaaggagataccctgcaacgaatgtgccacttcttttcccagtttacagaaatacatggaacaccactgccct

SEQ ID NO: 34791 - DNA, 2409 bp, Homo sapiens
  source 1..2409: mol_type = unassigned DNA
tctgggccggggccctgtgccgctgaagacatggagtttgtgtctggataccgggatgagttccttgatttcactgcccttctcttcggctggttccgaaagtttgtggcagagcgtggagctgtagggactagccttgagggccgctgccggcagctggaggcccagatcagaaggctaccccaggaccctgccctttgggtgctccatgtcctgcccaaccatagtgtgggcatcagcctggggcaaggggcagaaccaggtcctggaccaggcctggggactgcctggctcctgggagacaaccctccactccacctgcgagacctgagcccctacatcagctttgtcagcctagaggatggggaggaaggggaggaggaagaggaggaagatgaagaagaagagaagagagaggacgggggtgcaggcagcacagagaaggtggaaccagaggaggaccgggagctagcccctaccagcagggagtccccccaggaaacaaaccctccaggagagtcagaggaggctgcccgggaggcaggaggtggcaaggatggctgccgagaggacagggtggagaacgaaacaagaccccagaagaggaagggacagaggagtgaggctgcccccctgcacgtttcctgtctcttacttgtgacggatgagcatggcaccatcttgggcattgatctgctagtggatggagcccagggaaccgcaagctggggctcagggaccaaggacctggctccttgggcctatgctctcctctgtcacagcatggcctgtcccatgggctctggggatccccgaaagccccgacagcttactgtgggagatgcccggctgcatcgagagctggagagcttggtcccaaggctaggtgtgaagttagccaaaaccccaatgcggacatggggtccccggccaggcttcacctttgcttcccttcgtgctcgaacctgccatgtgtgtcacaggcacagctttgaagcgaagctgacaccttgcccccagtgtagtgctgtcttgtattgtggagaggcttgtctccgggctgactggcagcggtgcccagatgatgtgagtcaccgattttggtgcccaaggcttgcagccttcatggagcgggcaggagaactggcaaccctgccttttacctacaccgcagaggtgaccagtgaaaccttcaacaaagaggccttcctggcctctcggggcctcactcgtggctattggacccagctcagcatgctgattccaggcccgggcttctccagacacccccgaggcaacacgccatccctcagccttcttcgcggtggagacccctaccagcttctccagggagacgggactgccctgatgcctcctgtgcccccacatccaccccggggtgtttttggctcatggcaggattactacacatggcggggcctcagcttggactcccccatagccgtgcttctcacctacccgctgaccgtgtactacgtcatcacccacctggtgccccagtccttccctgagctcaacatccaaaacaaacagtcactgaagatccacgtggtggaggccgggaaggagtttgaccttgtcatggtgttttgggagcttttggtcctgctcccccatgtggccctggagctgcagtttgtaggtgatggcctgccccccgaaagcgacgagcagcattttaccctgcagagggacagcctggaggtgtctgtccggcctggttccggcatatcagcacggcccagctctggcactaaggagaaagggggccgcagggacctgcagatcaaggtgtcagcaaggccctaccacctgttccaggggcccaagcctgacctggttattgcttctccctcctctctgtctgcaggatttaactccgggtttgctctcaaggatacgtggctgaggtctctgccccggttacagtccctccgagtgccagccttcttcaccgagagcagcgagtacagctgtgtgatggacggccagaccatggcggtggccactggagggggcaccagccctccccagcccaaccccttccgctccccctttcgcctcagagcggccgacaactgcatgtcctggtactgcaatgccttcatcttccacctggtttacaagcctgctcaagggagcggggcccgcccggcgcccgggcccccacccccatccccaactccctctgctcctcctgcccccacccgaaggcgccgaggagaaaagaaacctgggcggggggcccgccggcggaaatgaatgctgataccctagtagtccccagctcccaaacactgaaaggaaaacgtgaaaacactcaaggcctagggggaggacaggttggtaaaacatgaaaaggtaaataaaattacttgtttgaaacca

SEQ ID NO: 34792 - DNA, 2274 bp, Homo sapiens
  source 1..2274: mol_type = unassigned DNA
cggctgcagtctgggccggggccctgtgccgctgaagacatggagtttgtgtctggataccgggatgagttccttgatttcactgcccttctcttcggctggttccgaaagtttgtggcagagcgtggagctgtagggactagccttgagggccgctgccggcagctggaggcccagatcagaaggctaccccaggaccctgccctttgggtgctccatgtcctgcccaaccatagtgtgggcatcagcctggggcaaggggcagaaccaggtcctggaccaggcctggggactgcctggctcctgggagacaaccctccactccacctgcgagacctgagcccctacatcagctttgtcagcctagaggatggggaggaaggggaggaggaagaggaggaagatgaagaagaagagaagagagaggacgggggtgcaggcagcacagagaaggtggaaccagaggaggaccgggagctagcccctaccagcagggagtccccccaggaaacaaaccctccaggagagtcagaggaggctgcccgggaggcaggaggtggcaaggatggctgccgagaggacagggtggagaacgaaacaagaccccagaagaggaagggacagaggagtgaggctgcccccctgcacgtttcctgtctcttacttgtgacggatgagcatggcaccatcttgggcattgatctgctagtggatggagcccagggaaccgcaagctggggctcagggaccaaggacctggctccttgggcctatgctctcctctgtcacagcatggcctgtcccatgggctctggggatccccgaaagccccgacagcttactgtgggagatgcccggctgcatcgagagctggagagcttggtcccaaggctaggtgtgaagttagccaaaaccccaatgcggacatggggtccccggccaggcttcacctttgcttcccttcgtgctcgaacctgccatgtgtgtcacaggcacagctttgaagcgaagctgacaccttgcccccagtgtagtgctgtcttgtattgtggagaggcttgtctccgggctgactggcagcggtgcccagatgatgtgagtcaccgattttggtgcccaaggcttgcagccttcatggagcgggcaggagaactggcaaccctgccttttacctacaccgcagaggtgaccagtgaaaccttcaacaaagaggccttcctggcctctcggggcctcactcgtggctattggacccagctcagcatgctgattccaggcccgggcttctccagacacccccgaggcaacacgccatccctcagccttcttcgcggtggagacccctaccagcttctccagggagacgggactgccctgatgcctcctgtgcccccacatccaccccggggtgtttttgtccctgagctcaacatccaaaacaaacagtcactgaagatccacgtggtggaggccgggaaggagtttgaccttgtcatggtgttttgggagcttttggtcctgctcccccatgtggccctggagctgcagtttgtaggtgatggcctgccccccgaaagcgacgagcagcattttaccctgcagagggacagcctggaggtgtctgtccggcctggttccggcatatcagcacggcccagctctggcactaaggagaaagggggccgcagggacctgcagatcaaggtgtcagcaaggccctaccacctgttccaggggcccaagcctgacctggttattggatttaactccgggtttgctctcaaggatacgtggctgaggtctctgccccggttacagtccctccgagtgccagccttcttcaccgagagcagcgagtacagctgtgtgatggacggccagaccatggcggtggccactggagggggcaccagccctccccagcccaaccccttccgctccccctttcgcctcagagcggccgacaactgcatgtcctggtactgcaatgccttcatcttccacctggtttacaagcctgctcaagggagcggggcccgcccggcgcccgggcccccacccccatccccaactccctctgctcctcctgcccccacccgaaggcgccgaggagaaaagaaacctgggcggggggcccgccggcggaaatgaatgctgataccctagtagtccccagctcccaaacactgaaaggaaaacgtgaaaacactcaaggcctagggggaggacaggttggtaaaacatgaaaaggtaaataaaattacttgtttgaaa

SEQ ID NO: 34793 - DNA, 4441 bp, Homo sapiens
  source 1..4441: mol_type = unassigned DNA
acggggaggtggcgccgccgtgccgagccggcctcagactcacctctgacgccgctcttcgcgctccgctggtgaatggagtcgcgttctctgttttgctgttgctgctgcctttgtgacgggatcgctttctcccatcgaaccttctagttgcttattgcagctttgtctcctcagcactctgctgtcactcaaggaagtatcatcaagaacaaggagggcatggatgctaagtcactaactgcctggtcccggacactggtgaccttcaaggatgtatttgtggacttcaccagggaggagtggaagctgctggacactgctcagcagatcgtgtacagaaatgtgatgctggagaactataagaacctggtttccttgggttatcagcttactaagccagatgtgatcctccggttggagaagggagaagagccctggctggtggagagagaaattcaccaagagacccatcctgattcagagactgcatttgaaatcaaatcatcagtttccagcaggagcatttttaaagataagcaatcctgtgacattaaaatggaaggaatggcaaggaatgatctctggtatttgtcattagaagaagtctggaaatgtagagaccagttagacaagtatcaggaaaacccagagagacatttgaggcaagtggcattcacccaaaagaaagtacttactcaggagagagtctctgaaagtggtaaatatgggggaaactgtcttcttcctgctcagctagtactgagagagtatttccataaacgtgactcacatactaaaagtttaaaacatgatttagttcttaatggtcatcaggacagttgtgcaagtaacagtaatgaatgtggtcaaactttctgtcaaaacattcaccttattcagtttgcaagaactcacacaggtgataaatcctacaaatgccctgataatgacaactctcttactcatggttcatctcttggtatatcaaagggcatacatagagagaaaccctatgaatgtaaggaatgtggaaaattcttcagctggcgctctaatcttactaggcatcagcttattcatactggagaaaaaccctatgagtgtaaagaatgtggaaagtctttcagccggagttctcacctcattggacatcaaaagacccatactggtgaggaaccctatgaatgtaaagaatgtggaaaatccttcagctggttctctcaccttgttactcatcagagaactcatacaggagacaaactgtacacatgtaatcagtgtgggaaatcttttgttcatagctctaggcttattagacaccagaggacacatactggagagaaaccctatgaatgtcctgaatgtgggaaatctttcagacagagcacacatctcattctgcatcagagaacccatgtgagagtgaggccctatgaatgcaatgaatgtggaaagtcttacagccagagatctcaccttgttgtgcatcatagaattcacactggactaaaaccttttgagtgtaaggattgtggaaaatgttttagtcgaagctctcacctttattcacatcaaagaacccacactggagagaaaccatatgagtgtcatgattgtggaaaatctttcagccagagttctgcccttattgtgcatcagaggatacacactggagagaaaccatatgaatgctgtcagtgtgggaaagccttcatccggaagaatgacctcattaagcaccagagaattcatgttggagaagagacctataaatgtaatcaatgtggcattatcttcagccagaactctccatttatagttcatcaaatagctcacactggagagcagttcttaacatgcaatcaatgtgggacagcgcttgttaatacctctaaccttattggataccagacaaatcatattagagaaaatgcttactaataaatatgggaatttttcacaaagagcaatgactttattttgcattggagaactcctggagataagctgtacaaattgaatctatgtggaaatgctttcagtcttgttactatcctattgcacattagagaattggtcctggaagggaaagaaaccacagattttatttcagtacacaaatccatcagattttcttcttttcatgaattcctacagaagtaattggcctgagagcattcttgaccaagtcttaaatgctagaatctgagaaggaattattaaataggtgagttgttgagcgagaaccccttcatttgaaaagaaatgagtatgctactatagggagagttgttgctgagaattaagaaatgatacagttaatgcaacaaaagatggaaaataatatttcagtcaatatgtcattgttttcttgactatgtctctcttctgggacatttagtagtgtttggtatgttttatgtgtctggtagaaaccatattttggttaacagcaagaaaaatgcttataatgtagtacaattaaaaacaacacatctccactaccagtgctaacccatttttaagtacatttgcatgtgggcaagaattgaaagtatacagataattgaacagaattgatttgttagataaggagattttgactgagttttatagtctgtttaatgttgctgtaataattattttaagaaacttttaaatattgtaagaggatatctagtttctctattctaccatcaaagaagcttttgagtaccacctgttaatgagctttcctattctaaattgttttgggtcacagagttccactttttccactcttattagcactgcaaaagctcctgagaatttaaaaacacagtaattctctggatgttaggacctaggggaacattgggcatttgaacatatcagggagggtccccattttagtgggaacaagtatttaaacaatatttagagcaagtgtcctcatgtgataaacagagcacagtccaaagataccctctttctcaaggtagtcttttatctttataaagaaagattagtgtttaagagcgtagacttgagctagactacccaggttgaaaccccactagctgggtgatcttgaacatgctgcttagcttctctgtgccaaacttactgatatcctcatctgtaaattagcgataataatagtacttacctggtaggattatggtgagtattaaatgagtaaatggaaacagcttagaatagtgcctgacatatattatgttctctgtagttactggctgtgattattaataatattgccgcaccctaatatctgttatttaattgaaatctgcttgtgtgcttataagaatttactgagttctcacttcccttacagtcatacatggtttttcccttttgcctaaatcagaactcaacagcctgggaaaatcactgacaaatagtggatataggtttcatttctgaggatcaataaacagcttgtaatgttgtatacacatttattctgtttgtacaaaggttttccattctatggagaggatcccagtcttcagattctctggtaagttaataacccacaaaagattcaggaagaggatctattttaattttctctttcattctataaatcagtctgttgtatatagggactgaccatgattctccattttctggcataaatattagctgctcaatgattgattgttgaatgatagatgaagtattgctgaagccaaccagagatcttgatctctctctgaggaaaaaacctagaaatgatggttagaatcaggagacttgagaactacgaggaacatggcagcctctagctcatacttgtcgttgtacaattgagatcaagtgaattggccccggtctcacattttcagtgaagtcagactcagaactaggtcctgggtttcatgtttcctgctgctcttctcactgtgtacacaccatgcccacatacaacatacctatcagaaatggttttcattaagggagtagaatagtcacttaactggggctcttaacattgctaataacctgtggctcaatttcctcaactgtataatgaggttactactagtatctacctcaaagcgttgtcatgtggattgagatgatatgtatgaatcacataaaagagtgcctggcacatagtaggtgccattaataatattactattgttaacaccttaagggtctaacttgtaatgaagacagaaatatgtatgaggatgatcactgaaatatttatgacagtgcataatttgcaaaataaaaaatgtacactagcataatatttgtggcatatccgtgtaatggaagattatgcaggcattaaaatatgtacacaaaaagtttggtaaaggaaaaatgctgtcatgtgttacaaaagcatgataaataattgttaatatggaataagctcaaatatgtcaaaataaatgtaaaaaatgagtgttgcccaaaa

SEQ ID NO: 34794 - DNA, 2169 bp, Homo sapiens
  source 1..2169: mol_type = unassigned DNA
agactcacctctgacgccgctcttcgcgctccgctggtgaatggagtcgcgttctctgttttgctgttgctgctgcctttgtgacgggatcgctttctcccatcgaaccttctagttgcttattgcaggtatatacgaaagtgctgaattttgtgtttgcatcgtcatcaggcgcgtgttgagccctttagtaatgtagcagtgtattagcttcgtatttctaggtagacggtaatttcgtcaatgaaaaaatttaacggtgatcgtcaccccttgcctcagtcactttctgtccctcgcgcggccccggcgttcacggcggacgttcttgttctgtggagaataacggctgcacctggagattgacgcagagtgggcggcggtggtgctttgtctcctcagcactctgctgtcactcaaggaagtatcatcaagaacaaggagggcatggatgctaagtcactaactgcctggtcccggacactggtgaccttcaaggatgtatttgtggacttcaccagggaggagtggaagctgctggacactgctcagcagatcgtgtacagaaatgtgatgctggagaactataagaacctggtttccttgggttatcagcttactaagccagatgtgatcctccggttggagaagggagaagagccctggctggtggagagagaaattcaccaagagacccatcctgattcagagactgcatttgaaatcaaatcatcagtttccagcaggagcatttttaaagataagcaatcctgtgacattaaaatggaaggaatggcaaggaatgatctctggtatttgtcattagaagaagtctggaaatgtagagaccagttagacaagtatcaggaaaacccagagagacatttgaggcaagtggcattcacccaaaagaaagtacttactcaggagagagtctctgaaagtggtaaatatgggggaaactgtcttcttcctgctcagctagtactgagagagtatttccataaacgtgactcacatactaaaagtttaaaacatgatttagttcttaatggtcatcaggacagttgtgcaagtaacagtaatgaatgtggtcaaactttctgtcaaaacattcaccttattcagtttgcaagaactcacacaggtgataaatcctacaaatgccctgataatgacaactctcttactcatggttcatctcttggtatatcaaagggcatacatagagagaaaccctatgaatgtaaggaatgtggaaaattcttcagctggcgctctaatcttactaggcatcagcttattcatactggagaaaaaccctatgagtgtaaagaatgtggaaagtctttcagccggagttctcacctcattggacatcaaaagacccatactggtgaggaaccctatgaatgtaaagaatgtggaaaatccttcagctggttctctcaccttgttactcatcagagaactcatacaggagacaaactgtacacatgtaatcagtgtgggaaatcttttgttcatagctctaggcttattagacaccagaggacacatactggagagaaaccctatgaatgtcctgaatgtgggaaatctttcagacagagcacacatctcattctgcatcagagaacccatgtgagagtgaggccctatgaatgcaatgaatgtggaaagtcttacagccagagatctcaccttgttgtgcatcatagaattcacactggactaaaaccttttgagtgtaaggattgtggaaaatgttttagtcgaagctctcacctttattcacatcaaagaacccacactggagagaaaccatatgagtgtcatgattgtggaaaatctttcagccagagttctgcccttattgtgcatcagaggatacacactggagagaaaccatatgaatgctgtcagtgtgggaaagccttcatccggaagaatgacctcattaagcaccagagaattcatgttggagaagagacctataaatgtaatcaatgtggcattatcttcagccagaactctccatttatagttcatcaaatagctcacactggagagcagttcttaacatgcaatcaatgtgggacagcgcttgttaatacctctaaccttattggataccagacaaatcatattagagaaaatgcttactaa

SEQ ID NO: 34795 - DNA, 472 bp, Homo sapiens
  source 1..472: mol_type = unassigned DNA
gtgccgagccggcctcagactcacctctgacgccgctcttcgcgctccgctggtgaatggagtcgcgttctctgttttgctgttgctgctgcctttgtgacgggatcgctttctcccatcgaaccttctagttgcttattgcagtggctgtgggagcaaagagtaagaaacactaaaacttcctggagaaattagctttgtctcctcagcactctgctgtcactcaaggaagtatcatcaagaacaaggagggcatggatgctaagtcactaactgcctggtcccggacactggtgaccttcaaggatgtatttgtggacttcaccagggaggagtggaagctgctggacactgctcagcagatcgtgtacagaaatgtgatgctggagaactataagaacctggtttccttgggttatcagcttactaagccagatgtgatcctccggttggagaagggagaagagccctg

SEQ ID NO: 34796 - DNA, 546 bp, Homo sapiens
  source 1..546: mol_type = unassigned DNA
gtgcgtgacgtcaggccacggggaggtggcgccgccgtgccgagccggcctcagactcacctctgacgccgctcttcgcgctccgctggtgaatggagtcgcgttctctgttttgctgttgctgctgcctttgtgacgggatcgctttctcccatcgaaccttctagttgcttattgcagcttcgtatttctaggtagacggtaatttcgtcaatgaaaaaatttaacggtgatcgtcaccccttgcctcagtcactttctgtccctcgcgcggccccggcgttcacggcggacgttcttgttctgtggagaataacggctgcacctggagattgacgcagagtgggcggcggtggtgctttgtctcctcagcactctgctgtcactcaaggaagtatcatcaagaacaaggagggcatggatgctaagtcactaactgcctggtcccggacactggtgaccttcaaggatgtatttgtggacttcaccagggaggagtggaagctgctggacactgctcagcagatcgtgtacagaaatgtgatg

SEQ ID NO: 34797 - DNA, 648 bp, Homo sapiens
  source 1..648: mol_type = unassigned DNA
ggccacggggaggtggcgccgccgtgccgagccggcctcagactcacctctgacgccgctcttcgcgctccgctggtgaatggagtcgcgttctctgttttgctgttgctgctgcctttgtgacgggatcgctttctcccatcgaaccttctagttgcttattgcagcttcgtatttctaggtagacggtaatttcgtcaatgaaaaaatttaacggtgatcgtcaccccttgcctcagtcactttctgtccctcgcgcggccccggcgttcacggcggacgttcttgttctgtggagaataacggctgcacctggagattgacgcagagtgggcggcggtggtggaaacattaaagaatgtgcttcagagagaaaggaaatgaaaccaaatggaaatctggatctacacaaacgagtaaacagcactggcgaatggtaactacctagctttgtctcctcagcactctgctgtcactcaaggaagtatcatcaagaacaaggagggcatggatgctaagtcactaactgcctggtcccggacactggtgaccttcaaggatgtatttgtggacttcaccagggaggagtggaagctgctggacactgctcagcagatcgtgtacagaaatgtgatgctggagaactat

SEQ ID NO: 34798 - DNA, 5645 bp, Homo sapiens
  source 1..5645: mol_type = unassigned DNA
gtgtcttctgctcctaggggcctagcctgtgtggccctctgacctgcagatattgggagatccacagctaagacgccaggaccccctagaagcctagaaatggatgacccgaggtatggaatgtgtcctctcaagggagcaagtggatgccctggggctgagaggagtcttctggtgcagtcttattttgaaaaggggccattgacgtttagggatgtggccatagaattctctctggaggagtggcaatgcctggacagtgctcagcagggtttgtataggaaagtgatgttagagaactacagaaacctggtcttcttggcaggtattgctctcactaagccagacctgatcacctgtctggagcaaggaaaagagccctggaatataaagagacatgagatggtagccaaacccccagttatatgttctcattttccccaagacctttgggcagagcaggacattaaagattcttttcaagaagcgattctgaaaaaatatggaaaatatggacatgacaatttacagttacaaaaaggctgtaaaagtgtggatgagtgtaaagtgcacaaagaacatgataacaaattaaaccagtgtttgataactacccagagcaacatatttcaatgtgatccatctgcaaaagtctttcatacattttcaaattcaaacagacataagataagacatactagaaagaaacctttcaaatgtaaaaaatgtgaaaaatcattttgcatgcttttacacctaactcaacataaaagatttcatattacagagaattcctaccaatgtaaagattgtggcaaagccttcaactggttctcaacccttactacacacaggagaattcatactggagagaaaccctacaaatgtgaagaatgtgggaaagcatttaaccggtcctcacaccttactacacataagataattcatactggagagaaaccatacagatgtgaagaatgtgggaaagcttttaaccggtcttcacaccttactacacataaaagaattcatactggagtgaaaccctacaaatgtacagaatgtggcaaagcttttaaccggtcctcacaccttactacacacaggataattcatactggagagaaaccctacaaatgtgaagaatgtggcaaagcctttaaccagtcctcaacccttactacacataagataactcatgctggagagaaaccttacaaatgtgaagaatgtggcaaagctttttaccgattctcataccttactaaacataagacaagtcatactggagagaaattctacaaatgtgaagaatgcggcaaaggctttaactggtcctcagccctcactaaacataagagaattcatactggagagaaaccctacaaatgtgaagaatgtggcaaagcttttaatgagtcctcaaaccttactacccataagatgattcatactggagagaaaccctacaaatgtgacgaatgtggcaaagcctttaaccggtcctcacaactaactgcacataagatgattcatactggagagaaaccctacaaatgtgaggaatgtggcaaagcttttaaccgatcctcaacccttactaaacataagataactcatactggagagaaatcttacaaatgggaagaatgtggtaaagactttaaccagtccctaagccttattaaacaaaataactcatactggagagaaaccctacaaatgtgaaaaatgtggcaaagccttttaccagtcctcaactcttactaaacataaaaaaattcatactggagggaactcctgtgactgtgaagaatatggcaaagcctttaataaattctcaattcctaacagacataagataattcatactagagagaaattctacaaaccagaaagatgtgacagtgctttgaaaacacctcaaacttttcaaaacataaatcatagtgttgagaaatcctagaaatgtgaagaatgtgataaagttttaaatggttgtcacacttgattgtaggtaaggtaagttatactggagaaaacttctacatgtgtgaacagtgtgacaaaacttttaactaatgctcacaccttcacaggaaagcatttatacttgagaaatattgtacaaatataaagactgtgaaaaagccattaatacatgctcacatcttactcaacatcagagagttcatactcaataaaaacataagtgcaactactgtcaaaatatctttaagaaaatataagcttttaaagtgaagagtattttgaagaagaacattgtagtagaattgtaatatgtttacttgtatcacagatcttactgtacacgttttgtattagaggaaacctctgaagcagttgctcaaactttgttcaatatcagggaatttatattgaaaaaaactgtgcgaatgtaataaagttggaaaaatactttttcaaaaactacagcttagaaaacaccagagagttcatactaaaacatatttttgcagatacaggaaaaattttttaaaaattttaatcattaagtctgtaaatatcagagaatttacagtagaaatatgtaaggcactgatgcttcaggtattttactaaatcagagtgctgagtatagaaaataatctaaaactaaaattggtaaaatatttgtatataactttaaaagtagaaattttttgcagttattgcattcaaagtatgcttaactttttgaaaaaattagattttttgaaaagtgagtaataatgtaattcaactcttaaattatttcctgccttttcttcactcctatttacatgtgaaagcatgtgatcaattgttgctgcatcagatatgagagattcttttttattaggtgagcattatttataaactttgctatgaaaaagacattaaaatatgagatgtatgatgaaaatctaagtgaagagacttttatggttaacttataatattaagcaatgtgtgcgttaggcattcagagtaatattctgcattatgagaaaacttaatttcatttataagtaaattaaaattagtatattttactaatacttttatataaaatgcagtatattttttaaatttcagattatatgtgatgttaatatattcaacctttttaacatgttaaatactattgtgcattcagtgaagtgttattatgccacagacattaacctattccaccttactcaagggtgtacgtaaaacatggtaacagtatactatttggtaacataatggattaacatctctagtaatctcttttgctagtggctttgactgcaaataagttaaagaatattatttctgtaggttaaatttttgtttttattttattttatttttgagaggtagtcttgctctgtcacccaggctggagtgcagtggcacgatctcggctcactgtaacctccacctcctgggttcacgcaattctcctgcctcagcctcctaagtagctgggattacaggcacccaccaccatgcccagctaatttttgtattttagtagagacagggtttcataatgtaagtcaagctggtctcgaactcctgaccttaaatgatttgcctgcctcggcttcccaaagttctgggattacaggcatgagccaccgtgcccagccaaatgtttattttatttaaatttatttttcttaattatttggggtacataatatgagtatatattcatgcaatatatggcatattttgatacaagaatacagtatataataatcacatcagggtaaatgaggtatccatcacctctagtatttatcctttgtattacaagcaacccagttttatacttttagttattttaaaatgtaaaattaaattgttattgattacagtgttatttttatggtcataataaaagttatgtagaagtataataaaatccctacatttctgaggcctgaataagtatttttaaagttttctaatatttattttttgagcatgtttcctgtctgcctgcaaacacatgcagacatttagttttgatttacatatagttaaatatatgttagtctaaagataaaccttaagtgtaagaaaattatagagtgagtttgtgtgtatgaatttgtacctgttttccgaagaaaaaagcaatactgaacaaaacaaatcattttaacaagatgactactagaaaactaaaagcctcaaaaatgctaaaagaaaatgtattctctgctttgtattgaatttattactgtacattctgtggcttatagttctgaatctccccatgaaaattctgtttatacttgcctggtactcatgatagacccctaattattttgtatcttttttcatataaatattttacagattatgaagtattcattatgtgagctggtctgtgattataagaataatttttacaaaatttagtgcatacaaaatttttaaatgtaattccacaattagtgtattaagttacattttatttagttagaacacttcattttgtttttagttggagaactctatagccctttagttatttttcttttcactttttatagttgacataagtaaatttatttattgagtcaatttgttcaggtaagtactagggaagctttataagtcgtgaggatgtttttatatttaaatgtagcaaacatacatgacagttcttgctgtgtaacagatgctccatagtaagccataagtattcctgctaaagttagcttgtaacttcagttcagagatggaaaacatcagtggtgaagaaataaaattgattcttcatgtggagaggacatagtttccaggctgcaatgctgaatcttgctgaatttaaagagaagttctgcatcttttatttcttaattatcttcagatttctctgtatttattatgtgtatccccagctatgtatgcagcacagcccatctcctttttctgtgttatggcttcagttttctcactgttgtcttaatgccatttcatttcacatggtactttgtaaattttgacgagaaagttggttgtttttttttttttttttttttttgagacagagtctcactcttgttgcccaagctggagtgcagtggtgcaatgtgggctcactgcaacctctgccttccaggttcaagcaattatcctgcctcagcctcccaagtagctgggattacaggcacctgccaccacatctggctgaatttttttttttttaattttttgtagagacgaagtttcaccatgttggccaggctggtttcaaactcctgacctcatatgatccacctgcctcagcctcccaaagtgcttggattacaggcataagccactgcacccagctgaaagttggtattttttaatgcactgaataattgtttttaactggagagtttggttatcaatataactttcggattagttaagataaaagcatacattgtccacaggtgagaagattaaatcagaatagttgttctttgttaaaaaaaaaattagattcttaaagtgtggcaaacataaaatttgcaagaaaatgtagaaattaaatttttaagagttaatggtaagtgaacaattttaaatttattttttattatgtaacatacttttattaaaatatatacttatataataaaagtataaca

SEQ ID NO: 34799 - DNA, 1830 bp, Homo sapiens
  source 1..1830: mol_type = unassigned DNA
aacttccaaagcccgaagcggtctcatttcccgccggccccccattcgggtccgggttttagttcctcggggagcccctggtgccccggatacggctgattttgtcgtgtgggacctgttctggctgctccagccccaggaaggacccaggacacccggaagccggaaatggactcagtggcctttgaggatgtggctgtgaacttcacccaggaggagtgggctttgctgagtccttcccagaagaatctctacagagatgtgacgctggaaaccttcaggaacctggcctcggtcggaatccaatggaaagaccaggacattgagaatctgtaccaaaacctggggattaagctaagaagtctggtggagagactctgtggacgtaaagaagggaatgaacacagagaaactttcagccagattcctgattgtcacctgaacaagaaaagtcaaactggagtgaaaccatgcaaatgcagcgtgtgtgggaaagtcttcctccgtcattcattcctggacaggcacatgagagctcatgctggacacaaacgatctgagtgtggtggggaatggagagagacgccccgtaaacagaaacaacatgggaaagcctccatttcccccagtagtggtgcacggcgcacagtaacaccaactcgaaagagaccttatgaatgcaaggtgtgcgggaaagcctttaattctcccaatttatttcaaatccatcaaagaactcacactggaaagaggtcctataaatgtagggaaatagtgagagccttcacagtttccagtttctttcgaaaacatggaaaaatgcatactggagaaaaacgctatgaatgtaaatactgtggaaaacctatcgattatcccagtttatttcaaattcatgttagaactcacactggagaaaaaccttacaaatgtaaacaatgtggtaaagccttcatttccgcaggttaccttcggacacatgaaatcagatctcacgcgctggagaaatcccaccaatgtcaggaatgtgggaaaaaactcagttgttccagttcccttcacagacatgaaagaactcatagtggaggaaaactctacgaatgtcaaaaatgtgccaaagtctttagatgtcccacgtcccttcaagcacatgaaagagctcacactggagaaagaccttatgaatgtaataaatgtggtaaaaccttcaattatcccagttgttttcgaagacataaaaaaactcatagtggagaaaagccatatgaatgtacaaggtgtggtaaagcctttgggtggtgcagttccctccgaagacatgaaatgactcacactggagaaaaaccctttgattgtaaacagtgtggtaaagtctttactttttcaaattaccttagacttcatgaaagaactcatttggccgggcgtagccagtgctttggcaggaggcagggggatcacctgagcccaggagtttgagaccagcctgggcaacataagaaggccccatatcggctgggtacggtggctcacgcttgtaatcccagcactttgggaggctgaggcgggtggatcacctgaggtcaggagttcaagactagcctggccaacatggtgaaaccccgtctctactaaaaatacaaaaaaattaactgggcatggtggtgggcacctgtaatctcagctactcgggaggccgaggcaggagaatcgcttgaacctgggaggtggaggttgcagtgagccgagatcgcgccgctgcactccagcctggtgacagagcgagacttcgtctcaaaacaaacaaaaaaaagaaggccccatatctcc

SEQ ID NO: 34800 - DNA, 1450 bp, Homo sapiens
  source 1..1450: mol_type = unassigned DNA
ttagttcctcggggagcccctggtgccccggatacggctgattttgtcgtgtgggacctgttctggctgctccagccccaggaaggacccaggacacccggaagccggaaatggactcagtggcctttgaggatgtggctgtgaacttcacccaggaggagtgggctttgctgagtccttcccagaagaatctctacagagatgtgacgctggaaaccttcaggaacctggcctcggtcggaatccaatggaaagaccaggacattgagaatctgtaccaaaacctggggattaagctaagaagtctggtggagagactctgtggacgtaaagaagggaatgaacacagagaaactttcagccagattcctgattgtcacctgaacaagaaaagtcaaactggagtgaaaccatgcaaatgcagcgtgtgtgggaaagtcttcctccgtcattcattcctggacaggcacatgagagctcatgctggacacaaacgatctgagtgtggtggggaatggagagagacgccccgtaaacagaaacaacatgggaaagcctccatttcccccagtagtggtgcacggcgcacagtaacaccaactcgaaagagaccttatgaatgcaaggtgtgcgggaaagcctttaattctcccaatttatttcaaatccatcaaagaactcacactggaaagaggtcctataaatgtagggaaatagtgagagccttcacagtttccagtttctttcgaaaacatggaaaaatgcatactggagaaaaacgctatgaatgtaaatactgtggaaaacctatcgattatcccagtttatttcaaattcatgttagaactcacactggagaaaaaccttacaaatgtaaacaatgtggtaaagccttcatttccgcaggttaccttcggacacatgaaatcagatctcacgcgctggagaaatcccaccaatgtcaggaatgtgggaaaaaactcagttgttccagttcccttcacagacatgaaagaactcatagtggaggaaaactctacgaatgtcaaaaatgtgccaaagtctttagatgtcccacgtcccttcaagcacatgaaagagctcacactggagaaagaccttatgaatgtaataaatgtggtaaaaccttcaattatcccagttgttttcgaagacataaaaaaactcatagtggagaaaagccatatgaatgtacaaggtgtggtaaagcctttgggtggtgcagttccctccgaagacatgaaatgactcacactggagaaaaaccctttgattgtaaacagtgtggtaaagtctttactttttcaaattaccttagacttcatgaaagaactcatttggccgggcgtagccagtgctttggcaggaggcagggggatcacctgagcccaggagtttgagaccagcctgggcaacataagaaggcccc

SEQ ID NO: 34801 - DNA, 1552 bp, Homo sapiens
  source 1..1552: mol_type = unassigned DNA
cgtgtgggacctgttctggctgctccagccccaggaaggacccaggacacccggaagccggaaatgacaaagtcttgccctgttgcccaggctggagtgcaatggtacaatcttggctcactacaacctccgctaaagtgattctcctgcctcagccctcccccacgcccggtagctgaacccggtagctgaatcctgagtagctgggattacaggactcagtggcctttgaggatgtggctgtgaacttcacccaggaggagtgggctttgctgagtccttcccagaagaatctctacagagatgtgacgctggaaaccttcaggaacctggcctcggtcggaatccaatggaaagaccaggacattgagaatctgtaccaaaacctggggattaagctaagaagtctggtggagagactctgtggacgtaaagaagggaatgaacacagagaaactttcagccagattcctgattgtcacctgaacaagaaaagtcaaactggagtgaaaccatgcaaatgcagcgtgtgtgggaaagtcttcctccgtcattcattcctggacaggcacatgagagctcatgctggacacaaacgatctgagtgtggtggggaatggagagagacgccccgtaaacagaaacaacatgggaaagcctccatttcccccagtagtggtgcacggcgcacagtaacaccaactcgaaagagaccttatgaatgcaaggtgtgcgggaaagcctttaattctcccaatttatttcaaatccatcaaagaactcacactggaaagaggtcctataaatgtagggaaatagtgagagccttcacagtttccagtttctttcgaaaacatggaaaaatgcatactggagaaaaacgctatgaatgtaaatactgtggaaaacctatcgattatcccagtttatttcaaattcatgttagaactcacactggagaaaaaccttacaaatgtaaacaatgtggtaaagccttcatttccgcaggttaccttcggacacatgaaatcagatctcacgcgctggagaaatcccaccaatgtcaggaatgtgggaaaaaactcagttgttccagttcccttcacagacatgaaagaactcatagtggaggaaaactctacgaatgtcaaaaatgtgccaaagtctttagatgtcccacgtcccttcaagcacatgaaagagctcacactggagaaagaccttatgaatgtaataaatgtggtaaaaccttcaattatcccagttgttttcgaagacataaaaaaactcatagtggagaaaagccatatgaatgtacaaggtgtggtaaagcctttgggtggtgcagttccctccgaagacatgaaatgactcacactggagaaaaaccctttgattgtaaacagtgtggtaaagtctttactttttcaaattaccttagacttcatgaaagaactcatttggccgggcgtagccagtgctttggcaggaggcagggggatcacctgagcccaggagtttgagaccagcctgggcaacataagaaggcccc

SEQ ID NO: 34802 - DNA, 4627 bp, Homo sapiens
  source 1..4627: mol_type = unassigned DNA
ttagttcctcggggagcccctggtgccccggatacggctgattttgtcgtgtgggacctgttctggctgctccagccccaggaaggacccaggacacccggaagccggaaatggactcagtggcctttgaggatgtggctgtgaacttcacccaggaggagtgggctttgctgagtccttcccagaagaatctctacagagatgtgacgctggaaaccttcaggaacctggcctcggtcggaatccaatggaaagaccaggacattgagaatctgtaccaaaacctggggattaagctaagaagtctggtggagagactctgtggacgtaaagaagggaatgaacacagagaaactttcagccagattcctgattgtcacctgaacaagaaaagtcaaactggagtgaaaccatgcaaatgcagcgtgtgtgggaaagtcttcctccgtcattcattcctggacaggcacatgagagctcatgctggacacaaacgatctgagtgtggtggggaatggagagagacgccccgtaaacagaaacaacatgggaaagcctccatttcccccagtagtggtgcacggcgcacagtaacaccaactcgaaagagaccttatgaatgcaaggtgtgcgggaaagcctttaattctcccaatttatttcaaatccatcaaagaactcacactggaaagaggtcctataaatgtagggaaatagtgagagccttcacagtttccagtttctttcgaaaacatggaaaaatgcatactggagaaaaacgctatgaatgtaaatactgtggaaaacctatcgattatcccagtttatttcaaattcatgttagaactcacactggagaaaaaccttacaaatgtaaacaatgtggtaaagccttcatttccgcaggttaccttcggacacatgaaatcagatctcacgcgctggagaaatcccaccaatgtcaggaatgtgggaaaaaactcagttgttccagttcccttcacagacatgaaagaactcatagtggaggaaaactctacgaatgtcaaaaatgtgccaaagtctttagatgtcccacgtcccttcaagcacatgaaagagctcacactggagaaagaccttatgaatgtaataaatgtggtaaaaccttcaattatcccagttgttttcgaagacataaaaaaactcatagtggagaaaagccatatgaatgtacaaggtgtggtaaagcctttgggtggtgcagttccctccgaagacatgaaatgactcacactggagaaaaaccctttgattgtaaacagtgtggtaaagtctttactttttcaaattaccttagacttcatgaaagaactcatttggccgggcgtagccagtgctttggcaggaggcagggggatcacctgagcccaggagtttgagaccagcctgggcaacataagaaggccccatatcggctgggtacggtggctcacgcttgtaatcccagcactttgggaggctgaggcgggtggatcacctgaggtcaggagttcaagactagcctggccaacatggtgaaaccccgtctctactaaaaatacaaaaaaattaactgggcatggtggtgggcacctgtaatctcagctactcgggaggccgaggcaggagaatcgcttgaacctgggaggtggaggttgcagtgagccgagatcacgccattgcactccagcctgggcgacaaaagtgagactccatcacacacacacacaaaaaagccccatatcacgtggtggctcatgcctgtaaaaccagcactttgggaagccgaggtgggtggatcacgaggtccagagatggagactatcttggccaacatggtgaaaccccgtctctactaaaaatacaaaaattagccaggcgtggtggtgtgtgcctgtagtcccagctactcgggaggctgaggcaggagaattgcttgaaccagggacttggaggttgcagtgagccgagatcgcgccgctgcactccagcctggtgacagagcgagacttcgtctcaaaacaaacaaaaaaaagaaggccccatatctccaaagaaaaaaaaaattaactgggtgaggtggtgcatccctgtagttctagctgctcagaaagctgaggtgggaggaacccttgagcctgggaggttgaggctgcagtgagctgagatcgtgccactacactccagcctggatgacggtgacactctgtctcagaaaaaaagggaaagaaataattctcatttatacaggagagaaatcctatgaatgtaaggaatatgggaatacattcagtttccaaagatatgaaaagactaactggaaaaaaatccaaagacctcagatattccagttctattcagagccataaaaggactcatactggagaaaaattgtagaaatgtacagaatatggggaaactctcattgctctcatctccattcaaagacacgtgtcagtgcacactggagatggatggtatgaatcgaagaatacacactggatggaaacgttagtagtttggaaaatacaggaaacttccattttaacaataattaaaattcacatgggctgtgcacagtggctctcccctgtaatcccagcattttgggaggctggggtgggtagattgcttgaggccaggtattcaagaccagcctggcaacctggagaaatcccatgtatacaaaaaatagaaaagttagccagggatgatggtgttcgcctgtagtcccagctactcaggaagctgaggtgggaggattgcttgagtttgggaggtcgaggttgcagtgagtggagattgcgccactggactccagcctgggcaacagtgagaccctgtctaaaaaaattaatcatgtgagaacatccactcgaaagaaatcctataaacgtaagtaattttgaaagcctgatgcaaattaattattatataatgctcaaaaacttaatcatgaatgagttattacacaaagttataaatatatagcatttatcagtggctcattcttttttctttcttttttttttttttttttgagatggagttttgccctgtcgcccaggctggagtgcagtggcacaatctcggctcactgcaacctccgcctcctgggtgtgagcaattttcctgcctcagcctcctgagtaactgggattataagcacatgccaccacgcctggctaatttttttgtatttttagtagagacggggcttcaccatgtggttcaggctggtctcagactcctgaccttgtgatccgccctccttggcctcccaaagtgctgagattacaggtgtgagccaccgcgcctggccttttttttttttcccgagacacagtctcactctgttgcccaggctagagtgcagtggcgcgatcttgactcactgtaacctctgacttctgggttcaagcaattctcctgcttcagtctccgaagcatctgggattacaggcgcacgccaccatgcccagctaaatttttggtatttttgtagaaacagggtttttccacattggccaggctggtcttgaactcctgacctcaaggaatccatcctcttcagcctcgcaaagtgctgagattataggcatgagacaccttgcccggcccctgtgactcattcttaaaaaggatctttggattatgggtttccacttttgcaaggaaatgtgagaatgatactctttaagcagtggtacctgaggtttaataggaagtgtttttatcctaagttagttaataaaatttttttctatccattttggttttcatttttttctatccattttaaagtgttggatctgtgggtgaagtgaaatttatttctaatatgtaagcaggtttaatttttatgtagtgtttaattgttctgtgatgaatgggccattacaaaatgagtctatttttgtttgttttcttttgtttttgagactgagtcttgctctgtcgccaggctgaagtgtagtggcgcgatcttggctcactgcaacctccacctcccgggttcaagtaatccccctgccttagcctcctacaggcgcgtgccgacatgcctggctaattttttgtattttagtagagacggggtttcattgtactggccaggatggtcttgatttcctgaccttgtgatccaccccaccttggcctcccaaagtgctgagattacaggagtgagccactgcgaccggcccatgagtctttattaatagagatttcttactggtgttatgtggcagattctgcatattcctcacccatcatatgtattccactttcctttattatggggaaaactactctttttggcatgatacaatgttgactccattttctttgctaataaggacttggtatcaatttatcagtatgtaaagtttaccatagagtattgtctcatgtgaatcattcccattttttgctctttactctttgtcgttatttctgagtattatttggatggttcattttgacttaaggatagccctgtgatatgacaatatttttatctaatctgatggagaaagcatttagtctcctgatcaagtatgatgttagctgcaggtttttaataaatgccttaattcagtttgaa

SEQ ID NO: 34803 - DNA, 5174 bp, Homo sapiens
  source 1..5174: mol_type = unassigned DNA
tagaggcccagcctctgtgtccctgtgacctgcagatattgggagatccacagctaagacgccgggactccctggaaacctagaaatgactgtgccataacacacatttgatgctgaaatccgggataggggaactcctttgggagtcgtgtcccttaaccccttcccccgacttcttgaagagacccacccgcgacctcggtacctcggaccagctctgtaaaagccccgcctctgccttcggataggaaccactgacatttaaagatgtcgccatagaattctctctggaggagtggcaatgcctggatactgcacagcgggatttatataggaatgtgttgttagagaactacagaaacctggtctttttgggtattgctgtctctaagccatatctgatcacctgtctggagcaaaaaaaagagccctggaatataaaaagacatgagatggtagccaaacccccagtaatgtcttttcattttgcccaagacctttggccagagcagaacataaaagattctttccagaaagtgacactgagaagatacggaaaatgtgaatatgagaatttacagttaagaaaaggctgtaaacatgtggatgagtgtacggggcacaaaggaggtcataatacagttaaccaatgtttgacagctaccccaagcaaaatattccagtgtaataaatatgtgaaagtctttgataaattttcaaattcaaatagatataagagaagacatacaggaaacaaacacttcaaatgtaaagaatgtagcaaatcattttgcgtgctttcacaactaactcagcatagaagaattcatactagagtgaattcctacaaatgtgaagaatgtggaaaagcctttaactggttctcaactcttactaaacataagagaattcatactggagaaaagccctacaaatgtgaagaatgtggcaaagcctttaaccagtcctcacaacttactaggcataagataattcatactgaagagaaacccaacaaatgtgaagaatgtggcaaggcctttaaacaggcctcacaccttactatacataaaataattcatactggagaaaaaccttacaaatatgaagaatgtggcaaagtctttagccagtcctcacaccttactacacaaaagatacttcacactggagagaacctctacaagtgtaaagaatgtggaaaagcttttaacctattctcaaatcttactaaccataagagaattcatgctggggagaaaccctacaaatgtaaagaatgtggcagagcttttaacatatcctcaaaccttaataaacaggagaaaattcatactggagggaaactcaacaaatgtgaagaatgtgacaaagcttttaaccgatccttaaaacttactgcacataagaaaattctaatggaagagaaaccctacaaatgtgaagaatgtggcaaagtctttaaccagttctcaactcttactagacataagataattcatactggagagaaaccctacaaatgtaaagaatgtggcaaagcttttaaccaatcttcaaaccttactgaacataagaaaattcatactgcagagaaatcctataaatgtgaagaatgtggcaaagcttttaaccaacactcaaacctaattaaccataggaaaatttattctggagagaaaccatacaaatgtgaagaatgtggaaaagcttttaatcgatcctcaacccttactagacataagaaaattcatactggagagaaaccctacaaatgtgaagaatgtgacagagcttttagccagtcttcaaaccttactgaacataagaaaattcatactggagagaaaccctataaatgtgaggaatgtggcaaagcttttaaccgattctcaacccttactaaacataagagaattcatactggagaaaaaccctataaatgtgaagaatgtggaaaagcctttaatcaatcctatcaacttactagacataagatagttcatactaaagagaaactcaacaaatgtgaagaatttggcaaggcctttaaacagtcctcacaccgtactatacataaaattattcatactggagagaaaccctacaaatgtgaagaacatggcaaagtttttaaccagtcctcaaaccttactacacaaaagataattcatactggagagaacctctacaaatttgaagaacatggaaaagcttttaacctattctcaaacattactaaccataagataatttatactggagagaaaccccacaaatgtgaagaatgtggaaaagcttataaccgattctcaaacctaactatacataagagaattcatacgggagagaaaccttaccaatgtgcagaatgtggcaaagcctttaactgctcctcaacccttaatagacataagataattcatactggagagaaaccttacaaatgtaaagaatgtggcaaagcttttaacctatcctcaacccttactgcacataagaaaattcatactggagagaaaccctataaatgtgaagaatgtggcaaagcttttaaccaatcctcaaaccttactacacataagaaaattcatacttcagagaaaccctacaaatgtgaagaatgtggcaaatcctttaaccagttctcatctcttaatatacataagataattcatactggagagaaaccctacaaatgtggagattatggcagagctttcaacctatcctcaaatcttactacacataagaaaattcatactggagagaaaccctacaaatgtgagtatggcaaaacttaattgatcctacaagcttactacacataggaaaattcatactggagagaaactacaaatgtgaagaatgtgttaaagcctttaacaagtcttcaactttttctgcacacacgaggtattttatactggtgagaaaccttacaatgtaaagaatgtggcacagcttttaactaatcttcaaaccttactgaaagttgagaaaattcgtactggagagaatcctacaaatgtgaaaaatgtggcaaatcctttaactgatcctcaacttttactaaacataaggtaattcatactggagaaaagccatacaaatgagaagaatgtggcaatgcctttaatcagtcctcacacctttctacacataagataatttatactggagaggaactctatagttgtgaagaatgtggcaaagcttttaaccaatcctcataccttactatacagaaattcatactggagagaaagcctacaattgtgaagaatgtggcaaagcttttaaccttccttaacccttaactgtagataagaaaattcatactggaaagaaaccctacaaatgtgaagtctgtggcaaagcttttaactgattctcaactcttactacatgtaagagtatttatactggaaagaaaccctacaaatgtaaaaaacgtggcaatgcctttaactggtcctcacaccttgctacatataagacagtttatactttgagagaaaccctgcaaatgtgaataatgtggcaatactttaaaccaatcctcaaacctcactaaacataagataatactgaaaactttacaaacctgaatgatgtgacaataattttgacaacacctcgaactttctaacataaatcatactggtgaaaaatcctagaaatgtgaaaaatatcacaaagcctttaaatggttgtcacacttgattgtaggtaagaatccatactgaagaaaactcctggaagtgtaaaaaatgtggcaacacttttaataaatgctcaccccttattgcacaggaaagcatttatacttcagaaagattgtacaaatacaaggaatgtggaaaagccattattatctgctcagattttactcaacattagagagttagtacgtaataaaagcattataaatgcaatttttgtcaagagatctttcagaaaatataagcctttaaagtgaagaagaggagccagttgtgctggctcacatctgtaatgccagcactttgggaggccaaggtgggtggatcacctgagggcaggagtctgagaccagcctggccaacatagcaaaaccccatctctattaaaaattttacaaaaattagctgcgtgtggtggcaggcccctgtaatcccagctaattgggaggctgaagcaggagaattgctcaaacctgggaggcgaagattgcagtgagctgaaatcacaccactacactccagccaaagcaacaagagcaaaaacttcgtctcaaaaacaaaacaaaaaaagagtattcattgtgaggacaaacaatacaaatacgaagagggttgtagtacctttacttgtatcacagatacttttgtacccattttgcactagaggaaaaccatgaagcagttgctcaaatgttgttcaacaccagaaaatttatattggagaaaagcactgtaaatgtaatgcatttgtgaaaacattttttaaaaaactacagcttagaaaataccagaggcctcatactaaaatatatttttgcaagtgaagtaaatataaaaataatttaatccaaaattaagtctatataaatatcagagaattcacagtagaaatatctaaggtactgacacttcagacattgctgagtatagaatcagaatgctgagtatagaaaataatttaaaactaaagttggtaggtaaataatgtgtatataactttaaaagaagtagaatttttttgtagatgtataattacattcaaattatattttttcttgaaaaattagtttttgaaaagcaaatgatgtaattcaactcaaattcatgctcttcattcctattgtattcacatgtgaaagcatgtgattaatttttcatgcatcaaagatatgagaaatcatttctgttaggtcggtattatttatgacactttctatgaaagaataaggacattaaaatgtaagatgcatgatgaaaacctgagtgaagaggctgtttgtgtttaacttataatattgagtgatccatgaagtaggttttcagagcaatattcttctgcattatagtaagagaaaaccatttttaatcttagttaaaattaaagtgaattagtagtatatcattttactatttgtacttttatgtaataaaatgcaatgtgtttaaaaa

SEQ ID NO: 34804 - DNA, 1061 bp, Homo sapiens
  source 1..1061: mol_type = unassigned DNA
gcctttgtctctggctgcagccggagctcctgctctcctcctcactgctcagtgtcctctgctcctagaggcccagcctctgtgtccctgtgacctgcagatattgggagatccacagctaagacgccgggactccctggaaacctagaaatgatggagtctcgctctgttgctcaggctgaagggcagtggtgcgatctcggctcactgaaacctccgccttccgggctcaagcaattctcctgcctcaacctcgcaagtagctgggattacaggcatgcaccaccatgcccagactgtgccataacacacatttgatgctgaaatccgggataggggaactcctttgggagtcgtgtcccttaaccccttcccccgacttcttgaagagacccacccgcgacctcggtacctcggaccagctctgtaaaagccccgcctctgccttcggataggtctggccccaccctggagtcttgcctcacagaactgattagaagagatcagagttttggctggtgcctttccggagtggttgctaacaattcccgaattccacaaggagataaatgggaaaaaaaggaaccactgacatttaaagatgtcgccatagaattctctctggaggagtggcaatgcctggatactgcacagcgggatttatataggaatgtgttgttagagaactacagaaacctggtctttttgggtattgctgtctctaagccatatctgatcacctgtctggagcaaaaaaaagagccctggaatataaaaagacatgagatggtagccaaacccccagtaatgtcttttcattttgcccaagacctttggccagagcagaacataaaagattctttccagaaagtgacactgagaagatacggaaaatgtgaatatgagaatttacagttaagaaaaggctgtaaacatgtggatgagtgtacggggcacaaaggaggtcataatacagttaaccaatgtttgacagctaccccaagcaaaatattccagtgtaataaatatgtgaaagtctttgataaattttcaaattcaaa

SEQ ID NO: 34805 - DNA, 6094 bp, Homo sapiens
  source 1..6094: mol_type = unassigned DNA
catcttaaagcttccctttgagagtgttgctcttagaacttttcagatcttgttcagtgacctgctacagttatgtgagaggatccaggtgtaaatagaatctgatgacagattctgtaagcgtaaacaagcatcttaggggtgagagatgaaggccacaaagtatcgagagtcatgatcacaattatacctacccgtaaaatgtaatactggactagagtattttttctttccttttgcccaagagctagctaattaggacccgtaatctggagctccactgtggcagttccactttctatttagaatcagcctgagtctctcctgcctgccttatccttggccatcagcccagggtcactgggaactctctcacaatcacctaggcatctttgagatatttgaggatgtccagagcagaattgtgtcaggttgacaagagtggttaattctgcctctgtctcagtgtaagagaaatgagacatcctgtgtttgctcctcccctcatacaagagatgtctttggttggtatccagttgagagtttcccagtttcctgatagttggatgaaaaacaaggaggaggtctggagactcaagcagataaactaattgctaccatttcatatggcccttagaaaaatagataaagcagtcatggtccctaccatctaggaactgttagtctagactagcaactgaatacgtggttgaattaagcatcatatggttggcaaagtgaatagatgtgtgggaaaacgtgtgggctttatttgggccactttctttatatcgttgtgacttctgaggtcatcatttgaatgaatgtttatgaccacaagagttttaaatatttttatttcttttactttgctaagaatacatatttatcttataataaaattaccctagaaaaccccaggagatttgtttaaatggctaattagtatatttacacagttgatgggttgagcagagtaatatatagggtttactcccagctgcagttctgttcagattcaccctttttggaggctttatttaggtctggccccaccctggagtcttgcctcacagaactgattagaagagatcagagttttggctggtgcctttccggagtggttgctaacaattcccgaattccacaaggagataaatgggaaaaaaaggaaccactgacatttaaagatgtcgccatagaattctctctggaggagtggcaatgcctggatactgcacagcgggatttatataggaatgtgttgttagagaactacagaaacctggtctttttgggtattgctgtctctaagccatatctgatcacctgtctggagcaaaaaaaagagccctggaatataaaaagacatgagatggtagccaaacccccagtaatgtcttttcattttgcccaagacctttggccagagcagaacataaaagattctttccagaaagtgacactgagaagatacggaaaatgtgaatatgagaatttacagttaagaaaaggctgtaaacatgtggatgagtgtacggggcacaaaggaggtcataatacagttaaccaatgtttgacagctaccccaagcaaaatattccagtgtaataaatatgtgaaagtctttgataaattttcaaattcaaatagatataagagaagacatacaggaaacaaacacttcaaatgtaaagaatgtagcaaatcattttgcgtgctttcacaactaactcagcatagaagaattcatactagagtgaattcctacaaatgtgaagaatgtggaaaagcctttaactggttctcaactcttactaaacataagagaattcatactggagaaaagccctacaaatgtgaagaatgtggcaaagcctttaaccagtcctcacaacttactaggcataagataattcatactgaagagaaacccaacaaatgtgaagaatgtggcaaggcctttaaacaggcctcacaccttactatacataaaataattcatactggagaaaaaccttacaaatatgaagaatgtggcaaagtctttagccagtcctcacaccttactacacaaaagatacttcacactggagagaacctctacaagtgtaaagaatgtggaaaagcttttaacctattctcaaatcttactaaccataagagaattcatgctggggagaaaccctacaaatgtaaagaatgtggcagagcttttaacatatcctcaaaccttaataaacaggagaaaattcatactggagggaaactcaacaaatgtgaagaatgtgacaaagcttttaaccgatccttaaaacttactgcacataagaaaattctaatggaagagaaaccctacaaatgtgaagaatgtggcaaagtctttaaccagttctcaactcttactagacataagataattcatactggagagaaaccctacaaatgtaaagaatgtggcaaagcttttaaccaatcttcaaaccttactgaacataagaaaattcatactgcagagaaatcctataaatgtgaagaatgtggcaaagcttttaaccaacactcaaacctaattaaccataggaaaatttattctggagagaaaccatacaaatgtgaagaatgtggaaaagcttttaatcgatcctcaacccttactagacataagaaaattcatactggagagaaaccctacaaatgtgaagaatgtgacagagcttttagccagtcttcaaaccttactgaacataagaaaattcatactggagagaaaccctataaatgtgaggaatgtggcaaagcttttaaccgattctcaacccttactaaacataagagaattcatactggagaaaaaccctataaatgtgaagaatgtggaaaagcctttaatcaatcctatcaacttactagacataagatagttcatactaaagagaaactcaacaaatgtgaagaatttggcaaggcctttaaacagtcctcacaccgtactatacataaaattattcatactggagagaaaccctacaaatgtgaagaacatggcaaagtttttaaccagtcctcaaaccttactacacaaaagataattcatactggagagaacctctacaaatttgaagaacatggaaaagcttttaacctattctcaaacattactaaccataagataatttatactggagagaaaccccacaaatgtgaagaatgtggaaaagcttataaccgattctcaaacctaactatacataagagaattcatacgggagagaaaccttaccaatgtgcagaatgtggcaaagcctttaactgctcctcaacccttaatagacataagataattcatactggagagaaaccttacaaatgtaaagaatgtggcaaagcttttaacctatcctcaacccttactgcacataagaaaattcatactggagagaaaccctataaatgtgaagaatgtggcaaagcttttaaccaatcctcaaaccttactacacataagaaaattcatacttcagagaaaccctacaaatgtgaagaatgtggcaaatcctttaaccagttctcatctcttaatatacataagataattcatactggagagaaaccctacaaatgtggagattatggcagagctttcaacctatcctcaaatcttactacacataagaaaattcatactggagagaaaccctacaaatgtgagtatggcaaaacttaattgatcctacaagcttactacacataggaaaattcatactggagagaaactacaaatgtgaagaatgtgttaaagcctttaacaagtcttcaactttttctgcacacacgaggtattttatactggtgagaaaccttacaatgtaaagaatgtggcacagcttttaactaatcttcaaaccttactgaaagttgagaaaattcgtactggagagaatcctacaaatgtgaaaaatgtggcaaatcctttaactgatcctcaacttttactaaacataaggtaattcatactggagaaaagccatacaaatgagaagaatgtggcaatgcctttaatcagtcctcacacctttctacacataagataatttatactggagaggaactctatagttgtgaagaatgtggcaaagcttttaaccaatcctcataccttactatacagaaattcatactggagagaaagcctacaattgtgaagaatgtggcaaagcttttaaccttccttaacccttaactgtagataagaaaattcatactggaaagaaaccctacaaatgtgaagtctgtggcaaagcttttaactgattctcaactcttactacatgtaagagtatttatactggaaagaaaccctacaaatgtaaaaaacgtggcaatgcctttaactggtcctcacaccttgctacatataagacagtttatactttgagagaaaccctgcaaatgtgaataatgtggcaatactttaaaccaatcctcaaacctcactaaacataagataatactgaaaactttacaaacctgaatgatgtgacaataattttgacaacacctcgaactttctaacataaatcatactggtgaaaaatcctagaaatgtgaaaaatatcacaaagcctttaaatggttgtcacacttgattgtaggtaagaatccatactgaagaaaactcctggaagtgtaaaaaatgtggcaacacttttaataaatgctcaccccttattgcacaggaaagcatttatacttcagaaagattgtacaaatacaaggaatgtggaaaagccattattatctgctcagattttactcaacattagagagttagtacgtaataaaagcattataaatgcaatttttgtcaagagatctttcagaaaatataagcctttaaagtgaagaagaggagccagttgtgctggctcacatctgtaatgccagcactttgggaggccaaggtgggtggatcacctgagggcaggagtctgagaccagcctggccaacatagcaaaaccccatctctattaaaaattttacaaaaattagctgcgtgtggtggcaggcccctgtaatcccagctaattgggaggctgaagcaggagaattgctcaaacctgggaggcgaagattgcagtgagctgaaatcacaccactacactccagccaaagcaacaagagcaaaaacttcgtctcaaaaacaaaacaaaaaaagagtattcattgtgaggacaaacaatacaaatacgaagagggttgtagtacctttacttgtatcacagatacttttgtacccattttgcactagaggaaaaccatgaagcagttgctcaaatgttgttcaacaccagaaaatttatattggagaaaagcactgtaaatgtaatgcatttgtgaaaacattttttaaaaaactacagcttagaaaataccagaggcctcatactaaaatatatttttgcaagtgaagtaaatataaaaataatttaatccaaaattaagtctatataaatatcagagaattcacagtagaaatatctaaggtactgacacttcagacattgctgagtatagaatcagaatgctgagtatagaaaataatttaaaactaaagttggtaggtaaataatgtgtatataactttaaaagaagtagaatttttttgtagatgtataattacattcaaattatattttttcttgaaaaattagtttttgaaaagcaaatgatgtaattcaactcaaattcatgctcttcattcctattgtattcacatgtgaaagcatgtgattaatttttcatgcatcaaagatatgagaaatcatttctgttaggtcggtattatttatgacactttctatgaaagaataaggacattaaaatgtaagatgcatgatgaaaacctgagtgaagaggctgtttgtgtttaacttataatattgagtgatccatgaagtaggttttcagagcaatattcttctgcattatagtaagagaaaaccatttttaatcttagttaaaattaaagtgaattagtagtatatcattttactatttgtacttttatgtaataaaatgcaatgtgtttaa

SEQ ID NO: 34806 - DNA, 5212 bp, Homo sapiens
  source 1..5212: mol_type = unassigned DNA
ccagactgtgccataacacacatttgatgctgaaatccgggataggggaactcctttgggagtcgtgtcccttaaccccttcccccgacttcttgaagagacccacccgcgacctcggtacctcggaccagctctgtaaaagccccgcctctgccttcggataggtctggccccaccctggagtcttgcctcacagaactgattagaagagatcagagttttggctggtgcctttccggagtggttgctaacaattcccgaattccacaaggagataaatgggaaaaaaaggaaccactgacatttaaagatgtcgccatagaattctctctggaggagtggcaatgcctggatactgcacagcgggatttatataggaatgtgttgttagagaactacagaaacctggtctttttgggtattgctgtctctaagccatatctgatcacctgtctggagcaaaaaaaagagccctggaatataaaaagacatgagatggtagccaaacccccagtaatgtcttttcattttgcccaagacctttggccagagcagaacataaaagattctttccagaaagtgacactgagaagatacggaaaatgtgaatatgagaatttacagttaagaaaaggctgtaaacatgtggatgagtgtacggggcacaaaggaggtcataatacagttaaccaatgtttgacagctaccccaagcaaaatattccagtgtaataaatatgtgaaagtctttgataaattttcaaattcaaatagatataagagaagacatacaggaaacaaacacttcaaatgtaaagaatgtagcaaatcattttgcgtgctttcacaactaactcagcatagaagaattcatactagagtgaattcctacaaatgtgaagaatgtggaaaagcctttaactggttctcaactcttactaaacataagagaattcatactggagaaaagccctacaaatgtgaagaatgtggcaaagcctttaaccagtcctcacaacttactaggcataagataattcatactgaagagaaacccaacaaatgtgaagaatgtggcaaggcctttaaacaggcctcacaccttactatacataaaataattcatactggagaaaaaccttacaaatatgaagaatgtggcaaagtctttagccagtcctcacaccttactacacaaaagatacttcacactggagagaacctctacaagtgtaaagaatgtggaaaagcttttaacctattctcaaatcttactaaccataagagaattcatgctggggagaaaccctacaaatgtaaagaatgtggcagagcttttaacatatcctcaaaccttaataaacaggagaaaattcatactggagggaaactcaacaaatgtgaagaatgtgacaaagcttttaaccgatccttaaaacttactgcacataagaaaattctaatggaagagaaaccctacaaatgtgaagaatgtggcaaagtctttaaccagttctcaactcttactagacataagataattcatactggagagaaaccctacaaatgtaaagaatgtggcaaagcttttaaccaatcttcaaaccttactgaacataagaaaattcatactgcagagaaatcctataaatgtgaagaatgtggcaaagcttttaaccaacactcaaacctaattaaccataggaaaatttattctggagagaaaccatacaaatgtgaagaatgtggaaaagcttttaatcgatcctcaacccttactagacataagaaaattcatactggagagaaaccctacaaatgtgaagaatgtgacagagcttttagccagtcttcaaaccttactgaacataagaaaattcatactggagagaaaccctataaatgtgaggaatgtggcaaagcttttaaccgattctcaacccttactaaacataagagaattcatactggagaaaaaccctataaatgtgaagaatgtggaaaagcctttaatcaatcctatcaacttactagacataagatagttcatactaaagagaaactcaacaaatgtgaagaatttggcaaggcctttaaacagtcctcacaccgtactatacataaaattattcatactggagagaaaccctacaaatgtgaagaacatggcaaagtttttaaccagtcctcaaaccttactacacaaaagataattcatactggagagaacctctacaaatttgaagaacatggaaaagcttttaacctattctcaaacattactaaccataagataatttatactggagagaaaccccacaaatgtgaagaatgtggaaaagcttataaccgattctcaaacctaactatacataagagaattcatacgggagagaaaccttaccaatgtgcagaatgtggcaaagcctttaactgctcctcaacccttaatagacataagataattcatactggagagaaaccttacaaatgtaaagaatgtggcaaagcttttaacctatcctcaacccttactgcacataagaaaattcatactggagagaaaccctataaatgtgaagaatgtggcaaagcttttaaccaatcctcaaaccttactacacataagaaaattcatacttcagagaaaccctacaaatgtgaagaatgtggcaaatcctttaaccagttctcatctcttaatatacataagataattcatactggagagaaaccctacaaatgtggagattatggcagagctttcaacctatcctcaaatcttactacacataagaaaattcatactggagagaaaccctacaaatgtgagtatggcaaaacttaattgatcctacaagcttactacacataggaaaattcatactggagagaaactacaaatgtgaagaatgtgttaaagcctttaacaagtcttcaactttttctgcacacacgaggtattttatactggtgagaaaccttacaatgtaaagaatgtggcacagcttttaactaatcttcaaaccttactgaaagttgagaaaattcgtactggagagaatcctacaaatgtgaaaaatgtggcaaatcctttaactgatcctcaacttttactaaacataaggtaattcatactggagaaaagccatacaaatgagaagaatgtggcaatgcctttaatcagtcctcacacctttctacacataagataatttatactggagaggaactctatagttgtgaagaatgtggcaaagcttttaaccaatcctcataccttactatacagaaattcatactggagagaaagcctacaattgtgaagaatgtggcaaagcttttaaccttccttaacccttaactgtagataagaaaattcatactggaaagaaaccctacaaatgtgaagtctgtggcaaagcttttaactgattctcaactcttactacatgtaagagtatttatactggaaagaaaccctacaaatgtaaaaaacgtggcaatgcctttaactggtcctcacaccttgctacatataagacagtttatactttgagagaaaccctgcaaatgtgaataatgtggcaatactttaaaccaatcctcaaacctcactaaacataagataatactgaaaactttacaaacctgaatgatgtgacaataattttgacaacacctcgaactttctaacataaatcatactggtgaaaaatcctagaaatgtgaaaaatatcacaaagcctttaaatggttgtcacacttgattgtaggtaagaatccatactgaagaaaactcctggaagtgtaaaaaatgtggcaacacttttaataaatgctcaccccttattgcacaggaaagcatttatacttcagaaagattgtacaaatacaaggaatgtggaaaagccattattatctgctcagattttactcaacattagagagttagtacgtaataaaagcattataaatgcaatttttgtcaagagatctttcagaaaatataagcctttaaagtgaagaagaggagccagttgtgctggctcacatctgtaatgccagcactttgggaggccaaggtgggtggatcacctgagggcaggagtctgagaccagcctggccaacatagcaaaaccccatctctattaaaaattttacaaaaattagctgcgtgtggtggcaggcccctgtaatcccagctaattgggaggctgaagcaggagaattgctcaaacctgggaggcgaagattgcagtgagctgaaatcacaccactacactccagccaaagcaacaagagcaaaaacttcgtctcaaaaacaaaacaaaaaaagagtattcattgtgaggacaaacaatacaaatacgaagagggttgtagtacctttacttgtatcacagatacttttgtacccattttgcactagaggaaaaccatgaagcagttgctcaaatgttgttcaacaccagaaaatttatattggagaaaagcactgtaaatgtaatgcatttgtgaaaacattttttaaaaaactacagcttagaaaataccagaggcctcatactaaaatatatttttgcaagtgaagtaaatataaaaataatttaatccaaaattaagtctatataaatatcagagaattcacagtagaaatatctaaggtactgacacttcagacattgctgagtatagaatcagaatgctgagtatagaaaataatttaaaactaaagttggtaggtaaataatgtgtatataactttaaaagaagtagaatttttttgtagatgtataattacattcaaattatattttttcttgaaaaattagtttttgaaaagcaaatgatgtaattcaactcaaattcatgctcttcattcctattgtattcacatgtgaaagcatgtgattaatttttcatgcatcaaagatatgagaaatcatttctgttaggtcggtattatttatgacactttctatgaaagaataaggacattaaaatgtaagatgcatgatgaaaacctgagtgaagaggctgtttgtgtttaacttataatattgagtgatccatgaagtaggttttcagagcaatattcttctgcattatagtaagagaaaaccatttttaatcttagttaaaattaaagtgaattagtagtatatcattttactatttgtacttttatgtaataaaatgcaatgtgttt

SEQ ID NO: 34807 - DNA, 1667 bp, Homo sapiens
  source 1..1667: mol_type = unassigned DNA
atttggcggggcctttgtctctggctgcagccggagctcctgctctcctcctcactgctcagtgtcctctgctcctagaggcccagcctctgtgtccctgtgacctgcagatattgggagatccacagctaagacgccgggactccctggaaacctagaaatgactgtgccataacacacatttgatgctgaaatccgggataggggaactcctttgggagtcgtgtcccttaaccccttcccccgacttcttgaagagacccacccgcgacctcggtacctcggaccagctctgtaaaagccccgcctctgccttcggataggaaccactgacatttaaagatgtcgccatagaattctctctggaggagtggcaatgcctggatactgcacagcgggatttatataggaatgtgttgttagagaactacagaaacctggtctttttgggtattgctgtctctaagccatatctgatcacctgtctggagcaaaaaaaagagccctggaatataaaaagacatgagatggtagccaaacccccagtaatgtcttttcattttgcccaagacctttggccagagcagaacataaaagattctttccagaaagtgacactgagaagatacggaaaatgtgaatatgagaatttacagttaagaaaaggctgtaaacatgtggatgagtgtacggggcacaaaggaggtcataatacagttaaccaatgtttgacagctaccccaagcaaaatattccagtgtaataaatatgtgaaagtctttgataaattttcaaattcaaatagatataagagaagacatacaggaaacaaacacttcaaatgtaaagaatgtagcaaatcattttgcgtgctttcacaactaactcagcatagaagaattcatactagagtgaattcctacaaatgtgaagaatgtggaaaagccattattatctgctcagattttactcaacattagagagttagtacgtaataaaagcattataaatgcaatttttgtcaagagatctttcagaaaatataagcctttaaagtgaagaagaggagccagttgtgctggctcacatctgtaatgccagcactttgggaggccaaggtgggtggatcacctgagggcaggagtctgagaccagcctggccaacatagcaaaaccccatctctattaaaaattttacaaaaattagctgcgtgtggtggcaggcccctgtaatcccagctaattgggaggctgaagcaggagaattgctcaaacctgggaggcgaagattgcagtgagctgaaatcacaccactacactccagccaaagcaacaagagcaaaaacttcgtctcaaaaacaaaacaaaaaaagagtattcattgtgaggacaaacaatacaaatacgaagagggttgtagtacctttacttgtatcacagatacttttgtacccattttgcactagaggaaaaccatgaagcagttgctcaaatgttgttcaacaccagaaaatttatattggagaaaagcactgtaaatgtaatgcatttgtgaaaacattttttaaaaaactacagcttagaaaataccagaggcctcatactaaaatatatttttgcaagtgaagtaaatataaaaataatttaatccaaaattaagtctatat

SEQ ID NO: 34808 - DNA, 2206 bp, Homo sapiens
  source 1..2206: mol_type = unassigned DNA
acagcgaggacccaaggctggggtttcctgcttggatcaggagtgcctggggatttgatccccatcctggtgcagctccgagacgctcctgggctgcgcgcgcttttgggctgcgccaccgacagagacatctggaagccggagctagtggaagactctgcctcacctgcctccttgaaggaaacacggggaagccaggactggccgtcacgttggtgacaaatatgtcccaggactcggtgaccttcgcagacgtggctgtgaacttcaccaaagaggagtggaccctgctggacccagctcagaggaatctctacagagacgtgatgctggaaaattctaggaacttggcattcatagattgggcaactccatgtaaaaccaaagacgcaacccctcagccggatattcttcctaaaagaacatttcctgaagccaacagagtgtgtctcacgagcatcagttcccagcactccacattaagagaagactggagatgccccaaaacagaggaaccacacaggcagggggtgaataatgtgaagccacctgcagttgcccctgagaaagatgaatctcctgttagcatttgtgaagatcatgaaatgaggaaccactctaaacctacctgcaggcttgtgccttcacagggagattccataagacaatgtatcctaacacgtgactcaagtattttcaagtataatcctgtcttaaacgatagtcaaaaaacacatgaaaacaacgaagacgatggagtcttggggtggaacattcagtgggttccgtgtgggagaaaaacagagctgaaatcaagcacatggactggcagtcagaacactgtgcatcatatacgtgatgaaattgatacgggggccaacaggcaccagcggaatccatttggaaaagctttccgtgaagacggatcccttagggcacacaacactcatggtcgagagaaaatgtatgattttactcagtgcgagaacacctccagaaataactcaattcacgccatgcagatgcagttgtataccgcagagacaaacaagaaggattgtcaaactggggcaacctctgccaacgctccaaattccggttcacacaagagtcattgcactggagagaaaacccataaatgccccgaatgtgggagagcctttttttatcagtcattccttatgagacatatgaaaattcacactggagagaaaccgtatgaatgtgggaaatgtgggaaagcctttagatattccttacaccttaataaacatttaagaaagcatgttgtgcagaagaagccctacgaatgtgaagaatgtgggaaagtcattcgggagtcctcaaaatatacacatataaggagccacactggagagaaaccctataaatgtaagacatgtggaaaagactttgcaaagtcgtcaggacttaaaaaacatcttaagactcacaaagatgagaagccctgtgaatgaaaggaaggtggaaaatttttcattaattttctgactgtaccaaacatgtgaggaggacatattggaagggagctcaaggggttagcatgagtgagaacatcttccctgaactctcgtatcttacagaaatgtgaaaaaaaaccctgtgaaggtaaagtctacagaaagcctttcatcttcattcatcttgagtagacatttgttctcaccctggagagaaactgcgaatctaaaaggaatatgacaaagccttcagcgtggtctcaaattcatggttcatacaagaactcacactgcagagactccttacggaaataaaaaatgtaggaaagacctgccggccgcggtggctcatgcctgtaatcccagcactttgggaggccgaggcgggcggatcacgaggtcaggagatcaagaccatcctggctaacacggtgataccccgtctctactaaaaatacaaaaaaaattagccaggcgtggtggcaggtgcctgtagtcccagctacttgggaggctgaggtaggagaatggtgtaaacctgggaggtggagcttgcagtgagccgagatggagccactgcactccagcctgggggaaagagcgagactccgtctcaaaaaaaaaaaaaagtaggaaagacctctttaaacacttaccactcatgttgcatgtgaatccacatcctgaagggaggctacaactggaataaaaataagaaagctttc

SEQ ID NO: 34809 - DNA, 2478 bp, Homo sapiens
  source 1..2478: mol_type = unassigned DNA
agcccacttgcacccaagtgaataaacagcctttgttgcttacacaaagcctgtttaggtggtcttctatacggacacgcgtgacacccaggagttcgagacgagtctgggcagcatatactgaggggaaaaaaaagccttctttccttgggaaatgcaggaagccagcaagcggccggagtctccggagcccgcaaggaggcgcgttggctgcgcagagagcgcgcttcccagctggagagcctaggaacggtggcgcgggcggaggcgacagcgaggacccaaggctggggtttcctgcttggatcaggagtgcctggggatttgatccccatcctggtgcagctccgagacgctcctgggctgcgcgcgcttttgggctgcgccaccgacagagacatctggaagccggagctagtggaagactctgcctcacctgcctccttgaaggaaacacggggaagccaggactggccgtcacgttggtgacaaatatgtcccaggactcggtgaccttcgcagacgtggctgtgaacttcaccaaagaggagtggaccctgctggacccagctcagaggaatctctacagagacgtgatgctggaaaattctaggaacttggcattcatagattgggcaactccatgtaaaaccaaagacgcaacccctcagccggatattcttcctaaaagaacatttcctgaagccaacagagtgtgtctcacgagcatcagttcccagcactccacattaagagaagactggagatgccccaaaacagaggaaccacacaggcagggggtgaataatgtgaagccacctgcagttgcccctgagaaagatgaatctcctgttagcatttgtgaagatcatgaaatgaggaaccactctaaacctacctgcaggcttgtgccttcacagggagattccataagacaatgtatcctaacacgtgactcaagtattttcaagtataatcctgtcttaaacgatagtcaaaaaacacatgaaaacaacgaagacgatggagtcttggggtggaacattcagtgggttccgtgtgggagaaaaacagagctgaaatcaagcacatggactggcagtcagaacactgtgcatcatatacgtgatgaaattgatacgggggccaacaggcaccagcggaatccatttggaaaagctttccgtgaagacggatcccttagggcacacaacactcatggtcgagagaaaatgtatgattttactcagtgcgagaacacctccagaaataactcaattcacgccatgcagatgcagttgtataccgcagagacaaacaagaaggattgtcaaactggggcaacctctgccaacgctccaaattccggttcacacaagagtcattgcactggagagaaaacccataaatgccccgaatgtgggagagcctttttttatcagtcattccttatgagacatatgaaaattcacactggagagaaaccgtatgaatgtgggaaatgtgggaaagcctttagatattccttacaccttaataaacatttaagaaagcatgttgtgcagaagaagccctacgaatgtgaagaatgtgggaaagtcattcgggagtcctcaaaatatacacatataaggagccacactggagagaaaccctataaatgtaagacatgtggaaaagactttgcaaagtcgtcaggacttaaaaaacatcttaagactcacaaagatgagaagccctgtgaatgaaaggaaggtggaaaatttttcattaattttctgactgtaccaaacatgtgaggaggacatattggaagggagctcaaggggttagcatgagtgagaacatcttccctgaactctcgtatcttacagaaatgtgaaaaaaaaccctgtgaaggtaaagtctacagaaagcctttcatcttcattcatcttgagtagacatttgttctcaccctggagagaaactgcgaatctaaaaggaatatgacaaagccttcagcgtggtctcaaattcatggttcatacaagaactcacactgcagagactccttacggaaataaaaaatgtaggaaagacctgccggccgcggtggctcatgcctgtaatcccagcactttgggaggccgaggcgggcggatcacgaggtcaggagatcaagaccatcctggctaacacggtgataccccgtctctactaaaaatacaaaaaaaattagccaggcgtggtggcaggtgcctgtagtcccagctacttgggaggctgaggtaggagaatggtgtaaacctgggaggtggagcttgcagtgagccgagatggagccactgcactccagcctgggggaaagagcgagactccgtctcaaaaaaaaaaaaaagtaggaaagacctctttaaacacttaccactcatgttgcatgtgaatccacatcctgaagggaggctacaactggaataaaaataagaaagctttcaa

SEQ ID NO: 34810 - DNA, 2874 bp, Homo sapiens
  source 1..2874: mol_type = unassigned DNA
gactaatggccctaactaagtattaacccctgccaagaaaagagctacttcctcttgaagtaaatgaagatagtgatgctttctcttaaactttacttataaaaagcatcaaaggggggaatgaagcaggaaatataaaaggaaaaacaagtaaagggaaaacaagtcctttcctgaccagtctgactcactccaaagtcctgctggagctatgataattatctgcaaggccaggcaggggctccgaaggagtgggctccaggagcagggatgagaaaaacaagttctccttatcagtttccctgtttgaaattctctccccataacattattctttgttctgctctcacaactatttttgtaactatttctgcaagtctgtaaagattttgtaagttcttgtttttctttctgtagcatggcaaggtcacaagacatgtttaagtaaggtaggctcatgttgcaaatcctgttgtaaaacctgtcacggtatgattaactgcctttgttctgcttctgtaagactgctttctcacctcgcaggttttgcgccaaaaacccgacttgcccctgcctgatgcatgtataaaagtcaagccctgtctttgttcagggctcagcctttggatgttaatccgctgggccagtggccacctaaataaaaccttcctgttgcacccagtgatctctccggcctcctgattcccacaacatataagcattcctttttctctgcaacctagcccgcatctgtcattgactttttaacaataggcattctgactggatgagatggtatctcactgtggtttttctctgcatttttctaataattaacaacgtgaattttgttttcatatgcttgtcagccacatgtatgtcttcttttgaaaagtatctgttcatgtttttgcttactttttaattaggtttttggttttctttttgttgttgttgttgttttctgagatggagtcttgctgtgtcaccaggatggagtgcagtggcatgatctcgactcactgcaacctccacctcccaggttcagatgattcttctgcttcagtctcctgagtagctgggatcacagggaccattgacatttatggatgtggccatagaattctctttggaggagtggcaatgcctggacactgcacagcagaatttatataggcatgtgatgtgagagaactacagaaacctggttttcttgggtgaaggtattgctgtctctaagccagacctgattacctgtctggagcaaggaaaagagccctggaatatgaagagacatgagatggtagctaaacatttagttatgttttattattttgcccaacacctttggccagagcagaacataagagattctttccagaaagtgaccctaagaagatatagaaaatgtggatatgagaatttacagttaagaaaaggctgtaaaagtgtggttgagtgtaaacagcacaaaggagattatagtggacttaaccaatgtttgaaaactaccttgagcaaaatatttcaatgtaataaatatgtagaagttttccataaaatttcaaattcaaatagacacaagatgagacatactgaaaataaacattttaaatgtaaagaatgtcgcaaaacattttgcatgctttcacacctaactcaacataaaagaatccaaactagagtgaatttctacaaatgtgaagcatatggaagagcctttaactggtcctcaacccttaataaacataagagaattcatactggagaaaaaccttacaaatgtaaagaatgtggcaaagcctttaaccagacctcacaccttattagacataagagaattcatactgaagagaaaccctacaaatgtgaagaatgtggcaaagcctttaaccagtcatcgacccttactacacataatataattcatactggggaaattccctacaaatgtgagaaatgtgttagagcttttaaccaagcctcaaagcttactgaacataagttaattcataccggagagaaacgttatgaatgtgaagaatgcggcaaagcttttaaccgatcctcaaaacttactgaacataagtacattcatactggagagaagctgtacaaatgtgaagaatgtggtaaagcctttaaccagtcctcaacccttactacacataagagaattcatagtggagagaagccctacaaatgtgaagaatgtggcaaagcttttaaacaattttcaaatcttactgaccataaaaaaattcatactggagagaaaccctacaaatgtgaggaatgtggcaaagcttttaaccaactctcaaaccttactagacataaggtaattcatactggagagaaaccctacaaatgtggagaatgtggcaaagcctttaaccagtcctcagcccttaatacacataagataatccatactggagagaatccccacaaatgtagagaatctggcaaagttttccacctatcctcaaaacttagtacatgtaagaaaattcatactggagagaaactctacaaatgtgaagaatgtggcaaagcctttaaccgatcttcaacccttattggacataagagaattcatactggagagaaaccctacaaatgtgaagaatgtggcaaagcttttaaccaatcttcaacacttactacacataagataattcatactgaagagaaacagtacaaatgtgatgaatgtggcaaagcttctacctgatcctcaaaactcattgaacacaagaaaattcatactggagagaaaccttacaagtgtgaagaatgtggcaaaacttctaaccatttctcaacccttactaaacataagatgattcatactggagagaagttacacaa

SEQ ID NO: 34811 - DNA, 2437 bp, Homo sapiens
  source 1..2437: mol_type = unassigned DNA
gactaatggccctaactaagtattaacccctgccaagaaaagagctacttcctcttgaagtaaatgaagatagtgatgctttctcttaaactttacttataaaaagcatcaaaggggggaatgaagcaggaaatataaaaggaaaaacaagtaaagggaaaacaagtcctttcctgaccagtctgactcactccaaagtcctgctggagctatgataattatctgcaaggccaggcaggggctccgaaggagtgggctccaggagcagggatgagaaaaacaagttctccttatcagtttccctgtttgaaattctctccccataacattattctttgttctgctctcacaactatttttgtaactatttctgcaagtctgtaaagattttgtaagttcttgtttttctttctgtagcatggcaaggtcacaagacatgtttaagtaaggtaggctcatgttgcaaatcctgttgtaaaacctgtcacggtatgattaactgcctttgttctgcttctgtaagactgctttctcacctcgcaggttttgcgccaaaaacccgacttgcccctgcctgatgcatgtataaaagtcaagccctgtctttgttcagggctcagcctttggatgttaatccgctgggccagtggccacctaaataaaaccttcctgttgcacccagtgatctctccggcctcctgattcccacaacatataagcattcctttttctctgcaacctagcccgcatctgtcattgactttttaacaataggcattctgactggatgagatggtatctcactgtggtttttctctgcatttttctaataattaacaacgtgaattttgttttcatatgcttgtcagccacatgtatgtcttcttttgaaaagtatctgttcatgtttttgcttactttttaattaggtttttggttttctttttgttgttgttgttgttttctgagatggagtcttgctgtgtcaccaggatggagtgcagtggcatgatctcgactcactgcaacctccacctcccaggttcagatgattcttctgcttcagtctcctgagtagctgggatcacagggaccattgacatttatggatgtggccatagaattctctttggaggagtggcaatgcctggacactgcacagcagaatttatataggcatgtgatgtgagagaactacagaaacctggttttcttgggtgaaggtattgctgtctctaagccagacctgattacctgtctggagcaaggaaaagagccctggaatatgaagagacatgagatggtagctaaacatttagttatgttttattattttgcccaacacctttggccagagcagaacataagagattctttccagaaagtgaccctaagaagatatagaaaatgtggatatgagaatttacagttaagaaaaggctgtaaaagtgtggttgagtgtaaacagcacaaaggagattatagtggacttaaccaatgtttgaaaactaccttgagcaaaatatttcaatgtaataaatatgtagaagttttccataaaatttcaaattcaaatagacacaagatgagacatactgaaaataaacattttaaatgtaaagaatgtcgcaaaacattttgcatgctttcacacctaactcaacataaaagaatccaaactagagtgaatttctacaaatgtgaagcatatggaagagcctttaactggtcctcaacccttaataaacataagagaattcatactggagaaaaaccttacaaatgtaaagaatgtggcaaagcctttaaccagacctcacaccttattagacataagagaattcatactgaagagaaaccctacaaatgtgaagaatgtggcaaagcctttaaccagtcatcgacccttactacacataatataattcatactggggaaattccctacaaatgtgagaaatgtgttagagcttttaaccaagcctcaaagcttactgaacataagttaattcataccggagagaaacgttatgaatgtgaagaatgcggcaaagcttttaaccgatcctcaaaacttactgaacataagtacattcatactggagagaagctgtacaaatgtgaagaatgtggtaaagcctttaaccagtcctcaacccttactacacataagagaattcatagtggagagaagccctacaaatgtgaagaatgtggcaaagcttttaaacaattttcaaatcttactgaccataaaaaaattcatactggagagaaaccctacaaatgtgaggaatgtggcaaagcttttaaccaactctcaaaccttactagacataaggtaattcatactggagagaaaccctacaaatgtggagaatgtggcaaagctaacctatcatcaacccttactccacataagacaattcatatttga

SEQ ID NO: 34812 - DNA, 2027 bp, Homo sapiens
  source 1..2027: mol_type = unassigned DNA
tcctgtgcgtccccaggtcaccgctcgccctagttcccaggctttggcctccggtgggcgagaatcgcggagcctgcggggctgggcgccgaagagccgggccggcacccaagcgggcgcggggctgtgcgggccaggcggaggctcaagcggggatccccgagcacgacccccggagccgacggcgctggggcccaaggggccggccgggcggtgacgacggcggaggcgaaggggcggcgggacccgggcccggcccgtgtgcgtcctcgacggcccggccccggctccgcaggacggtgagccccagggagacggatctgggctccgggagggacgccccgcctggatttgtcccgtaggcccggcccgggcccctctggagcagaacggccttggtgaggtggacaggaagggacctcgcgagcagacgcgcgcccgcgacagcaatcccgccccggcctgtcgggagcggtggggcagaggctgcggagccccaggaggatctgcctccgctttcacagtcctccagatttttccaagagcagcagaaaatgaataaatccctggggccagtgtcattcaaggacgtggctgtggacttcacccaggaggaatggcagcagctggatcctgagcagaagataacttacagggatgtgatgctggagaactacagcaatctagtttctgtggggtatcacattatcaaaccggatgttatcagcaagttggagcaaggagaagagccatggatagtagaaggagaattcctacttcagagctatccagatgaagtctggcaaactgatgacctaatagagagaatccaggaagaggaaaataaaccttcaaggcaaactgtgttcattgagaccctgattgaagagagaggtaatgttcctggtaaaacttttgatgtagaaacgaaccctgttccttcaagaaaaatagcctataaaaatagcctctgtgactcatgtgaaaagtgtttaacgtctgtttcagaatatattagtagtgatggaagctatgcaagaatgaaagctgatgaatgtagtggatgtgggaaatcactcctccatattaagcttgagaaaactcatccaggagatcaagcttatgaatttaatcaaaatggggaaccttatactctaaatgaagaaagtctttatcagaaaattcgtattttggagaaaccttttgaatatattgaatgccagaaagccttccaaaaggacactgtttttgttaatcacatggaagaaaagccctataagtggaatggatctgaaatagcctttctccagatgtcggacctcactgtacatcagacatctcatatggaaatgaagccctatgaatgcagtgaatgtgggaaatccttctgtaaaaagtcaaaatttattatacatcagaggactcacacaggagagaaaccttacgaatgtaatcagtgtgggaaatccttctgccagaagggaacccttactgtgcatcagagaacacacacaggggagaagccctatgaatgtaatgaatgtgggaagaacttttaccagaagttacacctcattcagcatcagagaactcactcaggagagaagccctatgaatgtagttattgtggaaaatccttttgccagaagacacacctcacacaacatcagagaacacattcaggagagagaccttatgtttgtcatgactgtgggccttctcgcagaagtcagcacttaatgcatcagaaaattcacacaggtgtgaaactctacaagtgtagtgaatgtgggaaatgcttctgccgcaagtctactctcacgacccacctgaggacccacacaggagagaaaccgtatgaatgtaatgagtgtggaaaattcttctctcggttgtcatatctcactgtacattatagaactcattcaggagagaaaccctatgaatgtaatgaatgtggaaaaaccttctacctgaattcagccctcatgagacatcagagagtgcacacaggagagaaaccttac

SEQ ID NO: 34813 - DNA, 2921 bp, Homo sapiens
  source 1..2921: mol_type = unassigned DNA
ccaggtcaccgctcgccctagttcccaggctttggcctccggtgggcgagaatcgcggagcctgcggggctgggcgccgaagagccgggccggcacccaagcgggcgcggggctgtgcgggccaggcggaggctcaagcggggatccccgagcacgacccccggagccgacggcgctggggcccaaggggccggccgggcggtgacgacggcggaggcgaaggggcggcgggacccgggcccggcccgtgtgcgtcctcgacggcccggccccggctccgcaggacggtgagccccagggagacggatctgggctccgggagggacgccccgcctggatttgtcccgtaggcccggcccgggcccctctggagcagaacggccttggtgaggtggacaggaagggacctcgcgagcagacgcgcgcccgcgacagcaatcccgccccggcctgtcgggagcggtggggcagaggctgcggagccccaggaggatctgcctccgctttcacagtcctccagatttttccaagagcagcagaaaatgaataaatccctggggccagtgtcattcaaggacgtggctgtggacttcacccaggaggaatggcagcagctggatcctgagcagaagataacttacagggatgtgatgctggagaactacagcaatctagtttctgtggggtatcacattatcaaaccggatgttatcagcaagttggagcaaggagaagagccatggatagtagaaggagaattcctacttcagagctatccagatgaagtctggcaaactgatgacctaatagagagaatccaggaagaggaaaataaaccttcaaggcaaactgtgttcattgagaccctgattgaagagagagaatatattagtagtgatggaagctatgcaagaatgaaagctgatgaatgtagtggatgtgggaaatcactcctccatattaagcttgagaaaactcatccaggagatcaagcttatgaatttaatcaaaatggggaaccttatactctaaatgaagaaagtctttatcagaaaattcgtattttggagaaaccttttgaatatattgaatgccagaaagccttccaaaaggacactgtttttgttaatcacatggaagaaaagccctataagtggaatggatctgaaatagcctttctccagatgtcggacctcactgtacatcagacatctcatatggaaatgaagccctatgaatgcagtgaatgtgggaaatccttctgtaaaaagtcaaaatttattatacatcagaggactcacacaggagagaaaccttacgaatgtaatcagtgtgggaaatccttctgccagaagggaacccttactgtgcatcagagaacacacacaggggagaagccctatgaatgtaatgaatgtgggaagaacttttaccagaagttacacctcattcagcatcagagaactcactcaggagagaagccctatgaatgtagttattgtggaaaatccttttgccagaagacacacctcacacaacatcagagaacacattcaggagagagaccttatgtttgtcatgactgtgggaaaaccttctcgcagaagtcagcacttaatgaccatcagaaaattcacacaggtgtgaaactctacaagtgtagtgaatgtgggaaatgcttctgccgcaagtctactctcacgacccacctgaggacccacacaggagagaaaccgtatgaatgtaatgagtgtggaaaattcttctctcggttgtcatatctcactgtacattatagaactcattcaggagagaaaccctatgaatgtaatgaatgtggaaaaaccttctacctgaattcagccctcatgagacatcagagagtgcacacaggagagaaaccttacgaatgtaatgaatgtggaaagttattctcccagttgtcatacctcactatccatcatagaactcattcaggagtaaaaccctatgaatgtagtgaatgtgggaaaaccttctaccagaactcagccctttgtagacatcggagaatacacaaaggagagaagccctatgaatgctatatatgtggaaaattcttctctcagatgtcatacctcactatacatcatagaattcattcaggagagaagccctatgaatgtagtgaatgtgggaaaaccttctgccagaattcagcccttaatcgacatcagagaacacacacaggagagaaagcctacgaatgttatgaatgtgggaagtgcttctctcagatgtcctatctcactatacatcatcgaattcattcaggagagaaaccctttgaatgtaatgagtgtggaaaagccttctctcggatgtcatacctcactgtacattatagaactcattcaggagagaaaccctatgagtgtactgaatgtggaaaaaaattctaccacaaatcagcattcaacagccatcagagaattcataggagaggcaatatgaatgtaatagatgtgggaaggcttctctgaagtcagacctcattttatatcagagaaccctttcagtatagtgaatcagaaactcctgcctgaagtcaaacaccttgtacatcagagagttcacacaggttagtgtggacatccccttgtgtgttggactcataatctgaagactcacagaatggaaaccatgattataacaagaccacatggtataacaatactagactatagacaagtaaaaatttataaatattaagaatgtatatacatgtcaccatggattggaactgttttgcatatcagggaaatcatagccaaggggaaatctatcagtataaggaatgtggaagacataatcctttggaaactgttaatactaaaagatatgtttctgatacaatagcaaacttgaaaaaaaaaaaagaa

SEQ ID NO: 34814 - DNA, 2405 bp, Homo sapiens
  source 1..2405: mol_type = unassigned DNA
cccctctctgtgtgcgtgttcgcgcatgcgcgcaacggccttggtgaggtggacaggaagggacctcgcgagcagacgcgcgcccgcgacagcaatcccgccccggcctgtcgggagcggtggggcagaggctgcggagccccaggaggatctgcctccgctttcacagtcctccagatttttccaagagcagcagaaaatgaataaatccctggggccagtgtcattcaaggacgtggctgtggacttcacccaggaggaatggcagcagctggatcctgagcagaagataacttacagggatgtgatgctggagaactacagcaatctagtttctgtggggtatcacattatcaaaccggatgttatcagcaagttggagcaaggagaagagccatggatagtagaaggagaattcctacttcagagctatccagatgaagtctggcaaactgatgacctaatagagagaatccaggaagaggaaaataaaccttcaaggcaaactgtgttcattgagaccctgattgaagagagaggtaatgttcctggtaaaacttttgatgtagaaacgaaccctgttccttcaagaaaaatagcctataaaaatagcctctgtgactcatgtgaaaagtgtttaacgtctgtttcagaatatattagtagtgatggaagctatgcaagaatgaaagctgatgaatgtagtggatgtgggaaatcactcctccatattaagcttgagaaaactcatccaggagatcaagcttatgaatttaatcaaaatggggaaccttatactctaaatgaagaaagtctttatcagaaaattcgtattttggagaaaccttttgaatatattgaatgccagaaagccttccaaaaggacactgtttttgttaatcacatggaagaaaagccctataagtggaatggatctgaaatagcctttctccagatgtcggacctcactgtacatcagacatctcatatggaaatgaagccctatgaatgcagtgaatgtgggaaatccttctgtaaaaagtcaaaatttattatacatcagaggactcacacaggagagaaaccttacgaatgtaatcagtgtgggaaatccttctgccagaagggaacccttactgtgcatcagagaacacacacaggggagaagccctatgaatgtaatgaatgtgggaagaacttttaccagaagttacacctcattcagcatcagagaactcactcaggagagaagccctatgaatgtagttattgtggaaaatccttttgccagaagacacacctcacacaacatcagagaacacattcaggagagagaccttatgtttgtcatgactgtgggaaaaccttctcgcagaagtcagcacttaatgaccatcagaaaattcacacaggtgtgaaactctacaagtgtagtgaatgtgggaaatgcttctgccgcaagtctactctcacgacccacctgaggacccacacaggagagaaaccgtatgaatgtaatgagtgtggaaaattcttctctcggttgtcatatctcactgtacattatagaactcattcaggagagaaaccctatgaatgtaatgaatgtggaaaaaccttctacctgaattcagccctcatgagacatcagagagtgcacacaggagagaaaccttacgaatgtaatgaatgtggaaagttattctcccagttgtcatacctcactatccatcatagaactcattcaggagtaaaaccctatgaatgtagtgaatgtgggaaaaccttctaccagaactcagccctttgtagacatcggagaatacacaaaggagagaagccctatgaatgctatatatgtggaaaattcttctctcagatgtcatacctcactatacatcatagaattcattcaggagagaagccctatgaatgtagtgaatgtgggaaaaccttctgccagaattcagcccttaatcgacatcagagaacacacacaggagagaaagcctacgaatgttatgaatgtgggaagtgcttctctcagatgtcctatctcactatacatcatcgaattcattcaggagagaaaccctttgaatgtaatgagtgtggaaaagccttctctcggatgtcatacctcactgtacattatagaactcattcaggagagaaaccctatgagtgtactgaatgtggaaaaaaattctaccacaaatcagcattcaacagccatcagagaattcataggagaggcaatatgaatgtaatagatgtgggaaggcttctctgaagtcagacctcattttatatcagagaaccctttcagtatagtgaatcagaaactcctgcctgaagtcaaacaccttgtacatcagagagttcacacaggttagtgtggacat

SEQ ID NO: 34815 - DNA, 5051 bp, Homo sapiens
  source 1..5051: mol_type = unassigned DNA
ccaggtcaccgctcgccctagttcccaggctttggcctccggtgggcgagaatcgcggagcctgcggggctgggcgccgaagagccgggccggcacccaagcgggcgcggggctgtgcgggccaggcggaggctcaagcggggatccccgagcacgacccccggagccgacggcgctggggcccaaggggccggccgggcggtgacgacggcggaggcgaaggggcggcgggacccgggcccggcccgtgtgcgtcctcgacggcccggccccggctccgcaggacggtgagccccagggagacggatctgggctccgggagggacgccccgcctggatttgtcccgtaggcccggcccgggcccctctggagcagaacggccttggtgaggtggacaggaagggacctcgcgagcagacgcgcgcccgcgacagcaatcccgccccggcctgtcgggagcggtggggcagaggctgcggagccccaggaggatctgcctccgctttcacagtcctccagatttttccaagagcagcagaaaatgaataaatccctggggccagtgtcattcaaggacgtggctgtggacttcacccaggaggaatggcagcagctggatcctgagcagaagataacttacagggatgtgatgctggagaactacagcaatctagtttctgtggggtatcacattatcaaaccggatgttatcagcaagttggagcaaggagaagagccatggatagtagaaggagaattcctacttcagagctatccagatgaagtctggcaaactgatgacctaatagagagaatccaggaagaggaaaataaaccttcaaggcaaactgtgttcattgagaccctgattgaagagagaggtaatgttcctggtaaaacttttgatgtagaaacgaaccctgttccttcaagaaaaatagcctataaaaatagcctctgtgactcatgtgaaaagtgtttaacgtctgtttcagaatatattagtagtgatggaagctatgcaagaatgaaagctgatgaatgtagtggatgtgggaaatcactcctccatattaagcttgagaaaactcatccaggagatcaagcttatgaatttaatcaaaatggggaaccttatactctaaatgaagaaagtctttatcagaaaattcgtattttggagaaaccttttgaatatattgaatgccagaaagccttccaaaaggacactgtttttgttaatcacatggaagaaaagccctataagtggaatggatctgaaatagcctttctccagatgtcggacctcactgtacatcagacatctcatatggaaatgaagccctatgaatgcagtgaatgtgggaaatccttctgtaaaaagtcaaaatttattatacatcagaggactcacacaggagagaaaccttacgaatgtaatcagtgtgggaaatccttctgccagaagggaacccttactgtgcatcagagaacacacacaggggagaagccctatgaatgtaatgaatgtgggaagaacttttaccagaagttacacctcattcagcatcagagaactcactcaggagagaagccctatgaatgtagttattgtggaaaatccttttgccagaagacacacctcacacaacatcagagaacacattcaggagagagaccttatgtttgtcatgactgtgggaaaaccttctcgcagaagtcagcacttaatgaccatcagaaaattcacacaggtgtgaaactctacaagtgtagtgaatgtgggaaatgcttctgccgcaagtctactctcacgacccacctgaggacccacacaggagagaaaccgtatgaatgtaatgagtgtggaaaattcttctctcggttgtcatatctcactgtacattatagaactcattcaggagagaaaccctatgaatgtaatgaatgtggaaaaaccttctacctgaattcagccctcatgagacatcagagagtgcacacaggagagaaaccttacgaatgtaatgaatgtggaaagttattctcccagttgtcatacctcactatccatcatagaactcattcaggagtaaaaccctatgaatgtagtgaatgtgggaaaaccttctaccagaactcagccctttgtagacatcggagaatacacaaaggagagaagccctatgaatgctatatatgtggaaaattcttctctcagatgtcatacctcactatacatcatagaattcattcaggagagaagccctatgaatgtagtgaatgtgggaaaaccttctgccagaattcagcccttaatcgacatcagagaacacacacaggagagaaagcctacgaatgttatgaatgtgggaagtgcttctctcagatgtcctatctcactatacatcatcgaattcattcaggagagaaaccctttgaatgtaatgagtgtggaaaagccttctctcggatgtcatacctcactgtacattatagaactcattcaggagagaaaccctatgagtgtactgaatgtggaaaaaaattctaccacaaatcagcattcaacagccatcagagaattcataggagaggcaatatgaatgtaatagatgtgggaaggcttctctgaagtcagacctcattttatatcagagaaccctttcagtatagtgaatcagaaactcctgcctgaagtcaaacaccttgtacatcagagagttcacacaggttagtgtggacatccccttgtgtgttggactcataatctgaagactcacagaatggaaaccatgattataacaagaccacatggtataacaatactagactatagacaagtaaaaatttataaatattaagaatgtatatacatgtcaccatggattggaactgttttgcatatcagggaaatcatagccaaggggaaatctatcagtataaggaatgtggaagacataatcctttggaaactgttaatactaaaagatatgtttctgatacaatagcaaacttgaaaaaaaaaaaagaaatagaagattcctgctgtgaataaacatacttcttgtgtaaatagaaactgtaaagtcatcaggatagctagttaagtcggtaaccttaaactcatgtaagcagttcccaaagaacataggacttatgtttggggagagggttgtttttattacagtacattacaggaattgtatgttcacttcgaatcatgtttgaaaaaacgttgtatccttattttgtaattcatatagtaagagtattctaaacagcactacattaatatcatttgataggtataaagtatactttttcttgcactcttctctaggatttaatgcattgatcattcttaatgaacaatatcagctctaaaggaccaatgcttttataatgttttcaactgtatctgagtcagccagagagataaatatccatgtataaaatagatagaaaactttgcttggtaatttaaaattaataatgccagttttccaagagtgagaaaatcattgcactctatacagttttaagatatacttaaaatattcccatttgtatctatttttttttctactgttttttatttggacacttacataacagtgcagagcacaatgctgtgtaacataggaattcactgtgttttcatttgatgtcgtactggttttaaaccttgtgctctactccttcctgttaatgaattaagaacacattctaacaagggtctgtggcagacattgccgagtgactttctaacataggaattcactgtgttttcatttgatgtcgtactggttttaaaccttgtgctctactccttcctgttaatgaattaagaacacattctaacaagggtctgtggcagacattgccgagtgactttcttagtcactcccttactctgctggcggagtttggttatccatttatcctcaaaaggaagtgagataaatcctgattagttttaaccagtgacactccccttctcgttgccagcagttgatttacagtggtcacagggcccaattctagacataaaacaaaggatatacctgacagactacttctggaaaaggttttctcaaaggcccaaggattcaagcaaagggaagtggaatcttgtggtgaacagtaccttgtctggatgtggtgcctggtaaccatctttcagcaatggattatagtttaatcatggcctgagcagaaatactgaaagaccctgagacctggatgatgtctttgagccaccaaaccaagcagccttgtagccactcctcctttggactgtttcttttgtgagagactaaacttatttttaagccagttgatttaggatgctctattactaataactgaagacattctaattggtacagactgaaacctttataggagttatgcagttcagaagtggactttaggtaagtcatttattttaagctgttgatatagagatttattttctgtaaattttgacgtaaatagtttgagcattagaaatcaacttgaaacaataaaatgtatgcttccttgaactgtcatatcgttgacctgcaaaattcacctttggaacgtgacacaatgttaggcatacctccttttttctaatacatggaatacattttgttggaggtaatttatgtgattcatataccactgctacagtgttagctgacaacatatagtatgaggtaaggatctaattctgtttcctctcacatgattacttgatagctaagcatctgattggtttactgctttaccactgagctgaaatgccgtgttttccatttattaaaatcacacatggctcctgtttttgtcactcagcactttttctccatattcttcaagacgattgtgagtatggtacgtaacaggaattacatctggtaagttgtatagttttgtgtaggaactctatattcatagcatatttgtggaaatgatacctatggaggtttctcacactggtgtgtcattatacattaattgtacaatatgcattttcagtaaaatatttgaaaactgtaaa

SEQ ID NO: 34816 - DNA, 1729 bp, Homo sapiens
  source 1..1729: mol_type = unassigned DNA
atcttttccggcgctggctccgcatggtcagtgccatttcgcctttatcgtggtggagtccaccctggctgtggacctattcaaactcagtctgtctcttgactggaggaggagaaggaaaagttgagcacattgccaaccggagttccccaagaatggcaagttaaaaccaaagtgtcagcacctcaacaacatttttttttggcttaacaaaacatcaaacggcatacaaatggcagaaatccacaatggaggggaactctgtgactttatggaaaatggagaaatcttcagtgaacactcatgccttaatgcacacatgggaactgaaaatacaggggacacttatgactgtgatgagtatggagaaaactttcccatgttacacaacagtgcccctgctggagagacactttctgtgttgaatcagtgcagaaaagccttcagcctgccaccaaatgttcaccagagaacgtggataggagacaaatcctttgaatacagtgactgtgaggaagcctttgttgatcagtcacatcttcaggcaaataggataactcacaatggagaaacactctatgaacagaagcaatgtgggagagcttttacttactccacaagccatgctgtgtctgttaaaatgcatactgtagaaaaaccctacgaatgtaaggaatgtggaaaattctttagatattcttcatatcttaatagtcacatgcgaacccatactggggagaaaccctatgaatgtaaggaatgtgggaaatgcttcactgtttcttcacacctagttgaacatgtaagaattcatactggagagaaaccttatcaatgtaaggaatgtggaagagccttcgctgggcgctcaggccttactaaacatgtacgaatacacactggagagaagccctatgaatgtaacgaatgtgggaaagcctacaataggttttatctactaactgaacattttaaaactcacacagaggagaagccctttgaatgtaaggtatgtggaaaatccttcagaagctcttcatgccttaagaatcactttagaattcacactggaataaaaccctataaatgtaaggagtgtgggaaagcattcactgtttcctcaagcttacataatcatgtaaaaatccatactggagagaagccctatgaatgtaaggactgtgggaaagcctttgctacatcttcacaactcattgaacatataagaactcacactggagagaaaccgtatatatgtaaggaatgtgggaaaaccttccgtgcttcttcacatctacagaaacatgttagaattcacactggagagaaaccctatatatgtaacgaatgtgggaaagcctacaatagattttatttacttactaaacatttaaaaacacactgaagaaaaactctgaatgtaaggaatgtggaaatcttttaggaatttctcataccataattaccacatttgaattcacactgaagagaaattttattggtacaaagaatgtgaggaggccttcagttatccccattcacttcgaagacatgaaagaactcatactctatgtgtcccctataaattttaggaatgttagggagccaatggaatctttttttattattttattttattttattttattttattttattttattttattttatttgagacagagttttgctgttgtcatcacacaggctggagtgcaatggcatgatcc

SEQ ID NO: 34817 - DNA, 1546 bp, Homo sapiens
  source 1..1546: mol_type = unassigned DNA
ccggcgctggctccgcatggtcagtgccatttcgcctttatcgtggtggagtccaccctggctgtggacctattcaaactcagtctgtctcttgactggaggaggagaaggaaaagttgagcacattgccaaccggagttccccaagaatggcaagttaaaaccaaagtgtcagcacctcaacaacatttttttttggcttaacaaaacatcaaacggcatacaaatgatgggactgtctagttgcaggaaaacaagctcaggcctcctgctgatcctattttatggcagaaatccacaatggaggggaactctgtgactttatggaaaatggagaaatcttcagtgaacactcatgccttaatgcacacatgggaactgaaaatacaggggacacttatgactgtgatgagtatggagaaaactttcccatgttacacaacagtgcccctgctggagagacactttctgtgttgaatcagtgcagaaaagccttcagcctgccaccaaatgttcaccagagaacgtggataggagacaaatcctttgaatacagtgactgtgaggaagcctttgttgatcagtcacatcttcaggcaaataggataactcacaatggagaaacactctatgaacagaagcaatgtgggagagcttttacttactccacaagccatgctgtgtctgttaaaatgcatactgtagaaaaaccctacgaatgtaaggaatgtggaaaattctttagatattcttcatatcttaatagtcacatgcgaacccatactggggagaaaccctatgaatgtaaggaatgtgggaaatgcttcactgtttcttcacacctagttgaacatgtaagaattcatactggagagaaaccttatcaatgtaaggaatgtggaagagccttcgctgggcgctcaggccttactaaacatgtacgaatacacactggagagaagccctatgaatgtaacgaatgtgggaaagcctacaataggttttatctactaactgaacattttaaaactcacacagaggagaagccctttgaatgtaaggtatgtggaaaatccttcagaagctcttcatgccttaagaatcactttagaattcacactggaataaaaccctataaatgtaaggagtgtgggaaagcattcactgtttcctcaagcttacataatcatgtaaaaatccatactggagagaagccctatgaatgtaaggactgtgggaaagcctttgctacatcttcacaactcattgaacatataagaactcacacctgtaatcccagcaccttgagaggctgaggtgagtgaatcatgaggtcaggagttcgagaccagcctggccaccatggtgaaaccccgtctctactaaaaatacaaaaaattagccgggcatggtggcaggcacctatagtcccagctattcaggaggctgaggcaggagaatcacttgaatccaggaggtggaggttagagtgagctgagatcacaccactgcactccagcccaggtgacagagtgagattccttctc

SEQ ID NO: 34818 - DNA, 1678 bp, Homo sapiens
  source 1..1678: mol_type = unassigned DNA
tctctcgtgcccgcacgtgcgtgtctcggtcagtagccctgcgcttctccttcactctcggcggttcaggaggctctgccgcagccggggccctcctgtgacctgcatgtactgggggattcgcagggaggatgtcgggacaccccggaagctgggaaatgaactcggttgcctttgaggatgtggctgtgaacttcacccaggaggagtgggctttgttggatccttcccagaagaatctctatagagacgtgatgcaggaaaccttcaggaatctggcttccataggaaacaaaggggaagaccagagcattgaagatcagtacaaaaattcttcaagaaatctaagttcatttcagatacatcagagaaatcacactggagagaaaccctatgaatgtatggaatgtgggaaagccttaggtttttcccgttctcttaatagacataaaaggattcacactggagaaaaacgctatgaatgtaagcaatgtgggaaagccttcagtcgttccagtcaccttcgtgaccatgaaagaactcatactggagagaaaccctatgaatgtaagcactgtgggaaagccttccgttactccaattgccttcattaccatgaaagaactcacactggagagaaaccttatgtgtgcatggaatgtggcaaagctttcagttgtctcagttccttgcaaggacatataaaggctcatgctggtgaagaaccctatccatgtaagcaatgtgggaaagccttcagatacgccagttcccttcagaaacacgagaaaactcatattgcacagaaaccctatgtatgtaacaattgtggtaaaggcttcagatgttccagttcccttcgtgaccatgaaaggactcatactggagagaaaccctatgaatgtcagaaatgtggcaaagcctttagtcgtgctagtaccctttggaagcataaaaaaactcatactggagaaaagccctataaatgtaaaaaaatgtaaaggctttaatcactacagtttttgtcaaaaacatgaacagtcacatacttgagagaaactgtgaatgtaaggtgtaggaaagtacttaattttcccagatttcctcaaatacatgaaacgaatcaaactggagataaaccctatgactataagcaataaggtaaagcattcaatttttccatttctttttgaaaacttgaaaggactcactgaagaaaatccatatgaatgtttaaaatgtggtaaggcctgcagttgttccagtggtatttgatggtataacataactcattctagagaaaaactttatgaaggtatcgaatgtgagaatgccttcatttatcctataactcactcagagacacatggtaacacatactccagattgaccttataaataaaagaatgcccaccagattgaaatcctagaaatacagaaaattctgaattttaacaattactttaaaggtcatgtgaaaactcccactggaaataaatcctgtaaatgtaaatattatggaaaaccttatggaaaataattatagtacaattctcaagaaaattcactatgtgaatgagatgttttaggagctataaataaattgaatatattggttgctcatttttgaagagagtctctagaatatagattttcacttcttttgaaaaaaaaaaaa

SEQ ID NO: 34819 - DNA, 2078 bp, Homo sapiens
  source 1..2078: mol_type = unassigned DNA
ttttttttttttttttaacaatcggatctttcaggaactaatagagcgagaagtcactcattaccacaacagtgccacttatgtggaatctgctcccatgacccaagcacctcacaccaggtcatacctccaacatgaggatcaaatttcagcatgaaatttgaagggagaaaatacccaaactgtattcaatactaagaaactgcatatgagaatattactgtattgttaatagctataggggagggagccatgttgtagactaatcaatccatttatgttcaatttgtttatgttagaaaacctgcactttctctgatattggtagcagtgtaagttcagacttagtaataaaagaaaataactaataaaccattaatgatggggttgtcattttttgcagaagtcatatgatagacatactgtgtaaaattaaataagtcagtgtagaaaaacctccagatgccaaattttaatctgaacaaaaaaattcctgctagagtaaaaccacatgaatgcattgtgtgtgaaaaattcttcatacgtcattcatcccttcataggcacatcatatctcattctggaaacaacccatatgggtgtgaggaatgcggaaagaagccatgtacatgtaaacaatgtcagaaaacttccctttctgtcacaagggttcacagagacacagtaatgcacactggaaatggacattatggttgtacaatatgtgagaaagtttttaatattcccagttcatttcagatacatcagagaaatcacactggagagaaaccctatgaatgtatggaatgtgggaaagccttaggtttttcccgttctcttaatagacataaaaggattcacactggagaaaaacgctatgaatgtaagcaatgtgggaaagccttcagtcgttccagtcaccttcgtgaccatgaaagaactcatactggagagaaaccctatgaatgtaagcactgtgggaaagccttccgttactccaattgccttcattaccatgaaagaactcacactggagagaaaccttatgtgtgcatggaatgtggcaaagctttcagttgtctcagttccttgcaaggacatataaaggctcatgctggtgaagaaccctatccatgtaagcaatgtgggaaagccttcagatacgccagttcccttcagaaacacgagaaaactcatattgcacagaaaccctatgtatgtaacaattgtggtaaaggcttcagatgttccagttcccttcgtgaccatgaaaggactcatactggagagaaaccctatgaatgtcagaaatgtggcaaagcctttagtcgtgctagtaccctttggaagcataaaaaaactcatactggagaaaagccctataaatgtaaaaaaatgtaaaggctttaatcactacagtttttgtcaaaaacatgaacagtcacatacttgagagaaactgtgaatgtaaggtgtaggaaagtacttaattttcccagatttcctcaaatacatgaaacgaatcaaactggagataaaccctatgactataagcaataaggtaaagcattcaatttttccatttctttttgaaaacttgaaaggactcactgaagaaaatccatatgaatgtttaaaatgtggtaaggcctgcagttgttccagtggtatttgatggtataacataactcattctagagaaaaactttatgaaggtatcgaatgtgagaatgccttcatttatcctataactcactcagagacacatggtaacacatactccagattgaccttataaataaaagaatgcccaccagattgaaatcctagaaatacagaaaattctgaattttaacaattactttaaaggtcatgtgaaaactcccactggaaataaatcctgtaaatgtaaatattatggaaaaccttatggaaaataattatagtacaattctcaagaaaattcactatgtgaatgagatgttttaggagctataaataaattgaatatattggttgctcatttttgaagagagtctctagaatatagattttcacttcttttgaaaaaaaaaaaa

SEQ ID NO: 34820 - DNA, 468 bp, Homo sapiens
  source 1..468: mol_type = unassigned DNA
atgaatgcattgtgtgtgaaaaattcttcataccattcatcccttcataggcacatcatatctcattctggaaacaacccatatgggtgtgaggaatgcggaaagaagccatgtacatgtaaacaatgtcagaaaacttccctttctgtcacaagggttcacagagacacagtaatgcacactggaaatggacattatggttgtacaatatgtgagaaagtttttaatattcccagttcatttcagatacatcagagaaatcacactggagagaaaccctatgaatgtatggaatgtgggaaagccttaggtttttcccgttctcttaatagacataaaaggattcacactggagaaaaacgctatgaatgtaagaaatgtggcaaagcctttagtcgtgctagtaccctttggaagcataaaaaaactcatactggagaaaagccctataaatgtaaaaaaatgtaa

SEQ ID NO: 34821 - DNA, 888 bp, Homo sapiens
  source 1..888: mol_type = unassigned DNA
atgaatgcattgtgtgtgaaaaattcttcataccattcatcccttcataggcacatcatatctcattctggaaacaacccatatgggtgtgaggaatgcggaaagaagccatgtacatgtaaacaatgtcagaaaacttccctttctgtcacaagggttcacagagacacagtaatgcacactggaaatggacattatggttgtacaatatgtgagaaagtttttaatattcccagttcatttcagatacatcagagaaatcacactggagagaaaccctatgaatgtatggaatgtgggaaagccttaggtttttcccgttctcttaatagacataaaaggattcacactggagaaaaacgctatgaatgtaagcaatgtgggaaagccttcagtcgttccagtcaccttcgtgaccatgaaagaactcatactggagagaaaccctatgaatgtaagcactgtgggaaagccttccgttactccaattgccttcattaccatgaaagaactcacactggagagaaaccttatgtgtgcatggaatgtggcaaagctttcagttgtctcagttccttgcaaggacatataaaggctcatgctggtgaagaaccctatccatgtaagcaatgtgggaaagccttcagatacgccagttcccttcagaaacacgagaaaactcatattgcacagaaaccctatgtatgtaacaattgtggtaaaggcttcagatgttccagttcccttcgtgaccatgaaaggactcatactggagagaaaccctatgaatgtcagaaatgtggcaaagcctttagtcgtgctagtaccctttggaagcataaaaaaactcatactggagaaaagccctataaatgtaaaaaaatgtaa

SEQ ID NO: 34822 - DNA, 2243 bp, Homo sapiens
  source 1..2243: mol_type = unassigned DNA
ctcgtgcccgcacgtgcgtgtctcggtcagtagccctgcgcttctccttcactctcggcggttcaggaggctctgccgcagccggggccctcctgtgacctgcatgtactgggggattcgcagggaggatgtcgggacaccccggaagctgggaaatgaactcggttgcctttgaggatgtggctgtgaacttcacccaggaggagtgggctttgttggatccttcccagaagaatctctatagagacgtgatgcaggaaaccttcaggaatctggcttccataggaaacaaaggggaagaccagagcattgaagatcagtacaaaaattcttcaagaaatctaagatgaggtttatataactttccaagacaaggaagttgtgcaaagcctcacagctactaagaggctgggctgggactcaggattaacttcgtgactccaaagcccatgcacctctgcaagccacacgaatcaagcagcttctctaaacctttgaagtcctggaaagtaactcttctgcaatagaagcaagaatcctgtgagattgggatccatctagtactcttcaccatttggaacaactgcctccagagaatgcttctgacgcatcttggaagaacttggaataacctgaggaaatggtcgatttgctaatttaggaaaccaatgttcgatacgtgtgtgatcccaataaagctattaacaaaaaacggctcacgtaggccgggcgcagtggctcacgcctgtaatcccagcactttgggaggccgaggcgggcagatcacaaggtcaggagatcgagaccatcctggctaacacggtgaaaccccatctctactaaaaatacaaaaagtagccgggcgtggtggtggatgcctgcggtcccagctactcaggaggctgaggcaggagaatggcatgaacccgggaggcggagattgcagtgagccgagatcgcgccactgtactccagcctgcgtgacagagcgagactccgtctcagaaaaaaaaaaaaagaacataatatgtgtattgtgtctcatgtacactgttgaagaggtagcagcccatgattgatgaaatagtccagtgatcttatgagatacaagtttgttttcatgttctctctctgacattgtctatgcttagttattgtgttcatgcttattccttcatggtccaagttggctgtcccacctccaggcatcaaaccacattccaaacagcaaccaggaggaaatagtaagctgataggtcatggggaattaggttggaagccattgctttttaatttacagaagtccattctccccaggcacttctttctaagtctcattgatcagaactcaaccacgtggccaccatcagcagaaacatctctctgtagcaccgtgaaacacatgagaacataactggggatgaccgttgttacttgaactattttgaaagatctgacataaaggtcatcgccttgtgcacttcaatgggtgttactgcaaaactcccagggctaggcatggcgacatacacccgaaatctcagctatctgggaggctgaggtgggaggattgcttgagcccacgagtttgaggctgaagtgtgcctgtgaatagctactgcactccagtgcctaggacacatagggagacctcacttttttatggctgcatagtattccatggtaaagaaatgtaccacattttctttatccacttcactgttgatgggcatttatccacttcactgttggtgggaatttaggttgaatccatgtctttgctattgaagtcacactttttaatcaagttatttaactttcctgtgttcatttgtgttatataccagaacatttttatttctatggttttaatgccacctaatatgattatcaatgtgtcattctccataaatcattgtgttatacatgttaaacgattaggtattaagtgtataggtataaatcacttagaataatgactaacacattgtatgaactaaataagtactgattcatctgattcatcaaatttccattattcataccattcattatttattaagtggtgtagtatttgttcttatcaacatttgcttttctgtcctatctaaatattaatgaaacagtggatgtgggctcagtgtgctgtcttgaaataatccaaagtcaaatggcatgcttcactggtttcctttagatgcaataactcatttgactcacacaataaaaatgagtattaagta

SEQ ID NO: 34823 - DNA, 2400 bp, Homo sapiens
  source 1..2400: mol_type = unassigned DNA
gcaagcctgggccgctcctccttccctcaagcagcccgacggccatggaggctgaagagacgatggaatgccttcaggagttccctgaacatcataaaatgatcctcgaccgattgaatgaacagcgagagcaggaccggtttactgacatcaccctaattgtcgacggacaccattttaaggctcacaaggctgttttggctgcttgtagtaagttcttctacaaattctttcaggagtttacccaagaaccattggtggagatagaaggtgttagtaaaatggcctttcgccatttaattgagttcacatatacagcaaaattaatgatacaaggagaagaagaagccaatgatgtatggaaagcagcagagtttctacaaatgctagaagctatcaaagcccttgaagtcaggaacaaagaaaactcagctcccttagaggaaaataccacaggaaaaaatgaggccaaaaaaaggaagattgcagaaacttcaaatgttatcactgagtcattgccatctgcagaatcagaacctgttgaaattgaggtagagattgccgaaggcaccattgaagtggaagatgaaggcatcgaaacattagaggaagtggcttctgccaagcagtccgtaaagtacatacagagcacaggttcctctgatgattctgctctagcactgttggcagatattaccagcaagtaccgtcaaggtgacagaaaagggcagattaaagaagatggctgtccatctgaccccacgagcaaacaggagcacatgaaatcacactccactgagagtttcaagtgtgaaatatgcaataaacgatatcttcgagagagcgcatggaaacagcacctaaattgttaccaccttgaagaaggtggagtcagtaagaagcaaagaactgggaaaaaaattcatgtatgtcagtactgtgagaaacagtttgaccattttggacattttaaagaacatcttcgaaaacatacaggtgaaaaaccttttgaatgtccaaattgtcatgaacgatttgctagaaatagcactctgaaatgtcacctcactgcatgccaaactggagtaggggcaaaaaaaggaaggaagaagctctacgaatgccaggtctgcaacagtgtgtttaacagctgggaccagttcaaagatcacttggtaatacacactggagataaacccaaccattgtactttatgtgatttgtggtttatgcaaggaaatgaattaaggaggcatctcagtgatgctcacaatatttcagagcgtctagtaacggaagaagttctttcagtagaaacacgtgtgcaaactgaacctgtaacatcaatgactattatagaacaagttgggaaggtgcatgtgctaccattgcttcaggttcaggtggattcagcacaagtgactgtggaacaagtccatccagatctgctccaggacagccaggtgcacgattcacacatgagtgagcttccagagcaggtccaagtgagttatctagaagtgggccgaattcagactgaagaaggtactgaagtacatgtagaggagctgcatgttgaacgggtcaatcaaatgccagtggaagtacaaactgaacttctagaagcagatttggaccacgtgaccccagaaatcatgaaccaagaggagagagagtctagccaagcagatgctgctgaggctgccagggaagatcacgaagatgctgaggatttagagaccaagccaacagtggattctgaagcagaaaaggcagagaatgaggacagaacagctctgccagttttagaatgaaattacacatgaatatatttttaaatttacttgttgggtttttgaactgattatgggcagtttgactgtccttaattaagcctaacagacaagtggaccaaagttaagctgtttcctgttgtgctgaactgttgtccgttgaaacacattgattcccctccccctacttattgccacagaggagggatcttttccataactgaaggggagttttgagaagtatatttctggaaacttaaatggattatattcttattatatagttgggtacgaatgtatctattttcattgtggtaaaagttcttccttttctctttcccaggtcatgttcttcctcaaattttttccatattgtaaaatcaaacttaaatcattagaatacaagtttatgtattctaatgcatgttagaaaattgaataatataggaaacacaaggctgcatgatgaaaagtgcattgttactgtgcagttaaattttggcttctggctttctttagtttgaacaaacgttcttgtctaccccagtagtcacagatgccatctttgcaacagaaagagtggtggtggcaaaatttctagaatgtt

SEQ ID NO: 34824 - DNA, 2502 bp, Homo sapiens
  source 1..2502: mol_type = unassigned DNA
gcaagcctgggccgctcctccttccctcaagcagcccgacggccatggaggctgaagagacgatggaatgccttcaggagttccctgaacatcataaaatgatcctcgaccgattgaatgaacagcgagagcaggaccggtttactgacatcaccctaattgtcgacggacaccattttaaggctcacaaggctgttttggctgcttgtagtaagttcttctacaaattctttcaggagtttacccaagaaccattggtggagatagaaggtgttagtaaaatggcctttcgccatttaattgagttcacatatacagcaaaattaatgatacaaggagaagaagaagccaatgatgtatggaaagcagcagagtttctacaaatgctagaagctatcaaagcccttgaagtcaggaacaaagaaaactcagctcccttagaggaaaataccacaggaaaaaatgaggccaaaaaaaggaagattgcagaaacttcaaatgttatcactgagtcattgccatctgcagaatcagaacctgttgaaattgaggtagagattgccgaaggcaccattgaagtggaagatgaaggcatcgaaacattagaggaagtggcttctgccaagcagtccgtaaagtacatacagagcacaggttcctctgatgattctgctctagcactgttggcagatattaccagcaagtaccgtcaaggtgacagaaaagggcagattaaagaagatggctgtccatctgaccccacgagcaaacaggtagaaggtattgaaattgtggaacttcagctgtcacatgtgaaggacttgttccattgtgagaaatgtaaccgttcatttaaattgttttaccattttaaggagcacatgaaatcacactccactgagagtttcaagtgtgaaatatgcaataaacgatatcttcgagagagcgcatggaaacagcacctaaattgttaccaccttgaagaaggtggagtcagtaagaagcaaagaactgggaaaaaaattcatgtatgtcagtactgtgagaaacagtttgaccattttggacattttaaagaacatcttcgaaaacatacaggtgaaaaaccttttgaatgtccaaattgtcatgaacgatttgctagaaatagcactctgaaatgtcacctcactgcatgccaaactggagtaggggcaaaaaaaggaaggaagaagctctacgaatgccaggtctgcaacagtgtgtttaacagctgggaccagttcaaagatcacttggtaatacacactggagataaacccaaccattgtactttatgtgatttgtggtttatgcaaggaaatgaattaaggaggcatctcagtgatgctcacaatatttcagagcgtctagtaacggaagaagttctttcagtagaaacacgtgtgcaaactgaacctgtaacatcaatgactattatagaacaagttgggaaggtgcatgtgctaccattgcttcaggttcaggtggattcagcacaagtgactgtggaacaagtccatccagatctgctccaggacagccaggtgcacgattcacacatgagtgagcttccagagcaggtccaagtgagttatctagaagtgggccgaattcagactgaagaaggtactgaagtacatgtagaggagctgcatgttgaacgggtcaatcaaatgccagtggaagtacaaactgaacttctagaagcagatttggaccacgtgaccccagaaatcatgaaccaagaggagagagagtctagccaagcagatgctgctgaggctgccagggaagatcacgaagatgctgaggatttagagaccaagccaacagtggattctgaagcagaaaaggcagagaatgaggacagaacagctctgccagttttagaatgaaattacacatgaatatatttttaaatttacttgttgggtttttgaactgattatgggcagtttgactgtccttaattaagcctaacagacaagtggaccaaagttaagctgtttcctgttgtgctgaactgttgtccgttgaaacacattgattcccctccccctacttattgccacagaggagggatcttttccataactgaaggggagttttgagaagtatatttctggaaacttaaatggattatattcttattatatagttgggtacgaatgtatctattttcattgtggtaaaagttcttccttttctctttcccaggtcatgttcttcctcaaattttttccatattgtaaaatcaaacttaaatcattagaatacaagtttatgtattctaatgcatgttagaaaattgaataatataggaaacacaaggctgcatgatgaaaagtgcattgttactgtgcagttaaattttggcttctggctttctttagtttgaacaaacgttcttgtctaccccagtagtcacagatgccatctttgcaacagaaagagtggtggtggcaaaatttctagaatgtt

SEQ ID NO: 34825 - DNA, 3125 bp, Homo sapiens
  source 1..3125: mol_type = unassigned DNA
gagaagagggagggcgggggagggagaggcgacccgagagtcgttgtgggtcgcgggccggaccgggtcccggggcggtgggagccccggccgggcagaagggcttggcgggccgttagaggaccgccacggctgtcgagtcccctcccttgttggacttgcgcgccctggcgctcggaacctccggcgctgtgcccaccccgctctagctcgcgtctcccgactccaattagagcagcccgacggccatggaggctgaagagacgatggaatgccttcaggagttccctgaacatcataaaatgatcctcgaccgattgaatgaacagcgagagcaggaccggtttactgacatcaccctaattgtcgacggacaccattttaaggctcacaaggctgttttggctgcttgtagtaagttcttctacaaattctttcaggagtttacccaagaaccattggtggagatagaaggtgttagtaaaatggcctttcgccatttaattgagttcacatatacagcaaaattaatgatacaaggagaagaagaagccaatgatgtatggaaagcagcagagtttctacaaatgctagaagctatcaaagcccttgaagtcaggaacaaagaaaactcagctcccttagaggaaaataccacaggaaaaaatgaggccaaaaaaaggaagattgcagaaacttcaaatgttatcactgagtcattgccatctgcagaatcagaacctgttgaaattgaggtagagattgccgaaggcaccattgaagtggaagatgaaggcatcgaaacattagaggaagtggcttctgccaagcagtccgtaaagtacatacagagcacaggttcctctgatgattctgctctagcactgttggcagatattaccagcaagtaccgtcaaggtgacagaaaagggcagattaaagaagatggctgtccatctgaccccacgagcaaacaggagcacatgaaatcacactccactgagagtttcaagtgtgaaatatgcaataaacgatatcttcgagagagcgcatggaaacagcacctaaattgttaccaccttgaagaaggtggagtcagtaagaagcaaagaactgggaaaaaaattcatgtatgtcagtactgtgagaaacagtttgaccattttggacattttaaagaacatcttcgaaaacatacaggtgaaaaaccttttgaatgtccaaattgtcatgaacgatttgctagaaatagcactctgaaatgtcacctcactgcatgccaaactggagtaggggcaaaaaaaggaaggaagaagctctacgaatgccaggtctgcaacagtgtgtttaacagctgggaccagttcaaagatcacttggtaatacacactggagataaacccaaccattgtactttatgtgatttgtggtttatgcaaggaaatgaattaaggaggcatctcagtgatgctcacaatatttcagagcgtctagtaacggaagaagttctttcagtagaaacacgtgtgcaaactgaacctgtaacatcaatgactattatagaacaagttgggaaggtgcatgtgctaccattgcttcaggttcaggtggattcagcacaagtgactgtggaacaagtccatccagatctgctccaggacagccaggtgcacgattcacacatgagtgagcttccagagcaggtccaagtgagttatctagaagtgggccgaattcagactgaagaaggtactgaagtacatgtagaggagctgcatgttgaacgggtcaatcaaatgccagtggaagtacaaactgaacttctagaagcagatttggaccacgtgaccccagaaatcatgaaccaagaggagagagagtctagccaagcagatgctgctgaggctgccagggaagatcacgaagatgctgaggatttagagaccaagccaacagtggattctgaagcagaaaaggcagagaatgaggacagaacagctctgccagttttagaatgaaattacacatgaatatatttttaaatttacttgttgggtttttgaactgattatgggcagtttgactgtccttaattaagcctaacagacaagtggaccaaagttaagctgtttcctgttgtgctgaactgttgtccgttgaaacacattgattcccctccccctacttattgccacagaggagggatcttttccataactgaaggggagttttgagaagtatatttctggaaacttaaatggattatattcttattatatagttgggtacgaatgtatctattttcattgtggtaaaagttcttccttttctctttcccaggtcatgttcttcctcaaattttttccatattgtaaaatcaaacttaaatcattagaatacaagtttatgtattctaatgcatgttagaaaattgaataatataggaaacacaaggctgcatgatgaaaagtgcattgttactgtgcagttaaattttggcttctggctttctttagtttgaacaaacgttcttgtctaccccagtagtcacagatgccatctttgcaacagaaagagtggtggtggcaaaatttctagaatgttaaaaaaaaaaaaaaatccacacccatgtgccttctcaaaaccaactgaacttctataaagcatctctggttctttcaaagtttgtgttgtaaggagcaatgtagatgatgctataatactttatatttttggttataatgacaaccaccagttctttttcacttaagttaggttgagaaattttatttaatggccactgaagggccattttcaattgggaaaatttatttacatctgtggtaaactttattttgatgaaaagttgcactagtattttaccaccagatgagaaaaagatgagcagcatttaaaaattaatgtatttaaaataaagtacagagaaagacatgtatataattatcaggctttgttttgaatggaatcttttcccccaattcttaatgtaaagatcttgtgctataacttttaaagccatacaaataagagtgctaaactgtggacttaaaagtaggtgtgtaaatatttttaatcagtattacttggaaaataaaatataacaa

SEQ ID NO: 34826 - DNA, 501 bp, Homo sapiens
  source 1..501: mol_type = unassigned DNA
gtgacgcgcaagcctgggccgctcctccttccctcacccgacggccatggaggctgaagagacgatggaatgccttcaggagttccctgaacatcataaaatgatcctcgaccgattgaatgaacagcgagagcaggaccggtttactgacatcaccctaattgtcgacggacaccattttaaggctcacaaggctgttttggctgcttgtagtaagttcttctacaaattctttcaggagtttacccaagaaccattggtggagatagaaggtgttagtaaaatggcctttcgccatttaattgagttcacatatacagcaaaattaatgatacaaggagaagaagaagccaatgatgtatggaaagcagcagagtttctacaaatgctagaagctatcaaagcccttgaagtcaggaacaaagaaaactcagctcccttagaggaaaataccacaggaaaaaatgaggccaaaaaaaggaagattgcagaaacttcaaa

SEQ ID NO: 34827 - DNA, 2063 bp, Homo sapiens
  source 1..2063: mol_type = unassigned DNA
gcggtgacggtgtgcgtcgacagcagcccgacggccatggaggctgaagagacgatggaatgccttcaggagttccctgaacatcataaaatgatcctcgaccgattgaatgaacagcgagagcaggaccggtttactgacatcaccctaattgtcgacggacaccattttaaggctcacaaggctgttttggctgcttgtagtaagttcttctacaaattctttcaggagtttacccaagaaccattggtggagatagaaggtgttagtaaaatggcctttcgccatttaattgagttcacatatacagcaaaattaatgatacaaggagaagaagaagccaatgatgtatggaaagcagcagagtttctacaaatgctagaagctatcaaagcccttgaagtcaggaacaaagaaaactcagctcccttagaggaaaataccacaggaaaaaatgaggccaaaaaaaggaagattgcagaaacttcaaatgttatcactgagtcattgccatctgcagaatcagaacctgttgaaattgaggtagagattgccgaaggcaccattgaagtggaagatgaaggcatcgaaacattagaggaagtggcttctgccaagcagtccgtaaagtacatacagagcacaggttcctctgatgattctgctctagcactgttggcagatattaccagcaagtaccgtcaaggtgacagaaaagggcagattaaagaagatggctgtccatctgaccccacgagcaaacaggtagaaggtattgaaattgtggaacttcagctgtcacatgtgaaggacttgttccattgtgagaaatgtaaccgttcatttaaattgttttaccattttaaggagcacatgaaatcacactccactgagagtttcaagtgtgaaatatgcaataaacgatatcttcgagagagcgcatggaaacagcacctaaattgttaccaccttgaagaaggtggagtcagtaagaagcaaagaactgggaaaaaaattcatgtatgtcagtactgtgagaaacagtttgaccattttggacattttaaagaacatcttcgaaaacatacaggtgaaaaaccttttgaatgtccaaattgtcatgaacgatttgctagaaatagcactctgaaatgtcacctcactgcatgccaaactggagtaggggcaaaaaaaggaaggaagaagctctacgaatgccaggtctgcaacagtgtgtttaacagctgggaccagttcaaagatcacttggtaatacacactggagataaacccaaccattgtactttatgtgatttgtggtttatgcaaggaaatgaattaaggaggcatctcagtgatgctcacaatatttcagagcgtctagtaacggaagaagttctttcagtagaaacacgtgtgcaaactgaacctgtaacatcaatgactattatagaacaagttgggaaggtgcatgtgctaccattgcttcaggttcaggtggattcagcacaagtgactgtggaacaagtccatccagatctgctccaggacagccaggtgcacgattcacacatgagtgagcttccagagcaggtccaagtgagttatctagaagtgggccgaattcagactgaagaaggtactgaagtacatgtagaggagctgcatgttgaacgggtcaatcaaatgccagtggaagtacaaactgaacttctagaagcagatttggaccacgtgaccccagaaatcatgaaccaagaggagagagagtctagccaagcagatgctgctgaggctgccagggaagatcacgaagatgctgaggatttagagaccaagccaacagtggattctgaagcagaaaaggcagagaatgaggacagaacagctctgccagttttagaatgaaattacacatgaatatatttttaaatttacttgttgggtttttgaactgattatgggcagtttgactgtccttaattaagcctaacagacaagtggaccaaagttaagctgtttcctgttgtgctgaactgttgtccgttgaaacacattgattc

SEQ ID NO: 34828 - DNA, 572 bp, Homo sapiens
  source 1..572: mol_type = unassigned DNA
ggccgggcagaagggcttggcgggccgttagaggaccgccacggctgtcgagtcccctcccttgttggacttgcgcgccctggcgctcggaacctccggcgctgtgcccaccccgctctagctcgcgtctcccgactccaattagcccgacggccatggaggctgaagagacgatggaatgccttcaggagttccctgaacatcataaaatgatcctcgaccgattgaatgaacagcgagagcaggaccggtttactgacatcaccctaattgtcgacggacaccattttaaggctcacaaggctgttttggctgcttgtagtaagttcttctacaaattctttcaggagtttacccaagaaccattggtggagatagaaggtgttagtaaaatggcctttcgccatttaattgagttcacatatacagcaaaattaatgatacaaggagaagaagaagccaatgatgtatggaaagcagcagagtttctacaaatgctagaagctatcaaagcccttgaagtcaggaacaaagaaaactcagctcccttagaggaaaataccacaggaaaa

SEQ ID NO: 34829 - DNA, 3340 bp, Homo sapiens
  source 1..3340: mol_type = unassigned DNA
gaagagggagggcgggggagggagaggcgacccgagagtcgttgtgggtcgcgggccggaccgggtcccggggcggtgggagccccggccgggcagaagggcttggcgggccgttagaggaccgccacggctgtcgagtcccctcccttgttggacttgcgcgccctggcgctcggaacctccggcgctgtgcccaccccgctctagctcgcgtctcccgactccaattaggtcaggctcggagtcccgcggccgcggctccggtctcaacgctccggggccgctcggctcgcctttcttccctcgcctttctctcctcttgcttcaccctccccccttcttttcacgttgctggttttttttgttgttgttttatgctttaggggttttgttcctcggctcgagctcatgggtgtacattatcatgctcttcttttgtagagcagcccgacggccatggaggctgaagagacgatggaatgccttcaggagttccctgaacatcataaaatgatcctcgaccgattgaatgaacagcgagagcaggaccggtttactgacatcaccctaattgtcgacggacaccattttaaggctcacaaggctgttttggctgcttgtagtaagttcttctacaaattctttcaggagtttacccaagaaccattggtggagatagaaggtgttagtaaaatggcctttcgccatttaattgagttcacatatacagcaaaattaatgatacaaggagaagaagaagccaatgatgtatggaaagcagcagagtttctacaaatgctagaagctatcaaagcccttgaagtcaggaacaaagaaaactcagctcccttagaggaaaataccacaggaaaaaatgaggccaaaaaaaggaagattgcagaaacttcaaatgttatcactgagtcattgccatctgcagaatcagaacctgttgaaattgaggtagagattgccgaaggcaccattgaagtggaagatgaaggcatcgaaacattagaggaagtggcttctgccaagcagtccgtaaagtacatacagagcacaggttcctctgatgattctgctctagcactgttggcagatattaccagcaagtaccgtcaaggtgacagaaaagggcagattaaagaagatggctgtccatctgaccccacgagcaaacaggagcacatgaaatcacactccactgagagtttcaagtgtgaaatatgcaataaacgatatcttcgagagagcgcatggaaacagcacctaaattgttaccaccttgaagaaggtggagtcagtaagaagcaaagaactgggaaaaaaattcatgtatgtcagtactgtgagaaacagtttgaccattttggacattttaaagaacatcttcgaaaacatacaggtgaaaaaccttttgaatgtccaaattgtcatgaacgatttgctagaaatagcactctgaaatgtcacctcactgcatgccaaactggagtaggggcaaaaaaaggaaggaagaagctctacgaatgccaggtctgcaacagtgtgtttaacagctgggaccagttcaaagatcacttggtaatacacactggagataaacccaaccattgtactttatgtgatttgtggtttatgcaaggaaatgaattaaggaggcatctcagtgatgctcacaatatttcagagcgtctagtaacggaagaagttctttcagtagaaacacgtgtgcaaactgaacctgtaacatcaatgactattatagaacaagttgggaaggtgcatgtgctaccattgcttcaggttcaggtggattcagcacaagtgactgtggaacaagtccatccagatctgctccaggacagccaggtgcacgattcacacatgagtgagcttccagagcaggtccaagtgagttatctagaagtgggccgaattcagactgaagaaggtactgaagtacatgtagaggagctgcatgttgaacgggtcaatcaaatgccagtggaagtacaaactgaacttctagaagcagatttggaccacgtgaccccagaaatcatgaaccaagaggagagagagtctagccaagcagatgctgctgaggctgccagggaagatcacgaagatgctgaggatttagagaccaagccaacagtggattctgaagcagaaaaggcagagaatgaggacagaacagctctgccagttttagaatgaaattacacatgaatatatttttaaatttacttgttgggtttttgaactgattatgggcagtttgactgtccttaattaagcctaacagacaagtggaccaaagttaagctgtttcctgttgtgctgaactgttgtccgttgaaacacattgattcccctccccctacttattgccacagaggagggatcttttccataactgaaggggagttttgagaagtatatttctggaaacttaaatggattatattcttattatatagttgggtacgaatgtatctattttcattgtggtaaaagttcttccttttctctttcccaggtcatgttcttcctcaaattttttccatattgtaaaatcaaacttaaatcattagaatacaagtttatgtattctaatgcatgttagaaaattgaataatataggaaacacaaggctgcatgatgaaaagtgcattgttactgtgcagttaaattttggcttctggctttctttagtttgaacaaacgttcttgtctaccccagtagtcacagatgccatctttgcaacagaaagagtggtggtggcaaaatttctagaatgttaaaaaaaaaaaaaaatccacacccatgtgccttctcaaaaccaactgaacttctataaagcatctctggttctttcaaagtttgtgttgtaaggagcaatgtagatgatgctataatactttatatttttggttataatgacaaccaccagttctttttcacttaagttaggttgagaaattttatttaatggccactgaagggccattttcaattgggaaaatttatttacatctgtggtaaactttattttgatgaaaagttgcactagtattttaccaccagatgagaaaaagatgagcagcatttaaaaattaatgtatttaaaataaagtacagagaaagacatgtatataattatcaggctttgttttgaatggaatcttttcccccaattcttaatgtaaagatcttgtgctataacttttaaagccatacaaataagagtgctaaactgtggacttaaaagtaggtgtgtaaatatttttaatcagtattacttggaaaataaaatataacaaacccata

SEQ ID NO: 34830 - DNA, 1050 bp, Homo sapiens
  source 1..1050: mol_type = unassigned DNA
gaacgtgctcgcgcccgtagctgccgctgccggggccgcggccgcccgggtgcccaaccgaacgcacgtgcgccagcggggcccgagcagaaggggagccccggctctcacgaagaaaatggagggcgacccacgggttaggggtcaggaaaggcgtggggcgcattatgccctgggaggggaaagcacggaacaagaggctctgagggacggagaggaaggagggcgacccacgagctagagcagcccgacggccatggaggctgaagagacgatggaatgccttcaggagttccctgaacatcataaaatgatcctcgaccgattgaatgaacagcgagagcaggaccggtttactgacatcaccctaattgtcgacggacaccattttaaggctcacaaggctgttttggctgcttgtagtaagttcttctacaaattctttcaggagtttacccaagaaccattggtggagatagaaggtgttagtaaaatggcctttcgccatttaattgagttcacatatacagcaaaattaatgatacaaggagaagaagaagccaatgatgtatggaaagcagcagagtttctacaaatgctagaagctatcaaagcccttgaagtcaggaacaaagaaaactcagctcccttagaggaaaataccacaggaaaaaatgaggccaaaaaaaggaagattgcagaaacttcaaatgttatcactgagtcattgccatctgcagaatcagaacctgttgaaattgaggtagagattgccgaaggcaccattgaagtggaagatgaaggcatcgaaacattagaggaagtggcttctgccaagcagtccgtaaagtacatacagagcacaggttcctctgatgattctgctctagcactgttggcagatattaccagcaagtaccgtcaaggtgacagaaaagggcagattaaagaagatggctgtccatctgaccccacgagcaaacaggagcacatgaaatcacactccactgagagtttcaagtgtgaaatatgcaataaacgatatcttcg

SEQ ID NO: 34831 - DNA, 3030 bp, Homo sapiens
  source 1..3030: mol_type = unassigned DNA
gagccaatgaaagctcggaccagtggcaagtccgagctgtcattgagaggcgggacttccggcgccgccattgcggtcctcattttgctgctggtgggttgggctacagcaggcctctggagccacaccagggcacgggagtgggtgcagggaccgtcaccgcgccttcacacgcaccatagtgcccggctaattactctgcttttatgagccaaggtgttcccgaaagtggagccagcgccacgcgtctccagggtctccatacccagccttcgtccctgcggtgcccagaggccttgcgcgcattttgcatttgggaagacaggtcctgagtgcgaccgtcacccagcggaagtgtgagggttcggcccagcggcagggctagccctgggcctcctgttatggccctgcccagcccacaggttctaatggggttgccagcgttgctgatgggcccggcgcagcatacttcttggccctgtggctcagctgtccccacattgaagagcatggtaacctttgaagatgtggctgtatacttctcccaagaggagtgggagctccttgatgcagcccagaggcacctgtaccacagtgtgatgctggaaaaccttgagcttgtgacctcacttggttcttggcatggagtagagggtgagggggcccatcccaagcagaatgtttctgtagaagtgttacaggtcaggatccctaatgcagatccttccaccaagaaagctaactcctgtgacatgtgtgggccattcttgaaagacattttgcacctggctgagcatcagggaacacagtctgaggagaaaccctacacatgtggagcatgtgggagagacttttggttgaatgcaaaccttcaccagcaccagaaggagcacagtggagggaagccctttagatggtacaaggacagggacgcacttatgaagagctctaaagtccacctgtcagagaaccccttcacttgcagggaaggtgggaaggtcatcctgggcagctgtgacctcctccagcttcaagctgttgacagtgggcagaagccatattccaatcttgggcagcttccagaagtctgtaccacacagaaactcttcgagtgcagcaactgtggaaaagccttcctgaagagctccactctccccaaccatctgagaactcactctgaagagataccatttacatgcccaacaggtggaaatttcttagaggagaaatcaatccttggtaataaaaagtttcacactggggaaataccccatgtgtgtaaggagtgtgggaaggcctttagtcactcatctaagctgaggaagcaccagaaatttcacactgaagtaaaatattatgagtgcattgcatgtgggaaaaccttcaaccacaaactcacatttgttcatcatcagagaattcactcaggagaaagaccttatgagtgtgatgaatgtgggaaagccttcagtaacagatcacacctcattcggcatgagaaagttcacactggagaaaggccttttgagtgcctgaaatgtggaagagccttcagccaaagctccaatttccttcggcatcagaaagttcacacacaggtaagaccttatgagtgcagtcaatgtggtaaatccttcagccgaagctctgctctcattcagcactggagagttcacactggagaaagaccgtatgaatgcagtgaatgtggaagagcttttaacaataactccaaccttgctcagcaccagaaagttcacaccggagaacggccttttgagtgcagtgaatgtggaagagacttcagccaaagctcccatctccttcgacatcagaaagttcacactggagaacggccttttgaatgctgtgattgtggtaaagccttcagtaatagctccaccctcatccagcaccagaaagtacatactgggcaaaggccttatgagtgcagcgaatgtaggaaatccttcagccgcagctccagcctgattcagcactggagaattcacactggagaaaagccttacgagtgtagtgagtgtgggaaagcctttgctcacagctccactctcattgaacactggagagttcacacaaaagaaaggccttatgagtgcaatgaatgtgggaaattctttagccaaaactccattctcattaagcatcagaaagttcatactggagaaaagccttataaatgcagtgaatgtgggaaattctttagccgaaaatccagccttatttgtcactggagagttcacactggagaaaggccttacgaatgcagtgaatgtgggagagcctttagcagtaactcccacctggttcgtcatcagagagttcacacacaagaaaggccctatgagtgcatccagtgtggaaaagcctttagtgaaagatctacacttgttcggcaccagaaagttcacaccagagaaaggacttatgagtgtagccagtgtgggaaactcttcagccatctttgtaaccttgcacagcataaaaagattcatacctgagtggagccttatggaagtggtctttgtgagaaaatcttcagccaagtcaaacttcatgcagcagaatccccataccagaaaaattacctacatgtactgctaatgtggaaaagccttcagaagctactctgtttctgaccagcccaggaacctttgcagggccatctcacccatgcagcataaggcagaagccatagtcactttccatcttgcctggatccaaaaatttgcagcagtcctgtcctcatgcatggggaaaacagtaccctgagccttccttcctgtgttctctagggattcaggactgtgctcagctgaaccgatgctggttgaggggccttgagggaaatctaatttgagctcaggaagatgcacattccttgtggatgtggtcaagtctgtgtttaacccctaagatgtgtccattgaggccacaaatcaccctccactggaatcacctaccttgcctgcactaactggtgataataaagaccttattgatcaggtc

SEQ ID NO: 34832 - DNA, 1188 bp, Homo sapiens
  source 1..1188: mol_type = unassigned DNA
cccacattgaagagcatggtaacctttgaagatgtggctgtatacttctcccaagaggagtgggagctccttgatgcagcccagaggcacctgtaccacagtgtgatgctggaaaaccttgagcttgtgacctcacttggtaatgccctgtctcagcatgtgtgtcttttccccatagaaagctctgttcatcccaaagccagatcatgggtactgcttccttctcgggtttcctgttgtaggtgctggggtgctgaggttctgcttggagtagagggtgagggggcccatcccaagcagaatgtttctgtagaagtgttacagcaccagaaggagcacagtggagggaagccctttagatggtacaaggacagcagtgggcagaagccatattccaatcttgggcagcttccagaagtctgtaccacacagaaactcttcgagtgcagcaactgtggaaaagccttcctgaagagctccactctccccaaccatctgagaactcactctgaagagataccatttacatgcccaacaggtggaaatttcttagaggagaaatcaatccttggtaataaaaagtttcacactggggaaataccccatgtgtgtaaggagtgtgggaaggcctttagtcactcatctaagctgaggaagcaccagaaatttcacactgaagtaagaccttatgagtgcagtcaatgtggtaaatccttcagccgaagctctgctctcattcagcactggagaattcacactggagaaaagccttacgagtgtagtgagtgtgggaaagcctttgctcacagctccactctcattgaacactggagagttcacacaaaagaaaggccttatgagtgcaatgaatgtgggaaattctttagccaaaactccattctcattaagcatcagaaagttcatactggagaaaagccttataaatgcagtgaatgtgggaaattctttagccgaaaatccagccttatttgtcactggagagttcacactggagaaaggccttacgaatgcagtgaatgtgggagagcctttagcagtaactcccacctggttcgtcatcagagagttcacacacaagaaaggccctatgagtgcatccagtgtggaaaagcctttagtgaaagatctacacttgttcggcaccagaaagttcacaccagagaaagg

SEQ ID NO: 34833 - DNA, 2242 bp, Homo sapiens
  source 1..2242: mol_type = unassigned DNA
atctaccttctgagatatcatccttcttcagggagataaggaaaaaaagccacagggtcccggagagccaggggaatgttttgtgttacaggcacacatggcattcagggatgtggctgtggatttcacccaggatgagtggaggctgctgagccctgctcaaaggactctgtacagagaggtgatgctggagaactacagcaacctggtctcactgggaatttcattttctaaaccagaactcatcacccagctggagcaagggaaagagacctggagagaggaaaaaaaatgttcaccggcaacctgtccagcagatccagagccagagctctacctcgatcctttctgccctccgggtttctccagtcagaaattccccatgcagcatgtgctgtgtaatcatcccccctggatcttcacatgcttgtgtgcagaaggtaacatccagcctggggatccgggcccaggggaccaggagaagcagcaacaagcctctgaggggagaccctggagtgatcaagcagaaggtcctgagggagaaggtgccatgcctttgtttggaagaaccaagaaaaggactctgggagcgttctccaggccaccccagaggcagccagtcagctctcggaacggcctcagaggggtggagttagaagccagcccagctcagtcagggaaccctgaggaaacagacaaattgttgaagaggatagaagtcttaggatttggaacagtcaactgtggagagtgtggactgagcttcagcaagatgacaaacctgctcagtcaccagcggatacactcaggggagaagccctacgtgtgtggggtatgtgagaagggcttcagcctaaagaagagcctcgccagacaccagaaggcacactcgggggagaagccaattgtgtgcagggagtgtggacgaggctttaaccggaagtcaacgctaatcatacacgaacggacacactccggtgagaaaccttacatgtgcagtgagtgtgggcgaggcttcagccagaagtcaaacctcatcatacaccagaggacacactcaggggaaaagccttacgtgtgccgggaatgtggcaaaggcttcagccagaagtcagctgtcgtgagacaccagaggacacacttggaggagaagaccatcgtgtgcagtgactgtggcctgggcttcagcgacaggtcaaacctcatctcccaccagaggacgcactctggggagaagccctacgcctgcaaggagtgtgggcgatgcttcaggcagaggaccacccttgtcaaccaccagaggacacactcaaaggagaagccctatgtgtgcggggtgtgtgggcacagcttcagccagaattcaaccctcatctctcacaggcggacacacactggggagaagccgtatgtttgtggggtgtgtgggcgaggctttagtctcaagtcacacctcaacagacaccagaacatacactcaggagagaagcccattgtgtgcaaggactgtggccggggcttcagccagcaatccaacctcatcagacaccagaggacgcactcaggcgagaagcccatggtgtgtggggagtgcgggcgaggcttcagccagaagtcaaaccttgttgcacaccagaggacgcactcaggggagaggccgtatgtgtgccgagagtgcgggcgaggctttagccaccaggccggtctcatcaggcacaagcggaagcactcgagggagaagccctacatgtgcaggcagtgtggactgggctttggcaataagtcagctctaattacacacaagcgggctcactcggaagagaagccttgtgtgtgcagagagtgtggccaaggctttctccaaaagtcacacctcaccttacatcaaatgacacatacgggggagaagccatatgtgtgcaagacgtgtgggcggggcttcagcctcaagtctcacctcagcagacacaggaagaccacgtctgtccaccacagactgccagtgcagcccgaccctgagccgtgtgcagggcaaccttcggattccttatactctctctgaaggcaaagatggggacaaggactaagagtcagaatgttgacactttgatgaaatggagtagagaaatgcattctgtaagtggtcaaaggacatttgactgtttactttctccacactaagtcttctccatgttttgtggccttcggttgtaataaacttggcttctttatacatctgtaa

SEQ ID NO: 34834 - DNA, 481 bp, Homo sapiens
  source 1..481: mol_type = unassigned DNA
ggcgctgtgccgaggattcggggtagtgtagtcctggcgccccgctggaggagctccccagctggtggctggagcgaccccttgttctttggtggcgctgatctaccttctgagatatcatccttcttcagggagataaggaaaaaaagccacagggtcccggagagccaggggaatggcacacatggcattcagggatgtggctgtggatttcacccaggatgagtggaggctgctgagccctgctcaaaggactctgtacagagaggtgatgctggagaactacagcaacctggtctcactgggaatttcattttctaaaccagaactcatcacccagctggagcaagggaaagagacctggagagaggaaaaaaaatgttcaccggcaacctgtccagatcatcaagaatatggaaacaactgtgacctacagaaagaagcagatccagagccagagctctacctcgatcctttctgc

SEQ ID NO: 34835 - DNA, 2701 bp, Homo sapiens
  source 1..2701: mol_type = unassigned DNA
cgccgagcatcctgggaggtgtggtccgggcgctgtgccgaggattcggggtagtgtagtcctggcgccccgctggaggagctccccagctggtggctggagcgaccccttgttctttggtggcgctgatctaccttctgagatatcatccttcttcagggagataaggaaaaaaagccacagggtcccggagagccaggggaatgcttcaaaagttctgctgcctgagagtaacgtcacagtaatggaacgggaagattctggaatctgtgtccccacctagacaacgattatactggcaggatctatcaggtgtacctattttggaactctggagtctagttgaaggcctccagttcccagggggaaggaagcatggaggtgtgtcctccatttggaagtagtgctaagaaaattaaaagaataaaactgggcaggggcatgagaataggatgcaaagatgaatttttggactgagtggccaagaagctccatggtgagcactcacagtctaaggctggaagtttaatgaactgttttctacatttcacaggcacacatggcattcagggatgtggctgtggatttcacccaggatgagtggaggctgctgagccctgctcaaaggactctgtacagagaggtgatgctggagaactacagcaacctggtctcactgggaatttcattttctaaaccagaactcatcacccagctggagcaagggaaagagacctggagagaggaaaaaaaatgttcaccggcaacctgtccagatccagagccagagctctacctcgatcctttctgccctccgggtttctccagtcagaaattccccatgcagcatgtgctgtgtaatcatcccccctggatcttcacatgcttgtgtgcagaaggtaacatccagcctggggatccgggcccaggggaccaggagaagcagcaacaagcctctgaggggagaccctggagtgatcaagcagaaggtcctgagggagaaggtgccatgcctttgtttggaagaaccaagaaaaggactctgggagcgttctccaggccaccccagaggcagccagtcagctctcggaacggcctcagaggggtggagttagaagccagcccagctcagtcagggaaccctgaggaaacagacaaattgttgaagaggatagaagtcttaggatttggaacagtcaactgtggagagtgtggactgagcttcagcaagatgacaaacctgctcagtcaccagcggatacactcaggggagaagccctacgtgtgtggggtatgtgagaagggcttcagcctaaagaagagcctcgccagacaccagaaggcacactcgggggagaagccaattgtgtgcagggagtgtggacgaggctttaaccggaagtcaacgctaatcatacacgaacggacacactccggtgagaaaccttacatgtgcagtgagtgtgggcgaggcttcagccagaagtcaaacctcatcatacaccagaggacacactcaggggaaaagccttacgtgtgccgggaatgtggcaaaggcttcagccagaagtcagctgtcgtgagacaccagaggacacacttggaggagaagaccatcgtgtgcagtgactgtggcctgggcttcagcgacaggtcaaacctcatctcccaccagaggacgcactctggggagaagccctacgcctgcaaggagtgtgggcgatgcttcaggcagaggaccacccttgtcaaccaccagaggacacactcaaaggagaagccctatgtgtgcggggtgtgtgggcacagcttcagccagaattcaaccctcatctctcacaggcggacacacactggggagaagccgtatgtttgtggggtgtgtgggcgaggctttagtctcaagtcacacctcaacagacaccagaacatacactcaggagagaagcccattgtgtgcaaggactgtggccggggcttcagccagcaatccaacctcatcagacaccagaggacgcactcaggcgagaagcccatggtgtgtggggagtgcgggcgaggcttcagccagaagtcaaaccttgttgcacaccagaggacgcactcaggggagaggccgtatgtgtgccgagagtgcgggcgaggctttagccaccaggccggtctcatcaggcacaagcggaagcactcgagggagaagccctacatgtgcaggcagtgtggactgggctttggcaataagtcagctctaattacacacaagcgggctcactcggaagagaagccttgtgtgtgcagagagtgtggccaaggctttctccaaaagtcacacctcaccttacatcaaatgacacatacgggggagaagccatatgtgtgcaagacgtgtgggcggggcttcagcctcaagtctcacctcagcagacacaggaagaccacgtctgtccaccacagactgccagtgcagcccgaccctgagccgtgtgcagggcaaccttcggattccttatactctctctgaaggcaaagatggggacaaggactaagagtcagaatgttgacactttgatgaaatggagtagagaaatgcattctgtaagtggtcaaaggacatttgactgtttactttctccacactaagtcttctccatgttttgtggccttcggttgtaataaacttggcttctttatacatctgtaa

SEQ ID NO: 34836 - DNA, 2318 bp, Homo sapiens
  source 1..2318: mol_type = unassigned DNA
gtgccgaggattcggggtagtgtagtcctggcgccccgctggaggagctccccagctggtggctggagcgaccccttgttctttggtggcgctgatctaccttctgagatatcatccttcttcagggagataaggaaaaaaagccacagggtcccggagagccaggggaatggcacacatggcattcagggatgtggctgtggatttcacccaggatgagtggaggctgctgagccctgctcaaaggactctgtacagagaggtgatgctggagaactacagcaacctggtctcactgggaatttcattttctaaaccagaactcatcacccagctggagcaagggaaagagacctggagagaggaaaaaaaatgttcaccggcaacctgtccagcagatccagagccagagctctacctcgatcctttctgccctccgggtttctccagtcagaaattccccatgcagcatgtgctgtgtaatcatcccccctggatcttcacatgcttgtgtgcagaaggtaacatccagcctggggatccgggcccaggggaccaggagaagcagcaacaagcctctgaggggagaccctggagtgatcaagcagaaggtcctgagggagaaggtgccatgcctttgtttggaagaaccaagaaaaggactctgggagcgttctccaggccaccccagaggcagccagtcagctctcggaacggcctcagaggggtggagttagaagccagcccagctcagtcagggaaccctgaggaaacagacaaattgttgaagaggatagaagtcttaggatttggaacagtcaactgtggagagtgtggactgagcttcagcaagatgacaaacctgctcagtcaccagcggatacactcaggggagaagccctacgtgtgtggggtatgtgagaagggcttcagcctaaagaagagcctcgccagacaccagaaggcacactcgggggagaagccaattgtgtgcagggagtgtggacgaggctttaaccggaagtcaacgctaatcatacacgaacggacacactccggtgagaaaccttacatgtgcagtgagtgtgggcgaggcttcagccagaagtcaaacctcatcatacaccagaggacacactcaggggaaaagccttacgtgtgccgggaatgtggcaaaggcttcagccagaagtcagctgtcgtgagacaccagaggacacacttggaggagaagaccatcgtgtgcagtgactgtggcctgggcttcagcgacaggtcaaacctcatctcccaccagaggacgcactctggggagaagccctacgcctgcaaggagtgtgggcgatgcttcaggcagaggaccacccttgtcaaccaccagaggacacactcaaaggagaagccctatgtgtgcggggtgtgtgggcacagcttcagccagaattcaaccctcatctctcacaggcggacacacactggggagaagccgtatgtttgtggggtgtgtgggcgaggctttagtctcaagtcacacctcaacagacaccagaacatacactcaggagagaagcccattgtgtgcaaggactgtggccggggcttcagccagcaatccaacctcatcagacaccagaggacgcactcaggcgagaagcccatggtgtgtggggagtgcgggcgaggcttcagccagaagtcaaaccttgttgcacaccagaggacgcactcaggggagaggccgtatgtgtgccgagagtgcgggcgaggctttagccaccaggccggtctcatcaggcacaagcggaagcactcgagggagaagccctacatgtgcaggcagtgtggactgggctttggcaataagtcagctctaattacacacaagcgggctcactcggaagagaagccttgtgtgtgcagagagtgtggccaaggctttctccaaaagtcacacctcaccttacatcaaatgacacatacgggggagaagccatatgtgtgcaagacgtgtgggcggggcttcagcctcaagtctcacctcagcagacacaggaagaccacgtctgtccaccacagactgccagtgcagcccgaccctgagccgtgtgcagggcaaccttcggattccttatactctctctgaaggcaaagatggggacaaggactaagagtcagaatgttgacactttgatgaaatggagtagagaaatgcattctgtaagtggtcaaaggacatttgactgtttactttctccacactaagtcttctccatgttttgtggccttcggttgtaataaacttggcttctttatacatc

SEQ ID NO: 34837 - DNA, 2397 bp, Homo sapiens
  source 1..2397: mol_type = unassigned DNA
gtagtgtagtcctggcgccccgctggaggagctccccagctggtggctggagcgaccccttgttctttggtggcgctgtgtgtcctccatttggaagtagtgctaagaaaattaaaagaataaaactgggcaggggcatgagaataggatgcaaagatgaatttttggactgagtggccaagaagctccatggtgagcactcacagtctaaggctggaagtttaatgaactgttttctacatttcacaggcacacatggcattcagggatgtggctgtggatttcacccaggatgagtggaggctgctgagccctgctcaaaggactctgtacagagaggtgatgctggagaactacagcaacctggtctcactgggaatttcattttctaaaccagaactcatcacccagctggagcaagggaaagagacctggagagaggaaaaaaaatgttcaccggcaacctgtccagcagatccagagccagagctctacctcgatcctttctgccctccgggtttctccagtcagaaattccccatgcagcatgtgctgtgtaatcatcccccctggatcttcacatgcttgtgtgcagaaggtaacatccagcctggggatccgggcccaggggaccaggagaagcagcaacaagcctctgaggggagaccctggagtgatcaagcagaaggtcctgagggagaaggtgccatgcctttgtttggaagaaccaagaaaaggactctgggagcgttctccaggccaccccagaggcagccagtcagctctcggaacggcctcagaggggtggagttagaagccagcccagctcagtcagggaaccctgaggaaacagacaaattgttgaagaggatagaagtcttaggatttggaacagtcaactgtggagagtgtggactgagcttcagcaagatgacaaacctgctcagtcaccagcggatacactcaggggagaagccctacgtgtgtggggtatgtgagaagggcttcagcctaaagaagagcctcgccagacaccagaaggcacactcgggggagaagccaattgtgtgcagggagtgtggacgaggctttaaccggaagtcaacgctaatcatacacgaacggacacactccggtgagaaaccttacatgtgcagtgagtgtgggcgaggcttcagccagaagtcaaacctcatcatacaccagaggacacactcaggggaaaagccttacgtgtgccgggaatgtggcaaaggcttcagccagaagtcagctgtcgtgagacaccagaggacacacttggaggagaagaccatcgtgtgcagtgactgtggcctgggcttcagcgacaggtcaaacctcatctcccaccagaggacgcactctggggagaagccctacgcctgcaaggagtgtgggcgatgcttcaggcagaggaccacccttgtcaaccaccagaggacacactcaaaggagaagccctatgtgtgcggggtgtgtgggcacagcttcagccagaattcaaccctcatctctcacaggcggacacacactggggagaagccgtatgtttgtggggtgtgtgggcgaggctttagtctcaagtcacacctcaacagacaccagaacatacactcaggagagaagcccattgtgtgcaaggactgtggccggggcttcagccagcaatccaacctcatcagacaccagaggacgcactcaggcgagaagcccatggtgtgtggggagtgcgggcgaggcttcagccagaagtcaaaccttgttgcacaccagaggacgcactcaggggagaggccgtatgtgtgccgagagtgcgggcgaggctttagccaccaggccggtctcatcaggcacaagcggaagcactcgagggagaagccctacatgtgcaggcagtgtggactgggctttggcaataagtcagctctaattacacacaagcgggctcactcggaagagaagccttgtgtgtgcagagagtgtggccaaggctttctccaaaagtcacacctcaccttacatcaaatgacacatacgggggagaagccatatgtgtgcaagacgtgtgggcggggcttcagcctcaagtctcacctcagcagacacaggaagaccacgtctgtccaccacagactgccagtgcagcccgaccctgagccgtgtgcagggcaaccttcggattccttatactctctctgaaggcaaagatggggacaaggactaagagtcagaatgttgacactttgatgaaatggagtagagaaatgcattctgtaagtggtcaaaggacatttgactgtttactttctccacactaagtcttctccatgttttgtggccttcggttgtaataaacttggcttctttatacatctg

SEQ ID NO: 34838 - DNA, 2316 bp, Homo sapiens
  source 1..2316: mol_type = unassigned DNA
attcggggtagtgtagtcctggcgccccgctggaggagctccccagctggtggctggagcgaccccttgttctttggtggcgctgttttgtgttacaggcacacatggcattcagggatgtggctgtggatttcacccaggatgagtggaggctgctgagccctgctcaaaggactctgtacagagaggtgatgctggagaactacagcaacctggtctcactgggaatttcattttctaaaccagaactcatcacccagctggagcaagggaaagagacctggagagaggaaaaaaaatgttcaccggcaacctgtccagaaaaacagcagctcttacaatgatgttgagcacattaaaaagaatgctgtacaatccaaggagcaagtcattgtggttgcccaggaagctgtcttggaaacccaaaatatatgtgtaacgggaggaagactgttctagcagatccagagccagagctctacctcgatcctttctgccctccgggtttctccagtcagaaattccccatgcagcatgtgctgtgtaatcatcccccctggatcttcacatgcttgtgtgcagaaggtaacatccagcctggggatccgggcccaggggaccaggagaagcagcaacaagcctctgaggggagaccctggagtgatcaagcagaaggtcctgagggagaaggtgccatgcctttgtttggaagaaccaagaaaaggactctgggagcgttctccaggccaccccagaggcagccagtcagctctcggaacggcctcagaggggtggagttagaagccagcccagctcagtcagggaaccctgaggaaacagacaaattgttgaagaggatagaagtcttaggatttggaacagtcaactgtggagagtgtggactgagcttcagcaagatgacaaacctgctcagtcaccagcggatacactcaggggagaagccctacgtgtgtggggtatgtgagaagggcttcagcctaaagaagagcctcgccagacaccagaaggcacactcgggggagaagccaattgtgtgcagggagtgtggacgaggctttaaccggaagtcaacgctaatcatacacgaacggacacactccggtgagaaaccttacatgtgcagtgagtgtgggcgaggcttcagccagaagtcaaacctcatcatacaccagaggacacactcaggggaaaagccttacgtgtgccgggaatgtggcaaaggcttcagccagaagtcagctgtcgtgagacaccagaggacacacttggaggagaagaccatcgtgtgcagtgactgtggcctgggcttcagcgacaggtcaaacctcatctcccaccagaggacgcactctggggagaagccctacgcctgcaaggagtgtgggcgatgcttcaggcagaggaccacccttgtcaaccaccagaggacacactcaaaggagaagccctatgtgtgcggggtgtgtgggcacagcttcagccagaattcaaccctcatctctcacaggcggacacacactggggagaagccgtatgtttgtggggtgtgtgggcgaggctttagtctcaagtcacacctcaacagacaccagaacatacactcaggagagaagcccattgtgtgcaaggactgtggccggggcttcagccagcaatccaacctcatcagacaccagaggacgcactcaggcgagaagcccatggtgtgtggggagtgcgggcgaggcttcagccagaagtcaaaccttgttgcacaccagaggacgcactcaggggagaggccgtatgtgtgccgagagtgcgggcgaggctttagccaccaggccggtctcatcaggcacaagcggaagcactcgagggagaagccctacatgtgcaggcagtgtggactgggctttggcaataagtcagctctaattacacacaagcgggctcactcggaagagaagccttgtgtgtgcagagagtgtggccaaggctttctccaaaagtcacacctcaccttacatcaaatgacacatacgggggagaagccatatgtgtgcaagacgtgtgggcggggcttcagcctcaagtctcacctcagcagacacaggaagaccacgtctgtccaccacagactgccagtgcagcccgaccctgagccgtgtgcagggcaaccttcggattccttatactctctctgaaggcaaagatggggacaaggactaagagtcagaatgttgacactttgatgaaatggagtagagaaatgcattctgtaagtggtcaaaggacatttgactgtttactttc

SEQ ID NO: 34839 - DNA, 637 bp, Homo sapiens
  source 1..637: mol_type = unassigned DNA
gatgaatttttggactgagtggccaagaagctccatggtgagcactcacagtctaaggctggaagtttaatgaactgttttctacatttcacaggcacacatggcattcagggatgtggctgtggatttcacccaggatgagtggaggctgctgagccctgctcaaaggactctgtacagagaggtgatgctggagaactacagcaacctggtctcactgggaatttcattttctaaaccagaactcatcacccagctggagcaagggaaagagacctggagagaggaaaaaaaatgttcaccggcaacctgtccagcagatccagagccagagctctacctcgatcctttctgccctccgggtttctccagtcagaaattccccatgcagcatgtgctgtgtaatcatcccccctggatcttcacatgcttgtgtgcagaaggtaacatccagcctggggatccgggcccaggggaccaggagaagcagcaacaagcctctgaggggagaccctggagtgatcaagcagaaggtcctgagggagaaggtgccatgcctttgtttggaagaaccaagaaaaggactctgggagcgttctccaggccaccccagaggcagccagtcagctctcggaac

SEQ ID NO: 34840 - DNA, 523 bp, Homo sapiens
  source 1..523: mol_type = unassigned DNA
agtgtagtcctggcgccccgctggaggagctccccagctggtggctggagcgaccccttgttctttggtggcgctgttttgtgttacaggcacacatggcattcagggatgtggctgtggatttcacccaggatgagtggaggctgctgagccctgctcaaaggactctgtacagagaggtgatgctggagaactacagcaacctggtctcactgggaatttcattttctaaaccagaactcatcacccagctggagcaagggaaagagacctggagagaggaaaaaaaatgttcaccggcaacctgtccagcagatccagagccagagctctacctcgatcctttctgccctccgggtttctccagtcagaaattccccatgcagcatgtgctgtgtaatcatcccccctggatcttcacatgcttgtgtgcagaaggtaacatccagcctggggatccgggcccaggggaccaggagaagcagcaacaagcctctgaggggagaccctggagtgatcaagc

SEQ ID NO: 34841 - DNA, 2064 bp, Homo sapiens
  source 1..2064: mol_type = unassigned DNA
agtcctggcgccccgctggaggagctccccagctggtggctggagcgaccccttgttctttggtggcgctgaactcatcacccagctggagcaagggaaagagacctggagagaggaaaaaaaatgttcaccggcaacctgtccagcagatccagagccagagctctacctcgatcctttctgccctccgggtttctccagtcagaaattccccatgcagcatgtgctgtgtaatcatcccccctggatcttcacatgcttgtgtgcagaaggtaacatccagcctggggatccgggcccaggggaccaggagaagcagcaacaagcctctgaggggagaccctggagtgatcaagcagaaggtcctgagggagaaggtgccatgcctttgtttggaagaaccaagaaaaggactctgggagcgttctccaggccaccccagaggcagccagtcagctctcggaacggcctcagaggggtggagttagaagccagcccagctcagtcagggaaccctgaggaaacagacaaattgttgaagaggatagaagtcttaggatttggaacagtcaactgtggagagtgtggactgagcttcagcaagatgacaaacctgctcagtcaccagcggatacactcaggggagaagccctacgtgtgtggggtatgtgagaagggcttcagcctaaagaagagcctcgccagacaccagaaggcacactcgggggagaagccaattgtgtgcagggagtgtggacgaggctttaaccggaagtcaacgctaatcatacacgaacggacacactccggtgagaaaccttacatgtgcagtgagtgtgggcgaggcttcagccagaagtcaaacctcatcatacaccagaggacacactcaggggaaaagccttacgtgtgccgggaatgtggcaaaggcttcagccagaagtcagctgtcgtgagacaccagaggacacacttggaggagaagaccatcgtgtgcagtgactgtggcctgggcttcagcgacaggtcaaacctcatctcccaccagaggacgcactctggggagaagccctacgcctgcaaggagtgtgggcgatgcttcaggcagaggaccacccttgtcaaccaccagaggacacactcaaaggagaagccctatgtgtgcggggtgtgtgggcacagcttcagccagaattcaaccctcatctctcacaggcggacacacactggggagaagccgtatgtttgtggggtgtgtgggcgaggctttagtctcaagtcacacctcaacagacaccagaacatacactcaggagagaagcccattgtgtgcaaggactgtggccggggcttcagccagcaatccaacctcatcagacaccagaggacgcactcaggcgagaagcccatggtgtgtggggagtgcgggcgaggcttcagccagaagtcaaaccttgttgcacaccagaggacgcactcaggggagaggccgtatgtgtgccgagagtgcgggcgaggctttagccaccaggccggtctcatcaggcacaagcggaagcactcgagggagaagccctacatgtgcaggcagtgtggactgggctttggcaataagtcagctctaattacacacaagcgggctcactcggaagagaagccttgtgtgtgcagagagtgtggccaaggctttctccaaaagtcacacctcaccttacatcaaatgacacatacgggggagaagccatatgtgtgcaagacgtgtgggcggggcttcagcctcaagtctcacctcagcagacacaggaagaccacgtctgtccaccacagactgccagtgcagcccgaccctgagccgtgtgcagggcaaccttcggattccttatactctctctgaaggcaaagatggggacaaggactaagagtcagaatgttgacactttgatgaaatggagtagagaaatgcattctgtaagtggtcaaaggacatttgactgtttactttctccacactaagtcttctccatgttttgtggccttcggttgtaataaacttggcttctttat

SEQ ID NO: 34842 - DNA, 1999 bp, Homo sapiens
  source 1..1999: mol_type = unassigned DNA
agtgtagtcctggcgccccgctggaggagctccccagctggtggctggagcgaccccttgttctttggtggcgctgatccagagccagagctctacctcgatcctttctgccctccgggtttctccagtcagaaattccccatgcagcatgtgctgtgtaatcatcccccctggatcttcacatgcttgtgtgcagaaggtaacatccagcctggggatccgggcccaggggaccaggagaagcagcaacaagcctctgaggggagaccctggagtgatcaagcagaaggtcctgagggagaaggtgccatgcctttgtttggaagaaccaagaaaaggactctgggagcgttctccaggccaccccagaggcagccagtcagctctcggaacggcctcagaggggtggagttagaagccagcccagctcagtcagggaaccctgaggaaacagacaaattgttgaagaggatagaagtcttaggatttggaacagtcaactgtggagagtgtggactgagcttcagcaagatgacaaacctgctcagtcaccagcggatacactcaggggagaagccctacgtgtgtggggtatgtgagaagggcttcagcctaaagaagagcctcgccagacaccagaaggcacactcgggggagaagccaattgtgtgcagggagtgtggacgaggctttaaccggaagtcaacgctaatcatacacgaacggacacactccggtgagaaaccttacatgtgcagtgagtgtgggcgaggcttcagccagaagtcaaacctcatcatacaccagaggacacactcaggggaaaagccttacgtgtgccgggaatgtggcaaaggcttcagccagaagtcagctgtcgtgagacaccagaggacacacttggaggagaagaccatcgtgtgcagtgactgtggcctgggcttcagcgacaggtcaaacctcatctcccaccagaggacgcactctggggagaagccctacgcctgcaaggagtgtgggcgatgcttcaggcagaggaccacccttgtcaaccaccagaggacacactcaaaggagaagccctatgtgtgcggggtgtgtgggcacagcttcagccagaattcaaccctcatctctcacaggcggacacacactggggagaagccgtatgtttgtggggtgtgtgggcgaggctttagtctcaagtcacacctcaacagacaccagaacatacactcaggagagaagcccattgtgtgcaaggactgtggccggggcttcagccagcaatccaacctcatcagacaccagaggacgcactcaggcgagaagcccatggtgtgtggggagtgcgggcgaggcttcagccagaagtcaaaccttgttgcacaccagaggacgcactcaggggagaggccgtatgtgtgccgagagtgcgggcgaggctttagccaccaggccggtctcatcaggcacaagcggaagcactcgagggagaagccctacatgtgcaggcagtgtggactgggctttggcaataagtcagctctaattacacacaagcgggctcactcggaagagaagccttgtgtgtgcagagagtgtggccaaggctttctccaaaagtcacacctcaccttacatcaaatgacacatacgggggagaagccatatgtgtgcaagacgtgtgggcggggcttcagcctcaagtctcacctcagcagacacaggaagaccacgtctgtccaccacagactgccagtgcagcccgaccctgagccgtgtgcagggcaaccttcggattccttatactctctctgaaggcaaagatggggacaaggactaagagtcagaatgttgacactttgatgaaatggagtagagaaatgcattctgtaagtggtcaaaggacatttgactgtttactttctccacactaagtcttctccatgttttgtggccttcggttgtaataaacttggcttctttatacatctgt

SEQ ID NO: 34843 - DNA, 3535 bp, Homo sapiens
  source 1..3535: mol_type = unassigned DNA
gctcttaggtggaaccatcggagcagaagctcggggttgctgggcggttccgaggtgacggaagcgggagggtgcgggagaagtcgctgttcgctctgcggagtggctcgccagcgaagaccccgcctgcgcccccggggacggacgaccgcggtgccagggtcccgcgacctgggaccccctcgcggctccgggtggtctacgaactgtgatggcggcggccgcggtgatgggcccggcgcagatcctctgtggttgttgaattgtaacaagagagagaactctggctgcctgagagggcatgactctagtcacagcaggaggggcttggacaggccctggttgttggcatgaagtgaaggatgaagagtcatcttctgaacagagcatttctatagcagtgtcacatgttaatacttccaaggcaggtttgcccgcacagacggctctcccttgtgacatatgtggccccatcttgaaagatattttgcacctggatgaacaccagggtacacaccatggactgaaacttcacacatgtggggcatgtgggagacaattctggttcagtgcaaaccttcatcagtaccagaagtgttacagtatagagcaacccttaagaagggataaaagtgaggcctcaattgtgaagaactgcacagttagcaaagaacctcatccgtcagagaagccctttacgtgtaaggaggagcagaaaaacttccaggctactttgggtggctgccaacaaaaggccatccacagtaagaggaagacacacaggagcactgagagtggggatgcatttcatggtgaacaaatgcattacaagtgcagtgaatgtgggaaagctttcagccgcaaagacacacttgtccagcaccagagaattcatagtggagagaagccttatgagtgcagcgaatgtgggaaagccttcagccgcaaagctacacttgtccagcatcagagaatccatactggagaaaggccttatgaatgcagcgaatgtggaaaaaccttcagtcgaaaagacaaccttactcagcacaagagaatccacactggagaaatgccttataagtgcaatgaatgtgggaaatattttagccatcactccaatctaattgtacaccagagagttcacaatggagcaaggccttataagtgcagtgattgtgggaaagtcttcagacacaaatctacacttgttcagcatgagagtattcacactggagaaaatccttatgattgcagtgattgtgggaaatcctttggccacaaatacaccctcattaaacatcagcgaattcacactgagtcaaagccgtttgagtgcattgaatgcgggaaattctttagtcgaagttctgactatattgcacaccagagggttcacactggtgaaaggccttttgtgtgcagtaaatgtgggaaagactttatcagaacctcccaccttgttcgacaccaaagagttcacactggagaaaggccatatgagtgcagtgaatgtgggaaggcctacagcttaagctcccacctcaatcggcaccagaaagttcacactgcaggcaggctttaggagtgctttgaatacaacaggactcatcaatcagatgttgaatttcatgtatctgaacattgacacaaaggagataccttatggtgccaggtacgtgggaaccttctagggatatgttgcactttctgacttgctcaggttttttgccagagttatgtcactgtcaatccatgtggccgaaaccatcttaactctaccagctaagataccccagcattggggaaggcagggttttgtattgtccagtccctggagaaaatcatgaaatgcctgagttcattgggggtcctcattcccttctgtatgacaggtataggtatggatatgacccatttttagccaagagggtctgagctgtatctgctggtggcttatacaaaaagtttactttcttcatggatattcttggtctcacatacttgtaatcaagtttttccagcctccaagtcacctggcctgggaaagtacttgcctcatgttgctctggtttgtgataataaaggctttacagtttaagccacatttaatcttggggcttcttcttatggtctggggtggattgaaaacaggctctgccaaactgaagacagcctttgtgcggtgcctccaactttgcctcaaatgggacagtgggttgagggagaacagttcttagtccagttttgatgttaacttccatagctgacaaagcttgttaagtaagaattaagatcttgtgtagacctgatttgtctggattttagagttatttgagagcccatatttcaccttgaggagggtgctgctgctgtgacagcctgcagtgttttgaaacagcatggattgggtgtcttgtttgcagcatgtgtcccatgttccccaacactgttgagggaaagctgttcctcaggacctgctgagtggccatattccctgaaggcctgaatctgtttcacaggccactgttggtaagatctaaagcatccagtagggaaacaaaattgataaatattgagtgtgagtaattgggattggggagattgtggcaaactagaggggaagtgcccattgtaaaaacacatccacagacagtccaggcactaaggctgaatgggatcagggtatccagaaatctcaggatctccagggccatgttactgttaggtcaaggtcactggtgcagcaacgaatgtagtttttctagattcctctccctccctgggctctttacctaatgtctttgcggcacaggcggtaaccctgggagtaaagaggtgtggtccaaggaagtagcttttgtgaccagctggagtttctggtgactcttttggcaatggtcctcattgtttgccagtttttcttactactgaggaagagattgtcttcccaagatatttggagtgataagagtcaccatagtgaggtagagtcactcttagtgatgtccagttgtccagtttccaatagaagtgggagatccagatttttaaatgggataactttttataggttcactgaggtgtaatcaacatgcaatatattgcacatatttaaagtgtacgagttaagtcttgatacacacacacacacacacacacacacacacacacacacttgaaactatcaccctatcagtggtattggacatatctgttacccccaaagttaacctgaggcccttaacctttctctcagtgctcgccttcccccagaatccctaggcaaccactgagtagttttcactgtaggtaaatttgtcttttctagaattttatgtaagtctgcctataaagtgttaattttgcatgctgtctttcatgcaacataatttgaaatttgtccatggtatgtatgaacagtccattttaaaattactgagtcatattctgtatggatataccacagtttatccatttatcttaattgatgtctgtactccacccccatttttaaatattaaaaagctgctgc

SEQ ID NO: 34844 - DNA, 1676 bp, Homo sapiens
  source 1..1676: mol_type = unassigned DNA
atcttgtcggctcttaggtggaaccatcggagcagaagctcggggttgctgggcggttccgaggtgacggaagcgggagggtgcgggagaagtcgctgttcgctctgcggagtggctcgccagcgaagaccccgcctgcgcccccggggacggacgaccgcggtgccagggtcccgcgacctgggaccccctcgcggctccgggtggtctacgaactgtgatggcggcggccgcggtgatgggcccggcgcaggttgttggcatgaagtgaaggatgaagagtcatcttctgaacagagcatttctatagcagtgtcacatgttaatacttccaaggcaggtttgcccgcacagacggctctcccttgtgacatatgtggccccatcttgaaagatattttgcacctggatgaacaccagggtacacaccatggactgaaacttcacacatgtggggcatgtgggagacaattctggttcagtgcaaaccttcatcagtaccagaagtgttacagtatagagcaacccttaagaagggataaaagtgaggcctcaattgtgaagaactgcacagttagcaaagaacctcatccgtcagagaagccctttacgtgtaaggaggagcagaaaaacttccaggctactttgggtggctgccaacaaaaggccatccacagtaagaggaagacacacaggagcactgagagtggggatgcatttcatggtgaacaaatgcattacaagtgcagtgaatgtgggaaagctttcagccgcaaagacacacttgtccagcaccagagaattcatagtggagagaagccttatgagtgcagcgaatgtgggaaagccttcagccgcaaagctacacttgtccagcatcagagaatccatactggagaaaggccttatgaatgcagcgaatgtggaaaaaccttcagtcgaaaagacaaccttactcagcacaagagaatccacactggagaaatgccttataagtgcaatgaatgtgggaaatattttagccatcactccaatctaattgtacaccagagagttcacaatggagcaaggccttataagtgcagtgattgtgggaaagtcttcagacacaaatctacacttgttcagcatgagagtattcacactggagaaaatccttatgattgcagtgattgtgggaaatcctttggccacaaatacaccctcattaaacatcagcgaattcacactgagtcaaagccgtttgagtgcattgaatgcgggaaattctttagtcgaagttctgactatattgcacaccagagggttcacactggtgaaaggccttttgtgtgcagtaaatgtgggaaagactttatcagaacctcccaccttgttcgacaccaaagagttcacactggagaaaggccatatgagtgcagtgaatgtgggaaggcctacagcttaagctcccacctcaatcggcaccagaaagttcacactgcaggcaggctttaggagtgctttgaatacaacaggactcatcaatcagatgttgaatttcatgtatctgaacattgacacaaaggagataccttatggtgccaggtacgtgggaaccttctagggatatgttgcactttctgacttgctcaggttttttgccagagttatgtcactgtcaatccatgtggccg

SEQ ID NO: 34845 - DNA, 1769 bp, Homo sapiens
  source 1..1769: mol_type = unassigned DNA
atcttgtcggctcttaggtggaaccatcggagcagaagctcggggttgctgggcggttccgaggtgacggaagcgggagggtgcgggagaagtcgctgttcgctctgcggagtggctcgccagcgaagaccccgcctgcgcccccggggacggacgaccgcggtgccagggtcccgcgacctgggaccccctcgcggctccgggtggtctacgaactgtgatggcggcggccgcggtgatgggcccggcgcagatcctctgtggttgttgaattgtaacaagagagagaactctggctgcctgagagggcatgactctagtcacagcaggaggggcttggacaggccctggttgttggcatgaagtgaaggatgaagagtcatcttctgaacagagcatttctatagcagtgtcacatgttaatacttccaaggcaggtttgcccgcacagacggctctcccttgtgacatatgtggccccatcttgaaagatattttgcacctggatgaacaccagggtacacaccatggactgaaacttcacacatgtggggcatgtgggagacaattctggttcagtgccttcatcagtaccagaagtgttacagtatagagcaacccttaagaagggataaaagtgaggcctcaattgtgaagaactgcacagttagcaaagaacctcatccgtcagagaagccctttacgtgtaaggaggagcagaaaaacttccaggctactttgggtggctgccaacaaaaggccatccacagtaagaggaagacacacaggagcactgagagtggggatgcatttcatggtgaacaaatgcattacaagtgcagtgaatgtgggaaagctttcagccgcaaagacacacttgtccagcaccagagaattcatagtggagagaagccttatgagtgcagcgaatgtgggaaagccttcagccgcaaagctacacttgtccagcatcagagaatccatactggagaaaggccttatgaatgcagcgaatgtggaaaaaccttcagtcgaaaagacaaccttactcagcacaagagaatccacactggagaaatgccttataagtgcaatgaatgtgggaaatattttagccatcactccaatctaattgtacaccagagagttcacaatggagcaaggccttataagtgcagtgattgtgggaaagtcttcagacacaaatctacacttgttcagcatgagagtattcacactggagaaaatccttatgattgcagtgattgtgggaaatcctttggccacaaatacaccctcattaaacatcagcgaattcacactgagtcaaagccgtttgagtgcattgaatgcgggaaattctttagtcgaagttctgactatattgcacaccagagggttcacactggtgaaaggccttttgtgtgcagtaaatgtgggaaagactttatcagaacctcccaccttgttcgacaccaaagagttcacactggagaaaggccatatgagtgcagtgaatgtgggaaggcctacagcttaagctcccacctcaatcggcaccagaaagttcacactgcaggcaggctttaggagtgctttgaatacaacaggactcatcaatcagatgttgaatttcatgtatctgaacattgacacaaaggagataccttatggtgccaggtacgtgggaaccttctagggatatgttgcactttctgacttgctcaggttttttgccagagttatgtcactgtcaatccatgtggccg

SEQ ID NO: 34846 - DNA, 3025 bp, Homo sapiens
  source 1..3025: mol_type = unassigned DNA
ggagttaggctcgcgccggcgcagtgtcggctgccggtgccgcggcctttgtctcgcagtcaggaggagcagggccagccgttcctgccagaagccagggcatgacccctggggtgcgcgtctccacagacccggagcaagtgacgtttgaggacgtggtagtgggcttcagccaggaggagtgggggcagctgaagcctgcccagaggaccctgtaccgtgatgtaatgctggacaccttcaggcttctggtctctgtgggacattggttaccgaagccgaatgtcatctccctgctggagcaagaggcagagctgtgggcggtggagtctagacttccccaaggcgtgtacccagacttggaaactagacccaaagtcaaactgtcagttctaaagcaaggcatctctgaagaaatatccaacagtgtcatcttggtagaaagattcctgtgggatggtctgtggtactgcaggggtgaggacactgagggccactgggaatggagttgtgagagtctagagagcctggcagtgccggtggccttcacgcctgtgaagacgcctgttctggagcagtggcagaggaatgggtttggggaaaacataagtctgaaccctgatctcccacatcaaccaatgactcctgaaagacaaagcccccacacatggggaacacgtggaaaaagggagaagccagacctaaatgttttacagaaaacctgtgtaaaagagaaaccctacaaatgtcaggaatgcggaaaggcctttagtcacagctcagcacttatcgaacaccaccggacgcacacaggagagagaccttacgaatgtcacgaatgcttaaaaggcttccggaacagctcggcacttaccaaacaccagagaatccatactggggagaaaccctataaatgcactcagtgtgggaggaccttcaaccaaattgccccactgatccagcaccagagaactcacacaggtgagaagccctatgaatgcagcgaatgtgggaaatccttcagttttaggtcctccttcagccagcacgagcgaactcacacaggcgagaagccctacgagtgcagtgagtgtgggaaagccttccggcaaagcatccacctcacccagcatctgcgaatccacactggggagaaaccctatcagtgtggtgagtgtggcaaggccttcagccacagctcatccttgaccaaacaccagcgaatccacacaggggagaagccctacgagtgccatgagtgtggaaaagccttcacccagatcacaccactgattcagcaccagaggacccacacaggagaaaagccctatgagtgtggtgagtgtgggaaagccttcagtcagagcacactcctgaccgagcatcggaggattcacacaggagagaagccctatggatgcaacgagtgtgggaaaaccttcagccacagctcctcactcagccagcatgagcggacacacacaggagagaagccctatgagtgcagtcagtgtgggaaggccttccggcagagcacacacctcacccaacaccagcgaatccacacaggggagaagccctatgaatgcaatgactgcggcaaggcattcagtcacagctcgtccctcaccaaacatcagcgaatccacactggggagaagccctacgaatgcaaccagtgtggcagagccttcagccagcttgctcccctcattcagcatcagaggatccacacaggagagaaaccctatgaatgtaaccagtgtggcagagccttcagccagagctcccttctcatcgaacaccagaggattcacaccaaggaaaagccgtatgggtgcaatgagtgtgggaaatccttcagccacagctcctcgctcagccagcacgaaaggacgcacactggggaaaagccctatgagtgtcacgattgcggaaagtcctttaggcagagcacccacctcactcagcaccggaggatccacacaggagagaagccatatgcatgcagggactgtggaaaggcctttacccacagctcctcccttaccaagcaccagagaactcacactggataaacccactccacatgtgctggggacataggaagaccttaagccatagctcatccctttctagatttgacccaatcatacacatgagaaacgtacattcatacacaagccttttcacacagcactcccctcagacaccctcagagagttcacactgatgggaaatgaccatgggaccaccaagctctaggtcatccatctctgcatccaaatagtagggaaacgtggagataatcaacactcaggaccttcagccttgaacgcccattagtgctatgttatagaacctacaaaaaagaaatggaacaaatgtagtggatccagggaacgcttttgtccaaggattcaccgtattccaaaccagagatgttcaaattggtgagaaacccaacaaatgcctttcatatatacgagaaccaaatgaagtcagaatttgccattattgcacatcacatttttgggggggaaagtgcttatgaatggtgcaggttgactctgatattcattcccaaatgacagtatggcagagtgttccagaaatgagagtggcatctttatggaatcactgtggatactgactgtctcagtaaacagctgtcttgtctgtgtgtatattgtttgatcagggtacatggcagccagtcacagattggaattacatatgacaaagtatcagtgtactataaacaggtttttagttatccctgcattatttttgcaattaatctttatatgcaatgagattgaaaagctttgtatgggaagactcaaaatgtaaagctgcttccgtagagtctcactgattctgagatggcttttgctgctctgttctccctctacatttctctgcagaactcgcgttagaaacacagatatttgttttacaaaaagggagatttttcctttgttaaaccatcgtcttataagcaatagcaaattcatgttagaaa

SEQ ID NO: 34847 - DNA, 2453 bp, Homo sapiens
  source 1..2453: mol_type = unassigned DNA
gaaatggagttaggctcgcgccggcgcagtgtcggctgccggtgccgcggcctttgtctcgcagtcaggagggagcaagtgacgtttgaggacgtggtagtgggcttcagccaggaggagtgggggcagctgaagcctgcccagaggaccctgtaccgtgatgtaatgctggacaccttcaggcttctggtctctgtgggacattggttaccgaagccgaatgtcatctccctgctggagcaagaggcagagctgtgggcggtggagtctagacttccccaaggcgtgtacccagacttggaaactagacccaaagtcaaactgtcagttctaaagcaaggcatctctgaagaaatatccaacagtgtcatcttggtagaaagattcctgtgggatggtctgtggtactgcaggggtgaggacactgagggccactgggaatggagttgtgagagtctagagagcctggcagtgccggtggccttcacgcctgtgaagacgcctgttctggagcagtggcagaggaatgggtttggggaaaacataagtctgaaccctgatctcccacatcaaccaatgactcctgaaagacaaagcccccacacatggggaacacgtggaaaaagggagaagccagacctaaatgttttacagaaaacctgtgtaaaagagaaaccctacaaatgtcaggaatgcggaaaggcctttagtcacagctcagcacttatcgaacaccaccggacgcacacaggagagagaccttacgaatgtcacgaatgcttaaaaggcttccggaacagctcggcacttaccaaacaccagagaatccatactggggagaaaccctataaatgcactcagtgtgggaggaccttcaaccaaattgccccactgatccagcaccagagaactcacacaggtgagaagccctatgaatgcagcgaatgtgggaaatccttcagttttaggtcctccttcagccagcacgagcgaactcacacaggcgagaagccctacgagtgcagtgagtgtgggaaagccttccggcaaagcatccacctcacccagcatctgcgaatccacactggggagaaaccctatcagtgtggtgagtgtggcaaggcctttacccacagctcctcccttaccaagcaccagagaactcacactggataaacccactccacatgtgctggggacataggaagaccttaagccatagctcatccctttctagatttgacccaatcatacacatgagaaacgtacattcatacacaagccttttcacacagcactcccctcagacaccctcagagagttcacactgatgggaaatgaccatgggaccaccaagctctaggtcatccatctctgcatccaaatagtagggaaacgtggagataatcaacactcaggaccttcagccttgaacgcccattagtgctatgttatagaacctacaaaaaagaaatggaacaaatgtagtggatccagggaacgcttttgtccaaggattcaccgtattccaaaccagagatgttcaaattggtgagaaacccaacaaatgcctttcatatatacgagaaccaaatgaagtcagaatttgccattattgcacatcacatttttgggggggaaagtgcttatgaatggtgcaggttgactctgatattcattcccaaatgacagtatggcagagtgttccagaaatgagagtggcatctttatggaatcactgtggatactgactgtctcagtaaacagctgtcttgtctgtgtgtatattgtttgatcagggtacatggcagccagtcacagattggaattacatatgacaaagtatcagtgtactataaacaggtttttagttatccctgcattatttttgcaattaatctttatatgcaatgagattgaaaagctttgtatgggaagactcaaaatgtaaagctgcttccgtagagtctcactgattctgagatggcttttgctgctctgttctccctctacatttctctgcagaactcgcgttagaaacacagatatttgttttacaaaaagggagatttttcctttgttaaaccatcgtcttataagcaatagcaaattcatgttagaaacttctgttttgcaagattcatcttttttgggatatgttcaagttaatcctctcaaactgctttttcattgttttcatacaatttaacattttgttaaaccctaagtccacaaatagcagtctttctgacaactataacctttaaatggtgacttgctgccctcattagaaattgcattggctggccaggcgcggtgacttatgcctgtaatcccagcactttgggaggccaaggtgggaggatcacctgaggtcgggagatggaggttgcagtgagctgagatcgtaccattgcactccagcctgggcaacaagagtgaaactctgtctc

SEQ ID NO: 34848 - DNA, 3329 bp, Homo sapiens
  source 1..3329: mol_type = unassigned DNA
gaaatggagttaggctcgcgccggcgcagtgtcggctgccggtgccgcggcctttgtctcgcagtcaggagggagcaagtgacgtttgaggacgtggtagtgggcttcagccaggaggagtgggggcagctgaagcctgcccagaggaccctgtaccgtgatgtaatgctggacaccttcaggcttctggtctctgtgggacattggttaccgaagccgaatgtcatctccctgctggagcaagaggcagagctgtgggcggtggagtctagacttccccaaggcgtgtacccagagattaagggacatttccagtttttgcttctttcagacttggaaactagacccaaagtcaaactgtcagttctaaagcaaggcatctctgaagaaatatccaacagtgtcatcttggtagaaagattcctgtgggatggtctgtggtactgcaggggtgaggacactgagggccactgggaatggagttgtgagagtctagagagcctggcagtgccggtggccttcacgcctgtgaagacgcctgttctggagcagtggcagaggaatgggtttggggaaaacataagtctgaaccctgatctcccacatcaaccaatgactcctgaaagacaaagcccccacacatggggaacacgtggaaaaagggagaagccagacctaaatgttttacagaaaacctgtgtaaaagagaaaccctacaaatgtcaggaatgcggaaaggcctttagtcacagctcagcacttatcgaacaccaccggacgcacacaggagagagaccttacgaatgtcacgaatgcttaaaaggcttccggaacagctcggcacttaccaaacaccagagaatccatactggggagaaaccctataaatgcactcagtgtgggaggaccttcaaccaaattgccccactgatccagcaccagagaactcacacaggtgagaagccctatgaatgcagcgaatgtgggaaatccttcagttttaggtcctccttcagccagcacgagcgaactcacacaggcgagaagccctacgagtgcagtgagtgtgggaaagccttccggcaaagcatccacctcacccagcatctgcgaatccacactggggagaaaccctatcagtgtggtgagtgtggcaaggccttcagccacagctcatccttgaccaaacaccagcgaatccacacaggggagaagccctacgagtgccatgagtgtggaaaagccttcacccagatcacaccactgattcagcaccagaggacccacacaggagaaaagccctatgagtgtggtgagtgtgggaaagccttcagtcagagcacactcctgaccgagcatcggaggattcacacaggagagaagccctatggatgcaacgagtgtgggaaaaccttcagccacagctcctcactcagccagcatgagcggacacacacaggagagaagccctatgagtgcagtcagtgtgggaaggccttccggcagagcacacacctcacccaacaccagcgaatccacacaggggagaagccctatgaatgcaatgactgcggcaaggcattcagtcacagctcgtccctcaccaaacatcagcgaatccacactggggagaagccctacgaatgcaaccagtgtggcagagccttcagccagcttgctcccctcattcagcatcagaggatccacacaggagagaaaccctatgaatgtaaccagtgtggcagagccttcagccagagctcccttctcatcgaacaccagaggattcacaccaaggaaaagccgtatgggtgcaatgagtgtgggaaatccttcagccacagctcctcgctcagccagcacgaaaggacgcacactggggaaaagccctatgagtgtcacgattgcggaaagtcctttaggcagagcacccacctcactcagcaccggaggatccacacaggagagaagccatatgcatgcagggactgtggaaaggcctttacccacagctcctcccttaccaagcaccagagaactcacactggataaacccactccacatgtgctggggacataggaagaccttaagccatagctcatccctttctagatttgacccaatcatacacatgagaaacgtacattcatacacaagccttttcacacagcactcccctcagacaccctcagagagttcacactgatgggaaatgaccatgggaccaccaagctctaggtcatccatctctgcatccaaatagtagggaaacgtggagataatcaacactcaggaccttcagccttgaacgcccattagtgctatgttatagaacctacaaaaaagaaatggaacaaatgtagtggatccagggaacgcttttgtccaaggattcaccgtattccaaaccagagatgttcaaattggtgagaaacccaacaaatgcctttcatatatacgagaaccaaatgaagtcagaatttgccattattgcacatcacatttttgggggggaaagtgcttatgaatggtgcaggttgactctgatattcattcccaaatgacagtatggcagagtgttccagaaatgagagtggcatctttatggaatcactgtggatactgactgtctcagtaaacagctgtcttgtctgtgtgtatattgtttgatcagggtacatggcagccagtcacagattggaattacatatgacaaagtatcagtgtactataaacaggtttttagttatccctgcattatttttgcaattaatctttatatgcaatgagattgaaaagctttgtatgggaagactcaaaatgtaaagctgcttccgtagagtctcactgattctgagatggcttttgctgctctgttctccctctacatttctctgcagaactcgcgttagaaacacagatatttgttttacaaaaagggagatttttcctttgttaaaccatcgtcttataagcaatagcaaattcatgttagaaacttctgttttgcaagattcatcttttttgggatatgttcaagttaatcctctcaaactgctttttcattgttttcatacaatttaacattttgttaaaccctaagtccacaaatagcagtctttctgacaactataacctttaaatggtgacttgctgccctcattagaaattgcattggctggccaggcgcggtgacttatgcctgtaatcccagcactttgggaggccaaggtgggaggatcacctgaggtcgggagatggaggttgcagtgagctgagatcgtaccattgcactccagcctgggcaacaagagtgaaactctgtctc

SEQ ID NO: 34849 - DNA, 2078 bp, Homo sapiens
  source 1..2078: mol_type = unassigned DNA
gaaatggagttaggctcgcgccggcgcagtgtcggctgccggtgccgcggcctttgtctcgcagtcaggaggggccagccgttcctgccagaagccagggcatgacccctggggtgcgcgtctccacagacccggagcaagtgacgtttgaggacgtggtagtgggcttcagccaggaggagtgggggcagctgaagcctgcccagaggaccctgtaccgtgatgtaatgctggacaccttcaggcttctggtctctgtgggacattggttaccgaagccgaatgtcatctccctgctggagcaagaggcagagctgtgggcggtggagtctagacttccccaaggcgtgtacccagacttggaaactagacccaaagtcaaactgtcagttctaaagcaaggcatctctgaagaaatatccaacagtgtcatcttggtagaaagattcctgtgggatggtctgtggtactgcaggggtgaggacactgagggccactgggaatggagttgtgagagtctagagagcctggcagtgccggtggccttcacgcctgtgaagacgcctgttctggagcagtggcagaggaatgggtttggggaaaacataagtctgaaccctgatctcccacatcaaccaatgactcctgaaagacaaagcccccacacatggggaacacgtggaaaaagggagaagccagacctaaatgttttacagaaaacctgtgtaaaagagaaaccctacaaatgtcaggaatgcggaaaggcctttagtcacagctcagcacttatcgaacaccaccggacgcacacaggagagagaccttacgaatgtcacgaatgcttaaaaggcttccggaacagctcggcacttaccaaacaccagagaatccatactggggagaaaccctataaatgcactcagtgtgggaggaccttcaaccaaattgccccactgatccagcaccagagaactcacacaggtgagaagccctatgaatgcagcgaatgtgggaaatccttcagttttaggtcctccttcagccagcacgagcgaactcacacaggcgagaagccctacgagtgcagtgagtgtgggaaagccttccggcaaagcatccacctcacccagcatctgcgaatccacactggggagaaaccctatcagtgtggtgagtgtggcaaggccttcagccacagctcatccttgaccaaacaccagcgaatccacacaggggagaagccctacgagtgccatgagtgtggaaaagccttcacccagatcacaccactgattcagcaccagaggacccacacaggagaaaagccctatgagtgtggtgagtgtgggaaagccttcagtcagagcacactcctgaccgagcatcggaggattcacacaggagagaagccctatggatgcaacgagtgtgggaaaaccttcagccacagctcctcactcagccagcatgagcggacacacacaggagagaagccctatgagtgcagtcagtgtgggaaggccttccggcagagcacacacctcacccaacaccagcgaatccacacaggggagaagccctatgaatgcaatgactgcggcaaggcattcagtcacagctcgtccctcaccaaacatcagcgaatccacactggggagaagccctacgaatgcaaccagtgtggcagagccttcagccagcttgctcccctcattcagcatcagaggatccacacaggagagaaaccctatgaatgtaaccagtgtggcagagccttcagccagagctcccttctcatcgaacaccagaggattcacaccaaggaaaagccgtatgggtgcaatgagtgtgggaaatccttcagccacagctcctcgctcagccagcacgaaaggacgcacactggggaaaagccctatgagtgtcacgattgcggaaagtcctttaggcagagcacccacctcactcagcaccggaggatccacacaggagagaagccatatgcatgcagggactgtggaaaggcctttacccacagctcctcccttaccaagcaccagagaactcacactggataa

SEQ ID NO: 34850 - DNA, 3349 bp, Homo sapiens
  source 1..3349: mol_type = unassigned DNA
gtgccgcggcctttgtctcgcagtcaggaggagcagggccagccgttcctgccagaagccagggcatgacccctggggtgcgcgtctccacagacccggtgagaatctcggcctccttgcgcgtgtcctccacctcgtgcccggcctcctcgcgcgcggccttctcacgcccggcctcctctttgcaccccgtccctactcgcgctcagcctcctccttgtgcccggcccctacttgcgtgcccggcccctactcgtgcccggcctctactcgcacaactggcctctactcgcgcacctggcctctactggtgcccggcctctactcgtgcccggcctctatttgcacatctagcctctactcgtgtccggcctctacctgcacacccggcctcctaaagtccgcgccaagctccccaaccacagcctgcctctgaaaggaccgcccacgccgcgctggaggagcaagtgacgtttgaggacgtggtagtgggcttcagccaggaggagtgggggcagctgaagcctgcccagaggaccctgtaccgtgatgtaatgctggacaccttcaggcttctggtctctgtgggacattggttaccgaagccgaatgtcatctccctgctggagcaagaggcagagctgtgggcggtggagtctagacttccccaaggcgtgtacccagacttggaaactagacccaaagtcaaactgtcagttctaaagcaaggcatctctgaagaaatatccaacagtgtcatcttggtagaaagattcctgtgggatggtctgtggtactgcaggggtgaggacactgagggccactgggaatggagttgtgagagtctagagagcctggcagtgccggtggccttcacgcctgtgaagacgcctgttctggagcagtggcagaggaatgggtttggggaaaacataagtctgaaccctgatctcccacatcaaccaatgactcctgaaagacaaagcccccacacatggggaacacgtggaaaaagggagaagccagacctaaatgttttacagaaaacctgtgtaaaagagaaaccctacaaatgtcaggaatgcggaaaggcctttagtcacagctcagcacttatcgaacaccaccggacgcacacaggagagagaccttacgaatgtcacgaatgcttaaaaggcttccggaacagctcggcacttaccaaacaccagagaatccatactggggagaaaccctataaatgcactcagtgtgggaggaccttcaaccaaattgccccactgatccagcaccagagaactcacacaggtgagaagccctatgaatgcagcgaatgtgggaaatccttcagttttaggtcctccttcagccagcacgagcgaactcacacaggcgagaagccctacgagtgcagtgagtgtgggaaagccttccggcaaagcatccacctcacccagcatctgcgaatccacactggggagaaaccctatcagtgtggtgagtgtggcaaggccttcagccacagctcatccttgaccaaacaccagcgaatccacacaggggagaagccctacgagtgccatgagtgtggaaaagccttcacccagatcacaccactgattcagcaccagaggacccacacaggagaaaagccctatgagtgtggtgagtgtgggaaagccttcagtcagagcacactcctgaccgagcatcggaggattcacacaggagagaagccctatggatgcaacgagtgtgggaaaaccttcagccacagctcctcactcagccagcatgagcggacacacacaggagagaagccctatgagtgcagtcagtgtgggaaggccttccggcagagcacacacctcacccaacaccagcgaatccacacaggggagaagccctatgaatgcaatgactgcggcaaggcattcagtcacagctcgtccctcaccaaacatcagcgaatccacactggggagaagccctacgaatgcaaccagtgtggcagagccttcagccagcttgctcccctcattcagcatcagaggatccacacaggagagaaaccctatgaatgtaaccagtgtggcagagccttcagccagagctcccttctcatcgaacaccagaggattcacaccaaggaaaagccgtatgggtgcaatgagtgtgggaaatccttcagccacagctcctcgctcagccagcacgaaaggacgcacactggggaaaagccctatgagtgtcacgattgcggaaagtcctttaggcagagcacccacctcactcagcaccggaggatccacacaggagagaagccatatgcatgcagggactgtggaaaggcctttacccacagctcctcccttaccaagcaccagagaactcacactggataaacccactccacatgtgctggggacataggaagaccttaagccatagctcatccctttctagatttgacccaatcatacacatgagaaacgtacattcatacacaagccttttcacacagcactcccctcagacaccctcagagagttcacactgatgggaaatgaccatgggaccaccaagctctaggtcatccatctctgcatccaaatagtagggaaacgtggagataatcaacactcaggaccttcagccttgaacgcccattagtgctatgttatagaacctacaaaaaagaaatggaacaaatgtagtggatccagggaacgcttttgtccaaggattcaccgtattccaaaccagagatgttcaaattggtgagaaacccaacaaatgcctttcatatatacgagaaccaaatgaagtcagaatttgccattattgcacatcacatttttgggggggaaagtgcttatgaatggtgcaggttgactctgatattcattcccaaatgacagtatggcagagtgttccagaaatgagagtggcatctttatggaatcactgtggatactgactgtctcagtaaacagctgtcttgtctgtgtgtatattgtttgatcagggtacatggcagccagtcacagattggaattacatatgacaaagtatcagtgtactataaacaggtttttagttatccctgcattatttttgcaattaatctttatatgcaatgagattgaaaagctttgtatgggaagactcaaaatgtaaagctgcttccgtagagtctcactgattctgagatggcttttgctgctctgttctccctctacatttctctgcagaactcgcgttagaaacacagatatttgttttacaaaaagggagatttttcctttgttaaaccatcgtcttataagcaatagcaaattcatgttag

SEQ ID NO: 34851 - DNA, 2253 bp, Homo sapiens
  source 1..2253: mol_type = unassigned DNA
gtcggctgccggtgccgcggcctttgtctcgcagtcaggaggggccagccgttcctgccagaagccagggcatgacccctggggtgcgcgtctccacagacccggagcaagtgacgtttgaggacgtggtagtgggcttcagccaggaggagtgggggcagctgaagcctgcccagaggaccctgtaccgtgatgtaatgctggacaccttcaggcttctggtctctgtgggacattggttaccgaagccgaatgtcatctccctgctggagcaagaggcagagctgtgggcggtggagtctagacttccccaaggcgtgtacccagagattaagggacatttccagtttttgcttctttcagacttggaaactagacccaaagtcaaactgtcagttctaaagcaaggcatctctgaagaaatatccaacagtgtcatcttggtagaaagattcctgtgggatggtctgtggtactgcaggggtgaggacactgagggccactgggaatggagttgtgagagtctagagagcctggcagtgccggtggccttcacgcctgtgaagacgcctgttctggagcagtggcagaggaatgggtttggggaaaacataagtctgaaccctgatctcccacatcaaccaatgactcctgaaagacaaagcccccacacatggggaacacgtggaaaaagggagaagccagacctaaatgttttacagaaaacctgtgtaaaagagaaaccctacaaatgtcaggaatgcggaaaggcctttagtcacagctcagcacttatcgaacaccaccggacgcacacaggagagagaccttacgaatgtcacgaatgcttaaaaggcttccggaacagctcggcacttaccaaacaccagagaatccatactggggagaaaccctataaatgcactcagtgtgggaggaccttcaaccaaattgccccactgatccagcaccagagaactcacacaggtgagaagccctatgaatgcagcgaatgtgggaaatccttcagttttaggtcctccttcagccagcacgagcgaactcacacaggcgagaagccctacgagtgcagtgagtgtgggaaagccttccggcaaagcatccacctcacccagcatctgcgaatccacactggggagaaaccctatcagtgtggtgagtgtggcaaggccttcagccacagctcatccttgaccaaacaccagcgaatccacacaggggagaagccctacgagtgccatgagtgtggaaaagccttcacccagatcacaccactgattcagcaccagaggacccacacaggagaaaagccctatgagtgtggtgagtgtgggaaagccttcagtcagagcacactcctgaccgagcatcggaggattcacacaggagagaagccctatggatgcaacgagtgtgggaaaaccttcagccacagctcctcactcagccagcatgagcggacacacacaggagagaagccctatgagtgcagtcagtgtgggaaggccttccggcagagcacacacctcacccaacaccagcgaatccacacaggggagaagccctatgaatgcaatgactgcggcaaggcattcagtcacagctcgtccctcaccaaacatcagcgaatccacactggggagaagccctacgaatgcaaccagtgtggcagagccttcagccagcttgctcccctcattcagcatcagaggatccacacaggagagaaaccctatgaatgtaaccagtgtggcagagccttcagccagagctcccttctcatcgaacaccagaggattcacaccaaggaaaagccgtatgggtgcaatgagtgtgggaaatccttcagccacagctcctcgctcagccagcacgaaaggacgcacactggggaaaagccctatgagtgtcacgattgcggaaagtcctttaggcagagcacccacctcactcagcaccggaggatccacacaggagagaagccatatgcatgcagggactgtggaaaggcctttacccacagctcctcccttaccaagcaccagagaactcacactggataaacccactccacatgtgctggggacataggaagaccttaagccatagctcatccctttctagatttgacccaatcatacacatgagaaacgtacattcatacacaagccttttcacacagcactcccctcagacaccctcagagagttcacactgatgggaaatgaccat

SEQ ID NO: 34852 - DNA, 3324 bp, Homo sapiens
  source 1..3324: mol_type = unassigned DNA
ggcgcagtgtcggctgccggtgccgcggcctttgtctcgcagtcaggagggagcaagtgacgtttgaggacgtggtagtgggcttcagccaggaggagtgggggcagctgaagcctgcccagaggaccctgtaccgtgatgtaatgctggacaccttcaggcttctggtctctgtgggacattggttaccgaagccgaatgtcatctccctgctggagcaagaggcagagctgtgggcggtggagtctagacttccccaaggcgtgtacccagagattaagggacatttccagtttttgcttctttcagacttggaaactagacccaaagtcaaactgtcagttctaaagcaaggcatctctgaagaaatatccaacagtgtcatcttggtagaaagattcctgtgggatggtctgtggtactgcaggggtgaggacactgagggccactgggaatggagttgtgagagtctagagagcctggcagtgccggtggccttcacgcctgtgaagacgcctgttctggagcagtggcagaggaatgggtttggggaaaacataagtctgaaccctgatctcccacatcaaccaatgactcctgaaagacaaagcccccacacatggggaacacgtggaaaaagggagaagccagacctaaatgttttacagaaaacctgtgtaaaagagaaaccctacaaatgtcaggaatgcggaaaggcctttagtcacagctcagcacttatcgaacaccaccggacgcacacaggagagagaccttacgaatgtcacgaatgcttaaaaggcttccggaacagctcggcacttaccaaacaccagagaatccatactggggagaaaccctataaatgcactcagtgtgggaggaccttcaaccaaattgccccactgatccagcaccagagaactcacacaggtgagaagccctatgaatgcagcgaatgtgggaaatccttcagttttaggtcctccttcagccagcacgagcgaactcacacaggcgagaagccctacgagtgcagtgagtgtgggaaagccttccggcaaagcatccacctcacccagcatctgcgaatccacactggggagaaaccctatcagtgtggtgagtgtggcaaggccttcagccacagctcatccttgaccaaacaccagcgaatccacacaggggagaagccctacgagtgccatgagtgtggaaaagccttcacccagatcacaccactgattcagcaccagaggacccacacaggagaaaagccctatgagtgtggtgagtgtgggaaagccttcagtcagagcacactcctgaccgagcatcggaggattcacacaggagagaagccctatggatgcaacgagtgtgggaaaaccttcagccacagctcctcactcagccagcatgagcggacacacacaggagagaagccctatgagtgcagtcagtgtgggaaggccttccggcagagcacacacctcacccaacaccagcgaatccacacaggggagaagccctatgaatgcaatgactgcggcaaggcattcagtcacagctcgtccctcaccaaacatcagcgaatccacactggggagaagccctacgaatgcaaccagtgtggcagagccttcagccagcttgctcccctcattcagcatcagaggatccacacaggagagaaaccctatgaatgtaaccagtgtggcagagccttcagccagagctcccttctcatcgaacaccagaggattcacaccaaggaaaagccgtatgggtgcaatgagtgtgggaaatccttcagccacagctcctcgctcagccagcacgaaaggacgcacactggggaaaagccctatgagtgtcacgattgcggaaagtcctttaggcagagcacccacctcactcagcaccggaggatccacacaggagagaagccatatgcatgcagggactgtggaaaggcctttacccacagctcctcccttaccaagcaccagagaactcacactggataaacccactccacatgtgctggggacataggaagaccttaagccatagctcatccctttctagatttgacccaatcatacacatgagaaacgtacattcatacacaagccttttcacacagcactcccctcagacaccctcagagagttcacactgatgggaaatgaccatgggaccaccaagctctaggtcatccatctctgcatccaaatagtagggaaacgtggagataatcaacactcaggaccttcagccttgaacgcccattagtgctatgttatagaacctacaaaaaagaaatggaacaaatgtagtggatccagggaacgcttttgtccaaggattcaccgtattccaaaccagagatgttcaaattggtgagaaacccaacaaatgcctttcatatatacgagaaccaaatgaagtcagaatttgccattattgcacatcacatttttgggggggaaagtgcttatgaatggtgcaggttgactctgatattcattcccaaatgacagtatggcagagtgttccagaaatgagagtggcatctttatggaatcactgtggatactgactgtctcagtaaacagctgtcttgtctgtgtgtatattgtttgatcagggtacatggcagccagtcacagattggaattacatatgacaaagtatcagtgtactataaacaggtttttagttatccctgcattatttttgcaattaatctttatatgcaatgagattgaaaagctttgtatgggaagactcaaaatgtaaagctgcttccgtagagtctcactgattctgagatggcttttgctgctctgttctccctctacatttctctgcagaactcgcgttagaaacacagatatttgttttacaaaaagggagatttttcctttgttaaaccatcgtcttataagcaatagcaaattcatgttagaaacttctgttttgcaagattcatcttttttgggatatgttcaagttaatcctctcaaactgctttttcattgttttcatacaatttaacattttgttaaaccctaagtccacaaatagcagtctttctgacaactataacctttaaatggtgacttgctgccctcattagaaattgcattggctggccaggcgcggtgacttatgcctgtaatcccagcactttgggaggccaaggtgggaggatcacctgaggtcgggagatggaggttgcagtgagctgagatcgtaccattgcactccagcctgggcaacaagagtgaaactctgtctcagaaaaaaaaaaaaaaa

SEQ ID NO: 34853 - DNA, 3011 bp, Homo sapiens
  source 1..3011: mol_type = unassigned DNA
tttctcgcgtctgccgtacttggtttcgcttcgctagtcccagaggcccagagtggctcgcctggagtctctgtggcgcggtttcctgtacctgccttgggatccggagggaggaagctgggacacccgggagtcaggaaatggactcggtggcttttgaggatgtagatgtgaacttcacccaggaggagtgggctttgctagatccttcccagaagaatctctacagagatgtgatgtgggaaaccatgaggaatctggcctctatagggaaaaaatggaaggaccagaacattaaagatcactacaaacaccgagggagaaatctaagaagtcatatgttagaaagactctatcaaactaaggatggtagtcagcgtggaggaatttttagccagtttgcaaatcagaatctgagcaagaaaatccctggagtgaaactctgtgaaagcattgtatatggagaagtcagcatgggtcagtcatcccttaatagacacatcaaagatcacagtggacatgaaccaaaggaatatcaggaatatggagagaagccagatacacgtaaccagtgttggaaacccttcagttctcaccactcctttcgaacacatgagataattcacactggagagaaactctatgattgtaaggaatgtggaaaaaccttcttttctctcaaaagaattagaagacacatcatcacacacagtggatatacaccatataaatgtaaggtgtgtgggaaagcttttgattatcccagtagatttcgaacacatgaaagaagtcacactggagagaaaccctatgaatgtcaggaatgtggaaaagccttcacttgtatcacaagtgttcgaagacacatgataaagcacactggagatggaccttataaatgtaaggtatgtgggaaaccctttcattctctgagttcatttcaagtgcatgaaagaattcacactggagaaaaaccctttaaatgtaagcaatgtggtaaagccttcagttgttccccaaccttacgaatacatgaaagaacccatactggagagaaaccttatgaatgcaagcagtgtgggaaggccttcagttatctcccctcccttcgactacatgaaagaattcacactggtgagaaacccttcgtatgtaaacaatgtggtaaagcctttagatctgccagtacctttcaaatacatgaaaggactcacactggagaaaaaccttatgaatgtaaggaatgtggggaagcattcagttgtatcccaagtatgcgaagacacatgataaaacatactggagaaggaccttataaatgtaaggtatgtgggaaaccctttcattctctgagtccatttcgaatacatgaaagaactcacactggagagaaaccttatgtatgtaaacattgtggtaaagctttcgtttcttcaacatcaattcgaatacatgaaagaactcatactggagagaaaccctatgagtgtaagcaatgtgggaaagccttcagttatctcaactcctttcgaacacatgaaatgattcacactggtgagaaaccctttgaatgtaagcgatgtggtaaagcctttagatcttctagttcctttcgactacatgaaaggactcacactggacagaaaccctatcattgcaaggaatgtgggaaagcctattcttgccgtgccagctttcagagacacatgttaacacatgctgaagatggaccaccttataaatgcatgtgggaaagcctttaatgctctgggttcatgtcagatacattaaaatactcactgaagagaagccctatgaatgtaagtaacgtgggaaagcatgaaattctgtcagtgccttttttaatacatgaaagaattctagagagaagccatatacatgtaagtaacatgggaaagctttcaatcattttagttcctttcaaatacatgaaagaactcatcatggagaaaaccaaacaaatgctttttggaaaggaacccatatttgagagaaaccctgggtaaagggtgtaggaaaggttttgtcatcacacaaccctgtcacacatgaatgtgtagtggagagaaccttggtaaatgtaaagagtgtgggagagcctttagtcattttagttccacttgaagccatgaaagaacacacaaaagagaaagctcttgaatataagcaatgtccacacgtttttagccagcccacatgctttcaacaacatgtaagaatgtaccctggatcaaaacactataaatgtgaaaactacaaggaaggttttccattatacttttaaagtcatttgagggctctggctctgtggctttgtgggttaaagtacttgtctggcaaacaggagatgctggatttcaatcccagcagggcctcactagttgaggtattgaatttgaacagatgttttggctctggctgggtgtggtggctcacacctgtaatcccagcactttgggaggctgaggcaggaggatcacttgaggtcaggagtttgagaccagtgtgcaaaacatagcaagacctcatctcagaaaaaaaaaaaaagtcatttgaaaacttctaatacagcaaaatcctataaatgtaagtacttcaaaaagcctcatgcatagcgggtcatgtagtctctagaaaatacataacctgatggaaatgtagaagctatatgtatattttgttaattagtggctcatatttaaaatagttctctgactatggatttcaaatgcttaatctcacaaagaaatgttaaattgatataatcctgtaagtaatctgaaagcaatagtgcatgaatttcataggtagtgttgttttaggtcagtaaataaaatatttgtctttccattttgaaatgtgtttaatccaacaatgaatttaaatgtgtttctcatattcaggtatgttaaattgtatatggttgcttaattgttctgtgattgaggaccactgaaaaataagtcttaataaatgttggtatgaaccta

SEQ ID NO: 34854 - DNA, 1920 bp, Homo sapiens
  source 1..1920: mol_type = unassigned DNA
aggcccagagtggctcgcctggagtctctgtggcgcggtttcctgtacctgccttgggatccggagggaggaagctgggacacccgggagtcaggaaatgggaaaaaatggaaggaccagaacattaaagatcactacaaacaccgagggagaaatctaagaagtcatatgttagaaagactctatcaaactaaggatggtagtcagcgtggaggaatttttagccagtttgcaaatcagaatctgagcaagaaaatccctggagtgaaactctgtgaaagcattgtatatggagaagtcagcatgggtcagtcatcccttaatagacacatcaaagatcacagtggacatgaaccaaaggaatatcaggaatatggagagaagccagatacacgtaaccagtgttggaaacccttcagttctcaccactcctttcgaacacatgagataattcacactggagagaaactctatgattgtaaggaatgtggaaaaaccttcttttctctcaaaagaattagaagacacatcatcacacacagtggatatacaccatataaatgtaaggtgtgtgggaaagcttttgattatcccagtagatttcgaacacatgaaagaagtcacactggagagaaaccctatgaatgtcaggaatgtggaaaagccttcacttgtatcacaagtgttcgaagacacatgataaagcacactggagatggaccttataaatgtaaggtatgtgggaaaccctttcattctctgagttcatttcaagtgcatgaaagaattcacactggagaaaaaccctttaaatgtaagcaatgtggtaaagccttcagttgttccccaaccttacgaatacatgaaagaacccatactggagagaaaccttatgaatgcaagcagtgtgggaaggccttcagttatctcccctcccttcgactacatgaaagaattcacactggtgagaaacccttcgtatgtaaacaatgtggtaaagcctttagatctgccagtacctttcaaatacatgaaaggactcacactggagaaaaaccttatgaatgtaaggaatgtggggaagcattcagttgtatcccaagtatgcgaagacacatgataaaacatactggagaaggaccttataaatgtaaggtatgtgggaaaccctttcattctctgagtccatttcgaatacatgaaagaactcacactggagagaaaccttatgtatgtaaacattgtggtaaagctttcgtttcttcaacatcaattcgaatacatgaaagaactcatactggagagaaaccctatgagtgtaagcaatgtgggaaagccttcagttatctcaactcctttcgaacacatgaaatgattcacactggtgagaaaccctttgaatgtaagcgatgtggtaaagcctttagatcttctagttcctttcgactacatgaaaggactcacactggacagaaaccctatcattgcaaggaatgtgggaaagcctattcttgccgtgccagctttcagagacacatgttaacacatgctgaagatggaccaccttataaatgcatgtgggaaagcctttaatgctctgggttcatgtcagatacattaaaatactcactgaagagaagccctatgaatgtaagtaacgtgggaaagcatgaaattctgtcagtgccttttttaatacatgaaagaattctagagagaagccatatacatgtaagtaacatgggaaagctttcaatcattttagttcctttcaaatacatgaaagaactcatcatggagaaaaccaaacaaatgctttttggaaaggaacccatatttgagagaaaccctgggtaaagggtgtaggaaaggttttgtcatcacacaaccctgtcacacatgaatgtgtagtggagagaa

SEQ ID NO: 34855 - DNA, 1141 bp, Homo sapiens
  source 1..1141: mol_type = unassigned DNA
ggagcggacatgacgtcttccgggaggcggcggggtctttgtctcgctgcagcgggtgctgcaggtctggccttcacttttctgcgtcctcttactcctagaggcccagcctctgtggcgctgtgatctggttattgggagattcacagctaagacgccaggatcccccggaagcctagaaatgggaccactgacatttatggatgtggccatagagttctctttggaggagtggcagtgcctggacactgcacagcggaatgtatataggcatgtgatgttagagaactacagaaacctggttttcttggacctgattacctgtctggaacaaggaaaagagccctggaatatgaagagacatgagatggtggtagccaaacattcagctctgtgttctcgttttgcccaagacctttggctagagcagaacataaaagattctttccaaaaagtgacactgagcagatatggaaaatatggacataagaatttacagttaagaaaaggctgtaaaagtgtggatgagtgtaagggacaccaaggaggttttaatggacttaaccaatgtttgaaaattaccacaagcaaaatatttcaatgtaataaatatgtaaaagtcatgcataaattttcaaattcaaatagacacaagataagacatactgaaaataaacatttcagatgtaaagaatgtgacaaatcactttgcatgctttcacgcctaactcaacataaaaaaattcatactagagagaatttctacaaatgtgaagagtgtggaaaaacctttaactggtccacaaacctttctaaacctaagaaaattcatactggagaaaaaccctacaaatgtgaagtatgtggaaaagcctttcaccaatcctcaatccttactaaacataagataattcgtactggagaaaaaccctataaatgtgcacactgtggcaaagcctttaaacagtcctcacaccttactagacataagataattcatactgaagagaaaccctacaaatgtgaacaatgtggcaaggtctttaagcagtccccaacccttactaaacatcagataatttatactggagaggaaccatacaaatgtgaggaatgtggcaaagcttttaacctatcttaa

SEQ ID NO: 34856 - DNA, 2582 bp, Homo sapiens
  source 1..2582: mol_type = unassigned DNA
ggacatgacgtcttccgggaggcggcggggtctttgtctcgctgcagcgggtgctgcaggtctggccttcacttttctgcgtcctcttactcctagaggcccagcctctgtggcgctgtgatctggttattgggagattcacagctaagacgccaggatcccccggaagcctagaaatgggaccactgacatttatggatgtggccatagagttctctttggaggagtggcagtgcctggacactgcacagcggaatgtatataggcatgtgatgttagagaactacagaaacctggttttcttggacctgattacctgtctggaacaaggaaaagagccctggaatatgaagagacatgagatggtggtagccaaacattcagctctgtgttctcgttttgcccaagacctttggctagagcagaacataaaagattctttccaaaaagtgacactgagcagatatggaaaatatggacataagaatttacagttaagaaaaggctgtaaaagtgtggatgagtgtaagggacaccaaggaggttttaatggacttaaccaatgtttgaaaattaccacaagcaaaatatttcaatgtaataaatatgtaaaagtcatgcataaattttcaaattcaaatagacacaagataagacatactgaaaataaacatttcagatgtaaagaatgtgacaaatcactttgcatgctttcacgcctaactcaacataaaaaaattcatactagagagaatttctacaaatgtgaagagtgtggaaaaacctttaactggtccacaaacctttctaaacctaagaaaattcatactggagaaaaaccctacaaatgtgaagtatgtggaaaagcctttcaccaatcctcaatccttactaaacataagataattcgtactggagaaaaaccctataaatgtgcacactgtggcaaagcctttaaacagtcctcacaccttactagacataagataattcatactgaagagaaaccctacaaatgtgaacaatgtggcaaggtctttaagcagtccccaacccttactaaacatcagataatttatactggagaggaaccatacaaatgtgaggaatgtggcaaagcttttaacctatcttaacaacttactgaacataagaaaatttacactagagagaaagcctacaaatgtgaagaatgtggcaaagcctttaaccagttttcaacccttattacacataagataattcatagcggagagaaaccccacaaatgtgaagaatgtggcagagcttttaaccagtccgcaaagctcactgaacataagttaattcatactggagaaaaaccctacaaatgtaaagaatgtggaaaagcttttcaccgatactcaatccttagtacacataagaaaattcatactggggagaaaccccacaaatgtggagaatgcggaaaagcctttaactggtcctcaactcttattacacataagataattcacagtggagaaaaaccctacaaatgtgaagaatgtggcaaagcttttaaccagtcctcacaccttatgagacataagaaaattcatagtaaagagaaaccctacaaatgtgaacagtgtggcaaggtctttaagaagtcctcaactcttactgcacataagatcattcatactggagagaaaccttacaaatgtgaggaatgtggcaaaggttttagccaactctcaaaccttactaaacacaagaagattcatactagagagaaaccctacaaatgtgaagaatgtggcatatcttttaaccagttctcacaacttgctatacataagatgattcacacttgaatgaaaccctacaaatgtgaacgatgtggcagttgttttaactagttctcgaactttactatgcataagaaaattcaaactggagagaaactctacaaatgtgaagaatgtggcaaagcttttaaccaagtctcaacacttactatacataagataatttatactggagcaaaaccttggaaattcaaagaatgtggtaaaacttacaatcctcaaaacttcttacacctaaaattcatgcaggagagaaacaccacaaatgtgaaaaatttggtaaattctttaacaagtcttcaaccctttctgcacataatataattcatactggagagaaaccccacaaatatgaagaatgtggtaatgcttttaaccaattctcaaatcttactaaacaaaattaatactgaaaatgttacaaaccagaaaaatgtgaaaatgattttaacaaaaccttcaaatttttctaaacataaaggaaatcatactggtaagaaattataaaaatgtgaagaatgtgacaaagcctttaaatggttgtcacacttgattgtaggtaagataattcatactggcagaaactcccagaagtgtgaagaatatggcaaaactttaattcctataccttattgcacaggaaagcatttatacttcagaaaatgttgtactgatataaagaatgtagaaaagccattaatatgtgcttacatcttattcaacattagagagttagtacttaataaa

SEQ ID NO: 34857 - DNA, 2235 bp, Homo sapiens
  source 1..2235: mol_type = unassigned DNA
atgaagagacatgagatggtggtagccaaacattcagctctgtgttctcgttttgcccaagacctttggctagagcagaacataaaagattctttccaaaaagtgacactgagcagatatggaaaatatggacataagaatttacagttaagaaaaggctgtaaaagtgtggatgagtgtaagggacaccaaggaggttttaatggacttaaccaatgtttgaaaattaccacaagcaaaatatttcaatgtaataaatatgtaaaagtcatgcataaattttcaaattcaaatagacacaagataagacatactgaaaataaacatttcagatgtaaagaatgtgacaaatcactttgcatgctttcacgcctaactcaacataaaaaaattcatactagagagaatttctacaaatgtgaagagtgtggaaaaacctttaactggtccacaaacctttctaaacctaagaaaattcatactggagaaaaaccctacaaatgtgaagtatgtggaaaagcctttcaccaatcctcaatccttactaaacataagataattcgtactggagaaaaaccctataaatgtgcacactgtggcaaagcctttaaacagtcctcacaccttactagacataagataattcatactgaagagaaaccctacaaatgtgaacaatgtggcaaggtctttaagcagtccccaacccttactaaacatcagataatttatactggagaggaaccatacaaatgtgaggaatgtggcaaagcttttaacctatcttaacaacttactgaacataagaaaatttacactagagagaaagcctacaaatgtgaagaatgtggcaaagcctttaaccagttttcaacccttattacacataagataattcatagcggagagaaaccccacaaatgtgaagaatgtggcagagcttttaaccagtccgcaaagctcactgaacataagttaattcatactggagaaaaaccctacaaatgtaaagaatgtggaaaagcttttcaccgatactcaatccttagtacacataagaaaattcatactggggagaaaccccacaaatgtggagaatgcggaaaagcctttaactggtcctcaactcttattacacataagataattcacagtggagaaaaaccctacaaatgtgaagaatgtggcaaagcttttaaccagtcctcacaccttatgagacataagaaaattcatagtaaagagaaaccctacaaatgtgaacagtgtggcaaggtctttaagaagtcctcaactcttactgcacataagatcattcatactggagagaaaccttacaaatgtgaggaatgtggcaaaggttttagccaactctcaaaccttactaaacacaagaagattcatactagagagaaaccctacaaatgtgaagaatgtggcatatcttttaaccagttctcacaacttgctatacataagatgattcacacttgaatgaaaccctacaaatgtgaacgatgtggcagttgttttaactagttctcgaactttactatgcataagaaaattcaaactggagagaaactctacaaatgtgaagaatgtggcaaagcttttaaccaagtctcaacacttactatacataagataatttatactggagcaaaaccttggaaattcaaagaatgtggtaaaacttacaatcctcaaaacttcttacacctaaaattcatgcaggagagaaacaccacaaatgtgaaaaatttggtaaattctttaacaagtcttcaaccctttctgcacataatataattcatactggagagaaaccccacaaatatgaagaatgtggtaatgcttttaaccaattctcaaatcttactaaacaaaattaatactgaaaatgttacaaaccagaaaaatgtgaaaatgattttaacaaaaccttcaaatttttctaaacataaaggaaatcatactggtaagaaattataaaaatgtgaagaatgtgacaaagcctttaaatggttgtcacacttgattgtaggtaagataattcatactggcagaaactcccagaagtgtgaagaatatggcaaaactttaattcctataccttattgcacaggaaagcatttatacttcagaaaatgttgtactgatataaagaatgtagaaaagccattaatatgtgcttacatcttattcaacattagagagttagtacttaataaa

SEQ ID NO: 34858 - DNA, 2574 bp, Homo sapiens
  source 1..2574: mol_type = unassigned DNA
gtctcgctgcagcgggtgctgcaggtctggccttcacttttctgcgtcctcttactcctagaggcccagcctctgtggcgctgtgatctggttattgggagattcacagctaagacgccaggatcccccggaagcctagaaatggccagaaaaactgggaaaatcacaggctcttccacttactggatatttaacaagatattcttcttgagccaaaaacattgacattagcgggaccactgacatttatggatgtggccatagagttctctttggaggagtggcagtgcctggacactgcacagcggaatgtatataggcatgtgatgttagagaactacagaaacctggttttcttggctctgtgttctcgttttgcccaagacctttggctagagcagaacataaaagattctttccaaaaagtgacactgagcagatatggaaaatatggacataagaatttacagttaagaaaaggctgtaaaagtgtggatgagtgtaagggacaccaaggaggttttaatggacttaaccaatgtttgaaaattaccacaagcaaaatatttcaatgtaataaatatgtaaaagtcatgcataaattttcaaattcaaatagacacaagataagacatactgaaaataaacatttcagatgtaaagaatgtgacaaatcactttgcatgctttcacgcctaactcaacataaaaaaattcatactagagagaatttctacaaatgtgaagagtgtggaaaaacctttaactggtccacaaacctttctaaacctaagaaaattcatactggagaaaaaccctacaaatgtgaagtatgtggaaaagcctttcaccaatcctcaatccttactaaacataagataattcgtactggagaaaaaccctataaatgtgcacactgtggcaaagcctttaaacagtcctcacaccttactagacataagataattcatactgaagagaaaccctacaaatgtgaacaatgtggcaaggtctttaagcagtccccaacccttactaaacatcagataatttatactggagaggaaccatacaaatgtgaggaatgtggcaaagcttttaacctatcttaacaacttactgaacataagaaaatttacactagagagaaagcctacaaatgtgaagaatgtggcaaagcctttaaccagttttcaacccttattacacataagataattcatagcggagagaaaccccacaaatgtgaagaatgtggcagagcttttaaccagtccgcaaagctcactgaacataagttaattcatactggagaaaaaccctacaaatgtaaagaatgtggaaaagcttttcaccgatactcaatccttagtacacataagaaaattcatactggggagaaaccccacaaatgtggagaatgcggaaaagcctttaactggtcctcaactcttattacacataagataattcacagtggagaaaaaccctacaaatgtgaagaatgtggcaaagcttttaaccagtcctcacaccttatgagacataagaaaattcatagtaaagagaaaccctacaaatgtgaacagtgtggcaaggtctttaagaagtcctcaactcttactgcacataagatcattcatactggagagaaaccttacaaatgtgaggaatgtggcaaaggttttagccaactctcaaaccttactaaacacaagaagattcatactagagagaaaccctacaaatgtgaagaatgtggcatatcttttaaccagttctcacaacttgctatacataagatgattcacacttgaatgaaaccctacaaatgtgaacgatgtggcagttgttttaactagttctcgaactttactatgcataagaaaattcaaactggagagaaactctacaaatgtgaagaatgtggcaaagcttttaaccaagtctcaacacttactatacataagataatttatactggagcaaaaccttggaaattcaaagaatgtggtaaaacttacaatcctcaaaacttcttacacctaaaattcatgcaggagagaaacaccacaaatgtgaaaaatttggtaaattctttaacaagtcttcaaccctttctgcacataatataattcatactggagagaaaccccacaaatatgaagaatgtggtaatgcttttaaccaattctcaaatcttactaaacaaaattaatactgaaaatgttacaaaccagaaaaatgtgaaaatgattttaacaaaaccttcaaatttttctaaacataaaggaaatcatactggtaagaaattataaaaatgtgaagaatgtgacaaagcctttaaatggttgtcacacttgattgtaggtaagataattcatactggcagaaactcccagaagtgtgaagaatatggcaaaactttaattcctataccttattgcacaggaaagcatttatacttcagaaaatgttgtactgatataaagaatgtagaaaagccattaatatgtgcttacatcttattcaacattagagagttagtacttaataaaagcattataaatgcaa

SEQ ID NO: 34859 - DNA, 1066 bp, Homo sapiens
  source 1..1066: mol_type = unassigned DNA
tttgtctcgctgcagcgggtgctgcaggtctggccttcacttttctgcgtcctcttactcctagaggcccagcctctgtggcgctgtgatctggttattgggagattcacagctaagacgccaggatcccccggaagcctagaaatgggaccactgacatttatggatgtggccatagagttctctttggaggagtggcagtgcctggacactgcacagcggaatgtatataggcatgtgatgttagagaactacagaaacctggttttcttggctctgtgttctcgttttgcccaagacctttggctagagcagaacataaaagattctttccaaaaagtgacactgagcagatatggaaaatatggacataagaatttacagttaagaaaaggctgtaaaagtgtggatgagtgtaagggacaccaaggaggttttaatggacttaaccaatgtttgaaaattaccacaagcaaaatatttcaatgtaataaatatgtaaaagtcatgcataaattttcaaattcaaatagacacaagataagacatactgaaaataaacatttcagatgtaaagaatgtgacaaatcactttgcatgctttcacgcctaactcaacataaaaaaattcatactagagagaatttctacaaatgtgaagagtgtggaaaaacctttaactggtccacaaacctttctaaacctaagaaaattcatactggagaaaaaccctacaaatgtgaagtatgtggaaaagcctttcaccaatcctcaatccttactaaacataagataattcgtactggagaaaaaccctataaatgtgcacactgtggcaaagcctttaaacagtcctcacaccttactagacataagataattcatactgaagagaaaccctacaaatgtgaacaatgtggcaaggtctttaagcagtccccaacccttactaaacatcagataatttatactggagaggaaccatacaaatgtgaggaatgtggcaaagcttttaacctatcttaacaacttactgaacataagaaaatttacactagagagaaag

SEQ ID NO: 34860 - DNA, 842 bp, Homo sapiens
  source 1..842: mol_type = unassigned DNA
tttgtctcgctgcagcgggtgctgcaggtctggccttcacttttctgcgtcctcttactcctagaggcccagcctctgtggcgctgtgatctggttattgggagattcacagctaagacgccaggatcccccggaagcctagaaatgggaccactgacatttatggatgtggccatagagttctctttggaggagtggcagtgcctggacactgcacagcggaatgtatataggcatgtgatgttagagaactacagaaacctggttttcttggacctgattacctgtctggaacaaggaaaagagccctggaatatgaagagacatgagatggtggtagccaaacattcagctgtagcatttacctttgatctcagtggactcaacattttgtcattccaaagtatcctgccatttgtttcagcactttatgtcatgggaaacagaaaccagtgtctgcaaaagcacctagaagccagaaataaagatctctgtgttctcgttttgcccaagacctttggctagagcagaacataaaagattctttccaaaaagtgacactgagcagatatggaaaatatggacataagaatttacagttaagaaaaggctgtaaaagtgtggatgagtgtaagggacaccaaggaggttttaatggacttaaccaatgtttgaaaattaccacaagcaaaatatttcaatgtaataaatatgtaaaagtcatgcataaattttcaaattcaaatagacacaagataagacatactgaaaataaacatttcagatgtaaagaatgtgacaaatcactttgcatgctttcacgcctaactcaacataaaaaa

SEQ ID NO: 34861 - DNA, 2962 bp, Homo sapiens
  source 1..2962: mol_type = unassigned DNA
agtgcggacgtcgccattcctggcccatgggaagattgcgtttcacctgctcctgaaggccgaaggtggctctagcgcatcctttgtcgcgccgtgacctgcaggtactgacagatccgtagggaggacaccgtgacttcccggacgctgggaaatggactcagtctcctttgaggatgtggccgtgaacttcaccctggaggagtgggctttgctggattcttcacagaaaaagctctatgaagatgtgatgcaggagaccttcaaaaacctggtttgtctaggaaaaaagtgggaagaccaggacattgaagatgaccacagaaaccaggggaaaaatcgaagatgtcatatggttgagagactctgtgaaagtagaagaggtagcaaatgtggagaaaccactagccagatgccaaatgttaatatcaacaaggaaacttttactggagcaaaaccacatgaatgcagcttttgtggaagagacttcattcatcattcgtcccttaataggcacatgagatctcacactggacagaaaccaaatgagtatcaggaatatgaaaagcaaccatgtaaatgtaaagcagttgggaaaaccttcagttatcaccactgctttcgcaaacatgaaagaactcacactggagtgaagccctatgaatgtaaacagtgtgggaaagcctttatatattaccagccatttcaaagacatgaaaggactcatgctggacagaaaccctatgaatgtaagcaatgtggaaaaacctttatatattaccagtcttttcaaaaacatgctcatactggaaagaaaccctatgaatgtaaacagtgtgggaaagcctttatatgttaccaatcttttcaaagacacaaaaggactcacactggagagaaaccctatgaatgtaagcaatgtggtaaggctttcagttgtcccacatactttcgaactcatgaaagaactcacactggagaaaaaccctacaaatgtaaagaatgtggtaaagccttcagttttctcagttcttttcgaaggcataaaaggactcatagtggagagaaaccctatgaatgtaaagaatgtggaaaagccttcttttattctgcaagctttcgagcacatgtaataatacacactggggctcgaccttataaatgtaaagaatgtgggaaagccttcaactcttctaattcctgtcgagtgcatgaaagaactcatattggagaaaaaccatatgaatgtaaacgatgtggcaaatcattcagttggtccatttctcttcgattgcatgaaagaactcatactggagagaaaccttatgagtgtaaacagtgtcataaaaccttcagtttttcaagttcccttcgagaacacgaaacaactcacactggagagaaaccctatgaatgtaaacaatgtggtaaaaccttcagtttttcaagttcccttcaaagacatgaaaggactcacaatgcagagaaaccctatgaatgtaaacagtgtgggaaagccttcaggtgttcaagttattttcgaattcatgaaaggtcacacactggagagaaaccctatgaatgtaaacagtgtggaaaagttttcattcgttccagttcctttcgactgcatgaaagaacacacactggagagaaaccctatgaatgtaaactatgcggtaaaaccttcagtttttcaagttcccttcgagaacatgaaaaaattcacactggaaataagccttttgagtgtaagcaatgtggtaaggccttccttcgttccagtcaaattcgattgcatgaaaggactcacactggagagaaaccgtatcaatgtaaacaatgtggaaaagccttcatttcttccagtaaatttcgaatgcatgagagaactcacacgggagagaaaccctatcgatgtaaacaatgtgggaaagccttcagattttcaagttctgttcgaattcatgaaaggtctcacactggagagaaaccttatgaatgcaaacaatgtggaaaagccttcatttcttccagtcactttcgactgcatgaaaggactcatatgggagagaaagtctaagaatataagcaacattctgaagccttcggttgttccagctccttctgaatacacaaaagagttcatactggacagaagctgtgtgaatacaaacattgttctaaagcccttaattgttccagtttcttttgagcacgaaagaattcccactggtgagaaacagtatgaatgtaaacattgtgattaagccttcagttgacctaattcatttcaaagacaggactcgtgctgcagtgaaatctgttttgttttttgttttttgtttttttaaaaaaggccaagcttgttggctcatgcctatagtcccagcactttgggaggccaaggtgcaaggcaggcagatcatttgaggtcagaaattcgagaccagcgtggtcaacatggtgtaaccccatctctactaaaaattaccaaaaaatgaaccaggcatggtagtgcatgcctctaatcccagctactcaggaggctaaggcaggagaatcacttgaacctggagacagaggttgcagtgagctgagatcacgccactgcattccagcctgtgcgacagaatgagacactgtctcaagaaaaaataaaagtgggaaaatcttccaactgtcctctagagtgtgaatatatgaaaggagtcagagtggggtgaaagtctataaatgtaagacatttgggaaagccttcacacagccttttgagcacacatgagaatgtatactggagagaaaccctataaatattaagaatgtgggaaattcttcatcctagttcttttgttgttgttgatgatacaaaaatattttcatttaataaagattgtcaggttatatttaataagaaagaaagtatcatgtaaacagcccagtaataaaattttacaatctt

SEQ ID NO: 34862 - DNA, 3550 bp, Homo sapiens
  source 1..3550: mol_type = unassigned DNA
tatggattagccattctttattcctttactttcctaataaacttgctttcaccttatggattcgcctcaaattctttcttgtgcaagatccaagaaccctctcttagagtctgagatccggacccctttccagtagcaaaaggtcttagactgaagtactgactccacagtcgttgttaagaatcctagttgtttaatagaggcggtcttgggctcttgctgggccgcggtgtgttctgggaagtgtagtcacctgagtctccagttccttgtctctgggccgtgtgtgcacgccagcgaagcactgtgggagtcgtagtaggggaggaaaaccctataccctctggcgtgcggcgcaggagtttgggggaatgtagtcgccagagctctgcgttgtcttccggctttgggcgtggccacgatgcactctgggagtcgtagtaggggaagaacgtcctccgctcttttgcgcacggtcgctagaggttctgggaagtgtagttgcctgaagctcgtgttctttgtctttcgatgatgtgcgcttggcctcaaagcaccctgggagttgcagtggggcggggaaagccatatgctctctcgcgcggggtcgcggttgtttctgggaagtgtggtggcctgagttccacgttcttcgtttctccgctagttgtgcgcttggccgcgagacactctggcagttataggaacacaaaggtctgtgtactcttccgcggggggccgcggttatttctgggaaatgtagttgcctaggacccgggttctttgtttctcggctctgggcgtgggaggatagcccctatgctctggcgcaccgggccgcgatggctctgggaattgtagttgtcgcaggccctcgttctttgtctcctggcgttctgggcacggcagcgaggcgctctgggagttccagtaggaacgaaaagcccttgcgcgcagggccgcattggtttctgggaattgtagtttcttgaggccggcggcctggttggggtgacgtcggcgaggcttctgaagacgcaattcctgcgacgcccgcggaggggccctggggggcggcgccgagcgtctggcctgtgttggctgtaggcaacgaaaggagccctcccggtctgcgccggatggccccgggcggtgactcggtccggagccctggaacgctacgcccacctggcggaaagcaccacggaaacgcatccttctgtggccactgttaggtctgccattttacacttttctgatctcctccttcccttctgtgagctatgtctcaggggtcagtgacattcagagatgtggccatagacttctcccaggaggagtggaaatggcttcagcctgctcaaagagatttgtacagatgtgtaatgttggagaactatggccatctggtctcactgggtctttccatttctaagccagatgtggtttccttattggagcaagggaaagaaccctggctggggaaaagggaagtgaaaagagatctgttttcagtttcagagtcaagtggtgagatcaaagacttttcaccaaaaaatgtcatttatgatgactcatcccagtatttgatcatggaaagaattctaagtcaaggccctgtgtattccagttttaaaggaggctggaaatgcaaggatcatactgagatgctgcaagaaaatcagggatgtattaggaaagtaacagtctctcatcaagaagccctggctcaacatatgaatatcagtactgtggagaggccctatggatgccatgaatgtggaaaaacttttggtcgacgcttttccctggtgttacaccagaggactcatactggagagaaaccatatgcatgtaaggaatgtggcaaaacctttagccagatttcaaaccttgtgaaacaccaaatgatacatactggaaagaaaccccatgagtgtaaggactgtaataaaacattcagttacctttcatttcttattgaacaccagagaacgcacactggggagaaaccttatgaatgtactgagtgtggaaaggcctttagccgtgcctccaacctcactcgacatcaaagaattcacataggaaagaaacaatatatatgtaggaaatgtggtaaagcatttagcagtggctcagaactcattcgccaccagattacacatactggagagaaaccttatgaatgcattgaatgtgggaaggcatttcgccgtttctcacaccttactcgacatcagagcatccatacaaccaaaaccccgtatgaatgtaatgaatgtaggaaagctttccgttgtcactcattccttattaaacatcagagaattcatgctggagaaaagctctatgaatgtgatgaatgtggtaaagttttcacttggcatgcatcccttattcaacatacgaagagtcacactggagagaaaccctatgcgtgtgctgaatgtgataaagccttcagccggagcttttccctcattctacatcagagaactcatactggagagaaaccctatgtatgtaaggtatgcaacaaatccttcagctggagctcaaaccttgctaaacatcagaggacacacactcttgacaacccctatgaatatgaaaattcatttaattaccactcattccttactgaacaccagtgaatttacactgcaaagaaaaactatgaatgtatggaattttttaaaaagaagtataatgccttacttcagagaactcttggaaagaagccttatgtgaaagtgatgactgtgaagtaatatggcccacactttattcaccaccctggagaaaaaaaaacccaggaatatgtggaaaagccattaataaccactcttttatttttttgcaataacaaggtgaaatcaatattgttgagaagattcttccatctggtaatgttgagaagacttcatttggtaggagtcccttactttacgtgtgtaaattcctaccaggaaagaatacatatccaatagattggagaaagccagagattagccctcattccgcatctgtcaaccaggacagaaagcatggacaagggatgagctttacaaagatgatgcactttggagatcagaaaattcatatttaagcaaagtgatacaaacacagtgatttgggaatgccttcatttacaatgcaatacttacattttaatactcttgtaggagaaaaagcaactgtataaatgaatgtagagtgactttctgcaatatttcaaacctatatcagagaattacactgtgggaaaactaccattgtaataagtgtagcaaaatctccttagatatctgaaaagtcatactggatggaatctgtaggaaacggttctattttgagggaagggggattcctttttgttttttaagtgaattcagaaaatgttataaataaatcttttggtttattataaaccttctgcttgctgattttttcccacagcatgtgattctgaaaatgtaactacaatattgacataaaaaataaacagtagtttttcttgttgaaacatacaaacataacaaagtgt

SEQ ID NO: 34863 - DNA, 726 bp, Homo sapiens
  source 1..726: mol_type = unassigned DNA
ctgagttccacgttcttcgtttctccgctagttgtgcgcttggccgcgagacactctggcagttataggaacacaaagtttcttgaggccggcggcctggttggggtgacgtcggcgaggcttctgaagacgcaattcctgcgacgcccgcggaggggccctggggggcggcgccgagcgtctggcctgtgttggctgtaggcaacgaaaggagccctcccggtctgcgccggatggccccgggcggtgactcggtccggagccctggaacgctacgcccacctggcggaaagcaccacggaaacgcatccttctgtggccactgttaggtctgccattttacacttttctgatctcctccttcccttctgtgagctatgtctcaggggtcagtgacattcagagatgtggccatagacttctcccaggaggagtggaaatggcttcagcctgctcaaagagatttgtacagatgtgtaatgttggagaactatggccatctggtctcactgggtctttccatttctaagccagatgtggtttccttattggagcaagggaaagaaccctggctggggaaaagggaagtgaaaagagatctgttttcagtttcagagtcaagtggtgagatcaaagacttttcaccaaaaaatgtcatttatgatgactcatcccagtatttgatcatggaaagaattctaagtcaaggccctgtgtattccagtt

SEQ ID NO: 34864 - DNA, 681 bp, Homo sapiens
  source 1..681: mol_type = unassigned DNA
actcatactggagagaaaccatatgcatgtaaggaatgtggcaaaacctttagccagatttcaaaccttgtgaaacaccaaatgatacatactggaaagaaaccccatgagtgtaaggactgtaataaaacattcagttacctttcatttcttattgaacaccagagaacgcacactggggagaaaccttatgaatgtactgagtgtggaaaggcctttagccgtgcctccaacctcactcgacatcaaagaattcacataggaaagaaacaatatatatgtaggaaatgtggtaaagcatttagcagtggctcagaactcattcgccaccagattacacatactggagagaaaccttatgaatgcattgaatgtgggaaggcatttcgccgtttctcacaccttactcgacatcagagaattcatgctggagaaaagctctatgaatgtgatgaatgtggtaaagttttcacttggcatgcatcccttattcaacatacgaagagtcacactggagagaaaccctatgcgtgtgctgaatgtgataaagccttcagccggagcttttccctcattctacatcagagaactcatactggagagaaaccctatgtatgtaaggtatgcaacaaatccttcagctggagctcaaaccttgctaaacatcagaggacacacact

SEQ ID NO: 34865 - DNA, 2340 bp, Homo sapiens
  source 1..2340: mol_type = unassigned DNA
ctgcgacgcccgcggaggggccctggggggcggcgccgagcgtctggcctgtgttggctgtaggcaacgaaaggagccctcccggtctgcgccggatggccccgggcggtgactcggtccggagccctggaacgctacgcccacctggcggaaagcaccacggaaacgcatccttctgtggccactgttaggtctgccattttacacttttctgatctcctccttcccttctgtgagctatgtctcagatgtggtttccttattggagcaagggaaagaaccctggctggggaaaagggaagtgaaaagagatctgttttcagtttcagagtcaagtggtgagatcaaagacttttcaccaaaaaatgtcatttatgatgactcatcccagtatttgatcatggaaagaattctaagtcaaggccctgtgtattccagttttaaaggaggctggaaatgcaaggatcatactgagatgctgcaagaaaatcagggatgtattaggaaagtaacagtctctcatcaagaagccctggctcaacatatgaatatcagtactgtggagaggccctatggatgccatgaatgtggaaaaacttttggtcgacgcttttccctggtgttacaccagaggactcatactggagagaaaccatatgcatgtaaggaatgtggcaaaacctttagccagatttcaaaccttgtgaaacaccaaatgatacatactggaaagaaaccccatgagtgtaaggactgtaataaaacattcagttacctttcatttcttattgaacaccagagaacgcacactggggagaaaccttatgaatgtactgagtgtggaaaggcctttagccgtgcctccaacctcactcgacatcaaagaattcacataggaaagaaacaatatatatgtaggaaatgtggtaaagcatttagcagtggctcagaactcattcgccaccagattacacatactggagagaaaccttatgaatgcattgaatgtgggaaggcatttcgccgtttctcacaccttactcgacatcagagcatccatacaaccaaaaccccgtatgaatgtaatgaatgtaggaaagctttccgttgtcactcattccttattaaacatcagagaattcatgctggagaaaagctctatgaatgtgatgaatgtggtaaagttttcacttggcatgcatcccttattcaacatacgaagagtcacactggagagaaaccctatgcgtgtgctgaatgtgataaagccttcagccggagcttttccctcattctacatcagagaactcatactggagagaaaccctatgtatgtaaggtatgcaacaaatccttcagctggagctcaaaccttgctaaacatcagaggacacacactcttgacaacccctatgaatatgaaaattcatttaattaccactcattccttactgaacaccagtgaatttacactgcaaagaaaaactatgaatgtatggaattttttaaaaagaagtataatgccttacttcagagaactcttggaaagaagccttatgtgaaagtgatgactgtgaagtaatatggcccacactttattcaccaccctggagaaaaaaaaacccaggaatatgtggaaaagccattaataaccactcttttatttttttgcaataacaaggtgaaatcaatattgttgagaagattcttccatctggtaatgttgagaagacttcatttggtaggagtcccttactttacgtgtgtaaattcctaccaggaaagaatacatatccaatagattggagaaagccagagattagccctcattccgcatctgtcaaccaggacagaaagcatggacaagggatgagctttacaaagatgatgcactttggagatcagaaaattcatatttaagcaaagtgatacaaacacagtgatttgggaatgccttcatttacaatgcaatacttacattttaatactcttgtaggagaaaaagcaactgtataaatgaatgtagagtgactttctgcaatatttcaaacctatatcagagaattacactgtgggaaaactaccattgtaataagtgtagcaaaatctccttagatatctgaaaagtcatactggatggaatctgtaggaaacggttctattttgagggaagggggattcctttttgttttttaagtgaattcagaaaatgttataaataaatcttttggtttattataaaccttctgcttgctgattttttcccacagcatgtgattctgaaaatgtaactacaatattgacataaaaaataaacagtagtttttcttgttgaaacat

SEQ ID NO: 34866 - DNA, 2970 bp, Homo sapiens
  source 1..2970: mol_type = unassigned DNA
cagaccgcgggttaggggcttcatctctctgcgttctcagttgtgggaggccttggtgattcggccacagctcagcctccgtcgctctgtgacctgcgggtattggatgattggtagctaagactcccgaatacttcagaagtggggaaatggaactcttaacattcagggatgtggccatagaattctctccagaagagtggaaatgcctggaccctgaccagcagaatttgtatagagatgtgatgttggagaactacaggaacctggtctccctgggtgttgctatctctaacccagacctggtcacctgtctggagcaaagaaaagagccctacaatgtgaagatacataagatcgtagccagacccccagctatgtgttctcatttcacccaagaccattggccagtgcagggcatagaagattcattccacaaacttatactgagaagatatgagaaatgtggacatgataatttacaattaagaaaaggctgtaaaagtttgaatgagtgtaagttgcagaaaggaggttataatgaatttaatgaatgcttgtcaactacccagagcaaaatacttcagtgtaaagcaagtgtcaaagttgttagtaaattttcaaattcaaacaaacgtaagacaagacatactggagagaaacactttaaagaatgtggcaaatcatttcagaagttttcacacctaactcaacataaggtaattcatgctggagagaaaccctacacttgtgaagaatgtggcaaagcctttaaatggtctttaatatttaatgaacataagagaattcatactggagagaaaccttttacttgtgaagaatgtggcagcatctttaccacatcctcacactttgctaagcataaaataattcatactggagaaaaaccctataaatgtgaagaatgtggcaaagcctttaataggttcacaacccttactaaacataagagaattcatgctggagagaaacccatcacatgtgaagaatgtaggaaaatctttacctcatcctcaaactttgccaaacataagcgaattcatactggagagaaaccctacaaatgtgaagaatgtggcaaagcctttaataggtccacaacccttactaaacataagagaattcatactggagagaaaccctacacatgtgaagaatgtggcaaagcttttagacagtcctcaaaactgaatgaacataagaaagttcatactggagagcggccctacaaatgtgatgaatgtggcaaagcctttggacggtccagggtcctgaatgaacataaaaaaattcatactggagagaaaccctacaaatgtgaagaatgtggcaaagcctttagacggtccacagatcggagtcaacataagaaaattcatagtgcagataaaccctacaaatgtaaagaatgtgacaaagcctttaaacaattttcgctcctgagtcaacataagaaaattcatactgtagataaaccctacaaatgtaaagattgtgacaaagcctttaaacggttctcacacctgaataaacataagaaaattcatacttgagagaaatcctacaaatgtaaagaatgtggcaaacctttggatgatccacaaaccttaatgaacatgagaaaatttatactgtagagaaaccctggaaatgtgaagaacgtggcaaagttctttacctcattctcaaaccttgataaacataagagaattcataccggagagaaactgtacaaatgtgaagaatatggcaaagcctgtgaatggtccacaaacctgaatgagcagaagaaaattattactggagataaaccctgcaaatgtaaagagtgtaacaaaacctttaaacagccctcaccggtgaataaacataagaaaaatcatgctggagggaagccctacacatgtggcagaatgtggcaaagcatttaattggtcctcaatgcttaataaatataattcatgctggagagaaacttcacatgtgaaccgtgtggcaaagcctttaaatggtcctcaacccttaatgaacgtaagtgaattcatgctggagcaaaatgcttcacatgcgaagaatgtggcacagtctttaccacatcctcaaactttgttaaacataagagaatttataccagagagaaaccctacacatgtaaagaatgtggcaaagccttcaataggttctcaacccttactgtgcacaagataattcattctggggaaaaaaatgctacaaatgtgaaaaacgtggcagagccttcagaccatccacaaacctttatgaaaattcatatttgagagtagaagattcattccacaaacttacattgagaagatatgaaagatgaatataagaattcatcctagatataaaaccatagaaatgtaaaagatgtgacaaaacctttaagccatactccaggcttcttaaacataatgagaactcatactggaggaaagtcttacaaatgtgaagaatgtggcagtctttaaatcttcctcagtcttttctaatcataagataattcacactgaagagaaactgcaaacgtggaaagtgtgacaaagcttgcaaccacactcaatctattctaaatataagagaaatgatattggtgagaagccacaaaaatatgaaaaatgtggcaaagccttcaaatgcttgtcacatcttactgtatatatataattcctactgaagaaatcccctggaaatgcaaaaaatgtggcaggatttttaccaatgctcatctttttgcacatgatatcctttatattcgagaaaagttatagaaatataaaaaatatagaaaagtcatatctcctcacattttactaactagcaatgttcatacttaataaaaacattataaatgtaatttctgttgaaagacttcagaaaatataggcctttaaagtgaagaagagtattcttaagacaaacaataca

SEQ ID NO: 34867 - DNA, 1611 bp, Homo sapiens
  source 1..1611: mol_type = unassigned DNA
gcgtctggctactaccagaccgcgggttaggggcttcatctctctgcgttctcagttgtgggaggccttggtgattcggccacagctcagcctccgtcgctctgtgacctgcgggtattggatgattggtagctaagactcccgaatacttcagaagtggggaaatggaactcttaacattcagggatgtggccatagaattctctccagaagagtggaaatgcctggaccctgaccagcagaatttgtatagagatgtgatgttggagaactacaggaacctggtctccctgggtgttgctatctctaacccagacctggtcacctgtctggagcaaagaaaagagccctacaatgtgaagatacataagatcgtagccagacccccagctatgtgttctcatttcacccaagaccattggccagtgcagggcatagaagattcattccacaaacttatactgagaagatatgagaaatgtggacatgataatttacaattaagaaaaggctgtaaaagtttgaatgagtgtaagttgcagaaaggaggttataatgaatttaatgaatgcttgtcaactacccagagcaaaatacttcagtgtaaagcaagtgtcaaagttgttagtaaattttcaaattcaaacaaacgtaagacaagacatactggagagaaacactttaaagaatgtggcaaatcatttcagaagttttcacacctaactcaacataagaattcttccatctctatgacaacaagcccattttagctttctggagaatagcatctgagaaaagccaaagtgcctcagtttacagacagctcactcacagaagcagagccacctaattcaccagcatctaaccactcacacctgaaggagccaaactgagcccagaagaatggcccggctgagcccagcctaaatttctaaccagctcaatcctgagctagtatgtttcgggattgttatgcagttataagttagtaatatatacacccattaaagacaggatctcaggacagattgatcacaaataacctgcaaatgcttgccaccctgtaagtattgattttcttttttcctttatttaaagttagatttgttgtaagatgatattgagttacacagaagttaggcaggagaatagggtttggaggcagggaacttaaggccaattcgtgctgacttcctacaagaaaaaacaccaaggtctgggagcagggaacctaaagccagttaacgtgaacttcctacatctaaaccaaaaggaaagacctcatctacacccgagtagcaaaggatcgaaggcgactgtcgctacaaccctcccccttgtaccagttctctgatagaaaaggacagtgccttggagtggccgtgggccaagcacaggccatgccttcatctgcatagggtaccaattcgcctcaacctttgattagccaaggaccaaatccttcattcagataaggggtagctgataggaacctcaaaaggagtacttaaaacccagaaaacattgtaaccgggtccttgggcggcttgctggggctcacacccaccctgtagagtgctttctcactttaataaaatcttgcttttgcta

SEQ ID NO: 34868 - DNA, 6034 bp, Homo sapiens
  source 1..6034: mol_type = unassigned DNA
gacaaaacatagagtaccccggcagccggcaagaggaagagagagtggcttccacatccccaatatcctagaggcggctgagccggaggcggtcgcacaaagcgggccccgggggccgttccagccgcggccgaccatagagatgcggctcccgccggctctgggtctggaggtgagtgagcggctgcggggcggaactgggaagggaatgcgggtggagcgagctggaggcaaagtttttcgagccccgggatcagggtgggcctgggcgctgggaactctcggaaggaggtactgaagggagcacccagacgagctgggccccggcgctgcagtcgcgtcacggttctggaccccgcccgggtacctgctgctctcaggacaaaatcatgacgatgctccatcccaagccttccaggttacaaaccgcctttccagttcgctggctcttatgatccagctcctgcccgacgatgtggacactgtcatcacctccattttacagataggaaagctgaggcccagagaagcgaagcgactgtgtctgtccaagaccacgcgccctcctgcccggaagataagcgtatttcttctctggtgcccacctgtctcctacctcaccctgccctcccgcaggtgaaggttcttaatcttgacggctcagcgtcctccttggctccccccggaggccatgtatggtcaagcttgaagattccccagaacagcgataatattcagcttgtcagcatttaagaagccaaaacacacaagtcggtggtgatgacagacccccttttggactcacagccagccagtagcaccggggagatggatggactgtgccctgagctattgctgatccccccgcctctctctaaccgtggaatcctggggcctgtccagagcccctgtccttcccgggaccctgcacctatacctactgagccaggctgcctgctggtagaggccacagcaactgaagagggaccagggaacatggagatcattgtggagacagtagctggaaccctgaccccaggtgctcctggagagaccccagctcccaaactgcctccaggagagagagaaccttcacaggaagcaggtacacccttgcctgggcaggagacagctgaagaggagaatgtagagaaagaagagaagagtgacacccagaaggactcccaaaaggctgtggataaaggccaaggggctcagcggctggaaggggatgtggtctctggcaccgagtccctcttcaagacccatatgtgtccagagtgtaagcgctgctttaagaagcggactcatctggtggagcacctgcatctccacttcccagaccccagcctccagtgccctaactgccagaagttcttcaccagtaagagcaagctcaagacccatctgctgcgggagctgggtgaaaaggcccaccactgcccactgtgccactacagtgcggtggagaggaatgcactcaaccgccacatggccagcatgcatgaagatatttccaacttctactcagacacctatgcctgtcctgtctgccgtgaggaattccgcctcagccaggccctaaaggagcacctcaagagccacacggcagcagccgcagcagagccattaccccttcgctgctttcaggagggctgcagctatgcagcacccgaccgcaaggccttcattaagcacctgaaggagacccatggggtgcgggctgtggagtgccgccatcactcatgtcccatgctctttgccacagccgaagccatggaggcccaccacaagagtcactacgccttccactgcccccactgtgattttgcttgttccaataagcacctattccgtaaacacaagaagcagggccaccctggcagtgaagagctgcgctgcaccttctgcccctttgccaccttcaacccagtggcttaccaggatcatgtaggcaagatgcatgctcatgaaaagatccaccagtgtcctgagtgcaactttgccactgcccacaagagggtgctcatccgacacatgcttctacatacgggtgagaagccccacaagtgtgagctgtgtgacttcacatgccgagacgtgagctacctatccaagcacatgctgacccactccaacaccaaggattacatgtgcactgaatgtggctatgtcaccaagtggaagcactacctccgtgtgcacatgcgaaaacatgcaggggacctcaggtatcagtgcaaccagtgctcctatcgctgtcaccgggctgatcagctgagcagccacaagctgcggcatcagggcaagtctctgatgtgtgaggtgtgtgccttcgcctgcaagcggaagtatgagctgcagaagcacatggcttcccagcaccaccctggcacaccggccccactctacccttgccactactgcagttaccagagccgccacaagcaggctgtgctgagccatgagaactgcaagcatacccgcctccgtgagttccactgtgccctctgtgactaccgcaccttcagcaacaccacactcttgttccataaacgcaaggcccatggctatgtacctggagaccaggcctggcagctccgctatgcaagccaggagccagaaggggccatgcagggcccaacacccccaccagattcagagccctcaaaccagctgtcagcccgacctgaggggccaggtcacgaacctgggactgtggtggaccccagcttggaccaggccctgccagagatgagtgaggaggtcaacactggaagacaggagggcagtgaggctccccatgggggtgacctgggtggcagtcccagcccagcagaggtggaggagggcagctgcacactacacctagaggccctgggagtagagctggagtctgtgactgagccaccccttgaggaggtcactgaaacagcccctatggagttcaggcccctgggactggaagggccagatggactggaaggaccagagctatctagctttgaaggtattgggacttctgacttgagtgctgaagaaaatccccttctggaaaagccagtgtctgagccctccacaaatcctccatccttagaggaggctcctaacaactgggtaggaaccttcaagacaactccacctgctgagacagcacccttgcccccattacctgagtcagagtcattactcaaggccctaaggagacaggacaaagaacaagcagaggcattggtgctagaggggcgggtgcagatggtagtgatccagggagaggggcgagccttccgctgcccacactgcccttttatcactcgccgggagaaggccctgaatctgcactccaggactgggtgccaaggccgccgagagcccctgctgtgccccgagtgtggggctagcttcaagcaacaacgcggcctcagcacccacctgctgaagaagtgccctgttctactcagaaagaacaagggcttgcccagaccagattcacccatccctctgcaacctgtgctcccaggtacccaggcctcagaggacacagaaagtgggaagcccccacctgcatcacaagaagcagagctactgcttccaaaagatgctcctttggagcttcccagggagccagaagaaacagaagagcctcttgccacagtctctggttccccagtccctcctgcaggaaactccttgcccacagaggcccctaagaagcactgctttgacccagtccctcctgcaggaaactcctcacccacggaggcccctaagaagcaccaccttgacccagtccctcctgcaggaaactcctcacccacagaggccctgaagaagcaccgctttgagcagggcaagtttcactgcaactcctgcccattcctttgttcccggctctcctctattacctctcacgtggctgaaggctgcagggggggacgtggcgggggaggaaaacgagggaccccccagacccagcctgatgtgtccccgttgagcaatggggactctgctcccccgaagaatgggagtacagagtccagctctggtgatggggatacagttctggttcaaaagcagaagggggctcgcttctcctgccctacatgtccctttagctgccagcaggaacgggctctgaggactcaccagatccggggctgccccctcgaggagtctggagagctgcactgcagcctctgcccattcactgctcctgctgccactgccttaaggctccaccagaagcggaggcaccccactgcagccccagcccgtgggccccggccccatctacagtgtggggactgtggcttcacctgtaaacagagccgttgcatgcagcagcaccggcggctcaagcacgagggggtgaagccccatcagtgccccttctgtgacttttcgaccaccagacggtaccggttagaggctcaccagtcccgacacacaggcattggccgcatcccctgcagctcttgcccccagacgtttggtaccaactcgaaactgcgcttgcaccggttaagggtacatgacaaaacacctacccacttctgtccactttgtgactatagtggctaccttcgccatgacatcactcgtcatgtcaacagctgccaccaaggcaccccagcctttgcctgctcccagtgtgaagcccagttcagctcagagacagcacttaagcagcatgctctgcgccgacaccccgagcctgcacagcctgcccctggctctcctgcagagaccactgagggccccctgcactgttcccgctgtgggttgctgtgccccagccctgccagcttacgaggacacacccgtaaacagcacccacggcttgagtgtggggcctgccaggaggccttccctagccgactggctctggatgagcaccggaggcagcagcatttcagccaccgctgtcagctctgtgactttgctgcccgggagcgggtgggcctggtaaagcactacctggaacagcatgaggagacttcagcagccgtggcagcctcagatggggatggggatgctggccagcccccgctacactgccccttttgtgacttcacatgccgccatcagctggtactagatcaccatgtgaaagggcatgggggcactcgtctctacaagtgcaccgattgtgcttacagcaccaagaaccgacagaagatcacctggcacagccgcatccacactggggaaaagccttaccactgtcacctctgcccctatgcctgtgctgatccctctcgtctcaagtaccacatgcggatccacaaggaggaacggaagtacctgtgccctgagtgtggctacaagtgcaagtgggtcaaccagctgaaataccacatgaccaagcatacaggactgaagccataccagtgtcccgagtgtgagtactgcaccaaccgggctgatgcactgcgtgtgcaccaggagacccggcatcgagaagcacgggctttcatgtgtgagcagtgtggcaaggccttcaagacgcgcttcctgctgcgcacccaccttcgcaagcacagtgaggccaaaccctatgtgtgcaatgtgtgccaccgtgctttccgctgggctgctggcctgcgccatcatgccctcacccacaccgaccgccaccccttcttttgccgcctctgcaactacaaggccaagcaaaagttccaggtggtcaagcacgtacgcaggcaccaccctgaccaagccgacccaaaccagggtgtgggcaaagaccccaccacccccacagtgcacctgcatgatgtgcagctggaggatcccagccctcctgctcctgccgctccccacactggacctgagggctgaaagcctgccccacctcctgtataggaagagggtatggtctgagatgtgcagactgggaccagcgctagcctgaggagctcagagcctaaggaaagactggcttttggggtacaagggtgactagaaccttcctgggactctggctatagtactttgaaattatcacccatataaaagagggacatggact

SEQ ID NO: 34869 - DNA, 813 bp, Homo sapiens
  source 1..813: mol_type = unassigned DNA
acaaaacatagagtaccccggcagccggcaagaggaagagagagtggcttccacatccccaatatcctagaggcggctgagccggaggcggtcgcacaaagcgggccccgggggccgttccagccgcggccgaccatagagatgcggctcccgccggctctgggtctggaggtgagtgagcggctgcggggcggaactgggaagggaatgcgggtggagcgagctggaggcaaagtttttcgagccccgggatcagggtgggcctgggcgctgggaactctcggaaggaggtactgaagggagcacccagacgagctgggccccggcgctgcagtcgcgtcacggttctggaccccgcccgggtacctgctgctctcaggacaaaatcatgacgatgctccatcccaagccttccaggttacaaaccgcctttccagttcgctggctcttatgatccagctcctgcccgacgatgtggacactgtcatcacctccattttacagataggaaagctgaggcccagagaagcgaagcgactgtgtctgtccaagaccacgcgccctcctgcccggaagataagcgtatttcttctctggtgcccacctgtctcctacctcaccctgccctcccgcaggtgaaggttcttaatcttgacggctcagcgtcctccttggctccccccggaggccatgtatggtcaagcttgaagattccccagaacagcgataatattcacatttaagaagccaaaacacacaagtcggtggtgatgacagacccccttttggactcacagccagccagtagcaccg

SEQ ID NO: 34870 - DNA, 5909 bp, Homo sapiens
  source 1..5909: mol_type = unassigned DNA
ccccggcagccggcaagaggaagagagagtggcttccacatccccaatatcctagaggcggctgagccggaggcggtcgcacaaagcgggccccgggggccgttccagccgcggccgaccatagagatgcggctcccgccggctctgggtctggagataggaaagctgaggcccagagaagcgaagcgactgtgtctgtccaagaccacgcgccctcctgcccggaagataagcgtatttcttctctggtgcccacctgtctcctacctcaccctgccctcccgcaggtgaaggttcttaatcttgacggctcagcgtcctccttggctccccccggaggccatgtatggtcaagcttgaagattccccagaacagcgataatattcacatttaagaagccaaaacacacaagtcggtggtgatgacagacccccttttggactcacagccagccagtagcaccggggagatggatggactgtgccctgagctattgctgatccccccgcctctctctaaccgtggaatcctggggcctgtccagagcccctgtccttcccgggaccctgcacctatacctactgagccaggctgcctgctggtagaggccacagcaactgaagagggaccagggaacatggagatcattgtggagacagtagctggaaccctgaccccaggtgctcctggagagaccccagctcccaaactgcctccaggagagagagaaccttcacaggaagcaggtacacccttgcctgggcaggagacagctgaagaggagaatgtagagaaagaagagaagagtgacacccagaaggactcccaaaaggctgtggataaaggccaaggggctcagcggctggaaggggatgtggtctctggcaccgagtccctcttcaagacccatatgtgtccagagtgtaagcgctgctttaagaagcggactcatctggtggagcacctgcatctccacttcccagaccccagcctccagtgccctaactgccagaagttcttcaccagtaagagcaagctcaagacccatctgctgcgggagctgggtgaaaaggcccaccactgcccactgtgccactacagtgcggtggagaggaatgcactcaaccgccacatggccagcatgcatgaagatatttccaacttctactcagacacctatgcctgtcctgtctgccgtgaggaattccgcctcagccaggccctaaaggagcacctcaagagccacacggcagcagccgcagcagagccattaccccttcgctgctttcaggagggctgcagctatgcagcacccgaccgcaaggccttcattaagcacctgaaggagacccatggggtgcgggctgtggagtgccgccatcactcatgtcccatgctctttgccacagccgaagccatggaggcccaccacaagagtcactacgccttccactgcccccactgtgattttgcttgttccaataagcacctattccgtaaacacaagaagcagggccaccctggcagtgaagagctgcgctgcaccttctgcccctttgccaccttcaacccagtggcttaccaggatcatgtaggcaagatgcatgctcatgaaaagatccaccagtgtcctgagtgcaactttgccactgcccacaagagggtgctcatccgacacatgcttctacatacgggtgagaagccccacaagtgtgagctgtgtgacttcacatgccgagacgtgagctacctatccaagcacatgctgacccactccaacaccaaggattacatgtgcactgaatgtggctatgtcaccaagtggaagcactacctccgtgtgcacatgcgaaaacatgcaggggacctcaggtatcagtgcaaccagtgctcctatcgctgtcaccgggctgatcagctgagcagccacaagctgcggcatcagggcaagtctctgatgtgtgaggtgtgtgccttcgcctgcaagcggaagtatgagctgcagaagcacatggcttcccagcaccaccctggcacaccggccccactctacccttgccactactgcagttaccagagccgccacaagcaggctgtgctgagccatgagaactgcaagcatacccgcctccgtgagttccactgtgccctctgtgactaccgcaccttcagcaacaccacactcttgttccataaacgcaaggcccatggctatgtacctggagaccaggcctggcagctccgctatgcaagccaggagccagaaggggccatgcagggcccaacacccccaccagattcagagccctcaaaccagctgtcagcccgacctgaggggccaggtcacgaacctgggactgtggtggaccccagcttggaccaggccctgccagagatgagtgaggaggtcaacactggaagacaggagggcagtgaggctccccatgggggtgacctgggtggcagtcccagcccagcagaggtggaggagggcagctgcacactacacctagaggccctgggagtagagctggagtctgtgactgagccaccccttgaggaggtcactgaaacagcccctatggagttcaggcccctgggactggaagggccagatggactggaaggaccagagctatctagctttgaaggtattgggacttctgacttgagtgctgaagaaaatccccttctggaaaagccagtgtctgagccctccacaaatcctccatccttagaggaggctcctaacaactgggtaggaaccttcaagacaactccacctgctgagacagcacccttgcccccattacctgagtcagagtcattactcaaggccctaaggagacaggacaaagaacaagcagaggcattggtgctagaggggcgggtgcagatggtagtgatccagggagaggggcgagccttccgctgcccacactgcccttttatcactcgccgggagaaggccctgaatctgcactccaggactgggtgccaaggccgccgagagcccctgctgtgccccgagtgtggggctagcttcaagcaacaacgcggcctcagcacccacctgctgaagaagtgccctgttctactcagaaagaacaagggcttgcccagaccagattcacccatccctctgcaacctgtgctcccaggtacccaggcctcagaggacacagaaagtgggaagcccccacctgcatcacaagaagcagagctactgcttccaaaagatgctcctttggagcttcccagggagccagaagaaacagaagagcctcttgccacagtctctggttccccagtccctcctgcaggaaactccttgcccacagaggcccctaagaagcactgctttgacccagtccctcctgcaggaaactcctcacccacggaggcccctaagaagcaccaccttgacccagtccctcctgcaggaaactcctcacccacagaggccctgaagaagcaccgctttgagcagggcaagtttcactgcaactcctgcccattcctttgttcccggctctcctctattacctctcacgtggctgaaggctgcagggggggacgtggcgggggaggaaaacgagggaccccccagacccagcctgatgtgtccccgttgagcaatggggactctgctcccccgaagaatgggagtacagagtccagctctggtgatggggatacagttctggttcaaaagcagaagggggctcgcttctcctgccctacatgtccctttagctgccagcaggaacgggctctgaggactcaccagatccggggctgccccctcgaggagtctggagagctgcactgcagcctctgcccattcactgctcctgctgccactgccttaaggctccaccagaagcggaggcaccccactgcagccccagcccgtgggccccggccccatctacagtgtggggactgtggcttcacctgtaaacagagccgttgcatgcagcagcaccggcggctcaagcacgagggggtgaagccccatcagtgccccttctgtgacttttcgaccaccagacggtaccggttagaggctcaccagtcccgacacacaggcattggccgcatcccctgcagctcttgcccccagacgtttggtaccaactcgaaactgcgcttgcaccggttaagggtacatgacaaaacacctacccacttctgtccactttgtgactatagtggctaccttcgccatgacatcactcgtcatgtcaacagctgccaccaaggcaccccagcctttgcctgctcccagtgtgaagcccagttcagctcagagacagcacttaagcagcatgctctgcgccgacaccccgagcctgcacagcctgcccctggctctcctgcagagaccactgagggccccctgcactgttcccgctgtgggttgctgtgccccagccctgccagcttacgaggacacacccgtaaacagcacccacggcttgagtgtggggcctgccaggaggccttccctagccgactggctctggatgagcaccggaggcagcagcatttcagccaccgctgtcagctctgtgactttgctgcccgggagcgggtgggcctggtaaagcactacctggaacagcatgaggagacttcagcagccgtggcagcctcagatggggatggggatgctggccagcccccgctacactgccccttttgtgacttcacatgccgccatcagctggtactagatcaccatgtgaaagggcatgggggcactcgtctctacaagtgcaccgattgtgcttacagcaccaagaaccgacagaagatcacctggcacagccgcatccacactggggaaaagccttaccactgtcacctctgcccctatgcctgtgctgatccctctcgtctcaagtaccacatgcggatccacaaggaggaacggaagtacctgtgccctgagtgtggctacaagtgcaagtgggtcaaccagctgaaataccacatgaccaagcatacaggactgaagccataccagtgtcccgagtgtgagtactgcaccaaccgggctgatgcactgcgtgtgcaccaggagacccggcatcgagaagcacgggctttcatgtgtgagcagtgtggcaaggccttcaagacgcgcttcctgctgcgcacccaccttcgcaagcacagtgaggccaaaccctatgtgtgcaatgtgtgccaccgtgctttccgctgggctgctggcctgcgccatcatgccctcacccacaccgaccgccaccccttcttttgccgcctctgcaactacaaggccaagcaaaagttccaggtggtcaagcacgtacgcaggcaccaccctgaccaagccgacccaaaccagggtgtgggcaaagaccccaccacccccacagtgcacctgcatgatgtgcagctggaggatcccagccctcctgctcctgccgctccccacactggacctgagggctgaaagcctgccccacctcctgtataggaagagggtatggtctgagatgtgcagactgggaccagcgctagcctgaggagctcagagcctaaggaaagactggcttttggggtacaagggtgactagaaccttcctgggactctggctatagtactttgaaattatcacccatataaaagagggacatggactataacgttgatttcttattgctgtacattgcgtttttaacctgcaagttctcagtttcttcaccatcactccatcaaagtccctggctataagatctggattttacccactccatcttctctttccttcttactgtgtcaattcctattttctttcagaatcttctaaaaacagttgtatctaaccgcatgtgctgttgtgcctaatgctctataaagcatgttaaacagaaa

SEQ ID NO: 34871 - DNA, 373 bp, Homo sapiens
  source 1..373: mol_type = unassigned DNA
atcctagaggcggctgagccggaggcggtcgcacaaagcgggccccgggggccgttccagccgcggccgaccatagagatgcggctcccgccggctctgggtctggagccttccaggttacaaaccgcctttccagttcgctggctcttatgatccagctcctgcccgacgatgtggacactgtcatcacctccattttacagataggaaagctgaggcccagagaagcgaagcgactgtgtctgtccaagaccacgcgcatttaagaagccaaaacacacaagtcggtggtgatgacagacccccttttggactcacagccagccagtagcaccggggagatggatggactgtgccctgagctattgctgat

SEQ ID NO: 34872 - DNA, 1954 bp, Homo sapiens
  source 1..1954: mol_type = unassigned DNA
gcgggttgcggggcctgggggccggacggctgtttcctgtcctggtgcatggtggtcggacgaaggaattgttggaaaattttctcggaggtagaagatgttgttagcccaaataaatcgagattctcagggaatgacagagtttcctggaggagggatggaggcgcaacatgttacgctgtgcttgacagaggcagtcaccgtggcagatgcaaaactcatagatggccaggtcattcagttggaagatggttctgcggcctatgttcaacatgtacccatacctaaaagtacaggggacagtttgcgtctagaggatggtcaagcagtacagttagaagatggtaccacagcatttattcaccacacctccaaagatagttatgaccagagtgcattacaggcggttcagctggaagatggtaccacagcttatatccaccatgcagtgcaagtcccgcagtctgacaccatcttggcaattcaggctgatgggacagtggcaggtctgcacactggggatgctacaattgaccctgacaccatcagtgctttggaacagtatgcagcaaaggtgtccattgatggaagtgaaagtgtagcaggtactggaatgattggagaaaatgagcaagagaaaaaaatgcagattgttttacaaggacatgctacaagagtaactgctaaatctcaacagagtggagagaaggcatttcgatgtgaatatgatggatgtggaaaattatatacaacagctcatcatctcaaggtccatgagaggtcacacacaggagatcggccttatcagtgtgagcatgcaggctgtgggaaggcatttgcaacaggttatggattaaaaagtcacgtcagaactcatacaggagaaaagccatatcggtgttcggaagataattgtactaaatctttcaaaacttcaggagatctacagaaacacatcagaactcatacaggagaaaggccctttaagtgtcccttcgaaggctgcggtcggtcctttacaacatcaaatatcagaaaagtgcacgttaggacacacacaggagaaagaccttattactgcacagagccaggatgtgggagggcatttgccagtgcaacaaattataaaaaccatgtgaggatacacacaggagaaaagccatatgtttgtacagttcctgggtgtgacaaaaggtttacagaatattccagtttgtacaaacatcatgttgtccacactcattccaaaccttacaactgtaaccactgtgggaagacatacaagcagatctccacgctggccatgcacaaacggacagcccacaacgacactgagcccatcgaggaggagcaggaagccttctttgagccgcccccaggtcaaggtgaagatgttcttaaagggtcccagattacgtatgttacaggtgtagaaggggacgacgttgtttctacacaagtagccacagtaacccaatctggactgagtcaacaagttacactcatatcccaggatgggactcagcatgtcaacatatctcaagctgacatgcaggccattggcaacaccatcacaatggtaacgcaggatggcacgcccatcacagtccccgcccatgatgcagtcatctcctcagcaggaacgcactctgttgctatggttactgctgagggtacagaaggggaacaggttgcaattgtagctcaagacttggcagcattccatactgcctcatcagaaatggggcaccagcagcatagccatcacttagtaaccacagaaaccagacctctgaccttagtagcaacatccaatggcacccagattgcagttcagcttggagaacagccatctctggaagaagccatcagaatagcgtctagaatccaacaaggagaaacgccagggttggatgattaatcctcagaacaatggagcaataaagcagaagga

SEQ ID NO: 34873 - DNA, 2947 bp, Homo sapiens
  source 1..2947: mol_type = unassigned DNA
gggcgggcctcagacacactatgcgggttgcggggcctgggggccggacggctgtttcctgtcctggtgcatggtggtcggacgaaggaattgttggaaaattttctcggaggtagaagatgttgttagcccaaataaatcgagattctcagggaatgacagagtttcctggaggagggatggaggcgcaacatgttacgctgtgcttgacagaggcagtcaccgtggcagatggtgacaacttagaaaatatggaaggcgtaagcttgcaagcagtaacacttgcagatggttctactgcttacatacaacacaattctaaagatgcaaaactcatagatggccaggtcattcagttggaagatggttctgcggcctatgttcaacatgtacccatacctaaaagtacaggggacagtttgcgtctagaggatggtcaagcagtacagttagaagatggtaccacagcatttattcaccacacctccaaagatagttatgaccagagtgcattacaggcggttcagctggaagatggtaccacagcttatatccaccatgcagtgcaagtcccgcagtctgacaccatcttggcaattcaggctgatgggacagtggcaggtctgcacactggggatgctacaattgaccctgacaccatcagtgctttggaacagtatgcagcaaaggtgtccattgatggaagtgaaagtgtagcaggtactggaatgattggagaaaatgagcaagagaaaaaaatgcagattgttttacaaggacatgctacaagagtaactgctaaatctcaacagagtggagagaaggcatttcgatgtgaatatgatggatgtggaaaattatatacaacagctcatcatctcaaggtccatgagaggtcacacacaggagatcggccttatcagtgtgagcatgcaggctgtgggaaggcatttgcaacaggttatggattaaaaagtcacgtcagaactcatacaggagaaaagccatatcggtgttcggaagataattgtactaaatctttcaaaacttcaggagatctacagaaacacatcagaactcatacaggagaaaggccctttaagtgtcccttcgaaggctgcggtcggtcctttacaacatcaaatatcagaaaagtgcacgttaggacacacacaggagaaagaccttattactgcacagagccaggatgtgggagggcatttgccagtgcaacaaattataaaaaccatgtgaggatacacacaggagaaaagccatatgtttgtacagttcctgggtgtgacaaaaggtttacagaatattccagtttgtacaaacatcatgttgtccacactcattccaaaccttacaactgtaaccactgtgggaagacatacaagcagatctccacgctggccatgcacaaacggacagcccacaacgacactgagcccatcgaggaggagcaggaagccttctttgagccgcccccaggtcaaggtgaagatgttcttaaagggtcccagattacgtatgttacaggtgtagaaggggacgacgttgtttctacacaagtagccacagtaacccaatctggactgagtcaacaagttacactcatatcccaggatgggactcagcatgtcaacatatctcaagctgacatgcaggccattggcaacaccatcacaatggtaacgcaggatggcacgcccatcacagtccccgcccatgatgcagtcatctcctcagcaggaacgcactctgttgctatggttactgctgagggtacagaaggggaacaggttgcaattgtagctcaagacttggcagcattccatactgcctcatcagaaatggggcaccagcagcatagccatcacttagtaaccacagaaaccagacctctgaccttagtagcaacatccaatggcacccagattgcagttcagcttggagaacagccatctctggaagaagccatcagaatagcgtctagaatccaacaaggagaaacgccagggttggatgattaatcctcagaacaatggagcaataaagcagaaggagtctttcatcttctggcagcagaaatccatgaagcccgggcccaggaaaattagaagttttccattcctgatacactgtacacatttttatgcgagagtggagaacattttattcttgacacttttgtgtatataacccttggaatagattctcagagtgattcattgtgtacaaggaagtatgaaattagggcaatacagtaaattttcatgttactcttttatcagatcacaaactcctagagtctacatgcaagactagtaaagtcttatggagtcttatgatggatttttaacttcccgtggaaaaaaaaataaaggctgtatctaaaatatcaaaggttctatatgtcacacaatcgtaattccaaaagccattatggataataaagggtgtaaagccttcagatatttccccagttagtagagtgtctgcggtttttgttctactatatgcttgtccatttttatttgtatctcatggtttgcagactgtttgaataatttatagtttcccatccctgttaaaaaccagctcttcaagctgaaatgctaattatattggcattacattgaattatgtacaaaattataaaatttggttatttaaaattaaaaagttaaatccagtggttttgttaaagattttgcttagtattcaatttttattactgttttttaaaaataatgaatcatcaaagtttaaccacaggctggtgcccgggataacagtactgtaattggaaatggctttactctgaaaattaggttagtgggttggtgtaaattatttatttttgcttatgtacttttgttttaaagcttatttaccccaaagtttattattaattttgaatacagcaatttttaaaatgtta

SEQ ID NO: 34874 - DNA, 554 bp, Homo sapiens
  source 1..554: mol_type = unassigned DNA
gttggaaaattttctcggagaaacgtggcatggctgcattgaactgtgcctctactacatggttttatttttaaaataaaaaaccactccaccctcatagcatagttccatttctggaaggtagaagatgttgttagcccaaataaatcgagattctcagggaatgacagagtttcctggaggagggatggaggcgcaacatgttacgctgtgcttgacagaggcagtcaccgtggcagatggtgacaacttagaaaatatggaaggcgtaagcttgcaagcagtaacacttgcagatggttctactgcttacatacaacacaattctaaagatgcaaaactcatagatggccaggtcattcagttggaagatggttctgcggcctatgttcaacatgtacccatacctaaaagtagggacagtttgcgtctagaggatggtcaagcagtacagttagaagatggtaccacagcatttattcaccacacctccaaagatagttatgaccagagtgcattacaggcggttcagctggaagatggtaccacagctt

SEQ ID NO: 34875 - DNA, 551 bp, Homo sapiens
  source 1..551: mol_type = unassigned DNA
aaaaaaaggttactgaggtctaacatcggatattagaaatttacaattttatcctcccttttctccagttttggccaaaagagtgaacaaattcttataagtctctttgaaacgtattattgtggaacgcgaactagtttttattccttccccttttgctttggacatttgttttttccacataataacgaagttaaaaagaggaaagaagaataccattgccagcccattatttgtttaaaatcagcgtcagcctttgctttggaagtgtctaaatcagctgatataatcaagtagaagatgttgttagcccaaataaatcgagattctcagggaatgacagagtttcctggaggagggatggaggcgcaacatgttacgctgtgcttgacagaggcagtcaccgtggcagatggtgacaacttagaaaatatggaaggcgtaagcttgcaagcagtaacacttgcagatggttctactgcttacatacaacacaattctaaagatgcaaaactcatagatggccaggtcattcagttggaagatggttc

SEQ ID NO: 34876 - DNA, 265 bp, Homo sapiens
  source 1..265: mol_type = unassigned DNA
cagaagatacttgtgttttcctgtagttgacaaaaaacggtagaagatgttgttagcccaaataaatcgagattctcagggaatgacagagtttcctggaggagggatggaggcgcaacatgttacgctgtgcttgacagaggcagtcaccgtggcagatggtgacaacttagaaaatatggaaggcgtaagcttgcaagcagtaacacttgcagatggttctactgcttacatacaacacaattctaaagatgcaaaactcata

SEQ ID NO: 34877 - DNA, 644 bp, Homo sapiens
  source 1..644: mol_type = unassigned DNA
ggccggacggctgtttcctgtcctggtgcatggtggtcggacgaaggaattgttggaaaattttctcggagaagatgttgttagcccaaataaatcgagattctcagggaatgacagagtttcctggaggagggatggaggcgcaacatgttacgctgtgcttgacagaggcagtcaccgtggcagatggtgacaacttagaaaatatggaaggcgtaagcttgcaagcagtaacacttgcagatggttctactgcttacatacaacacaattctaaagatgcaaaactcatagatggccaggtcattcagttggaagatggttctgcggcctatgttcaacatgtacccatacctaaaagtacaggggacagtttgcgtctagaggatggtcaagcagtacagttagaagatggtaccacagcatttattcaccacacctccaaagatagttatgaccagagtgcattacaggcggttcagctggaagatggtaccacagcttatatccaccatgcagtgcaagtcccgcagtctgacaccatcttggcaattcaggctgatgggacagtggcaggtctgcacactggggatgctacaattgaccctgacaccatcagtgctttggaacagtatgcagcaaag

SEQ ID NO: 34878 - DNA, 555 bp, Homo sapiens
  source 1..555: mol_type = unassigned DNA
accgcatggcgatgcccgggagactggagaagctcaggcaggcttggaagccaatccccggcatacagcagctctcgggaatgcagagccctagagcaagaccaagggcctcggccgacactgagagcctccagggagaggtagaagatgttgttagcccaaataaatcgagattctcagggaatgacagagtttcctggaggagggatggaggcgcaacatgttacgctgtgcttgacagaggcagtcaccgtggcagatggtgacaacttagaaaatatggaaggcgtaagcttgcaagcagtaacacttgcagatggttctactgcttacatacaacacaattctaaagatgcaaaactcatagatggccaggtcattcagttggaagatggttctgcggcctatgttcaacatgtacccatacctaaaagtacaggggacagtttgcgtctagaggatggtcaagcagtacagttagaagatggtaccacagcatttattcaccacacctccaaagatagttatgaccagagtgcattacaggcggttcag

SEQ ID NO: 34879 - DNA, 575 bp, Homo sapiens
  source 1..575: mol_type = unassigned DNA
cctggtgcatggtggtcggacgaaggaattgttggaaaattttctcggagatgttgttagcccaaataaatcgagattctcagggaatgacagagtttcctggaggagggatggaggcgcaacatgttacgctgtgcttgacagaggcagtcaccgtggcagatggtgacaacttagaaaatatggaaggcgtaagcttgcaagcagtaacacttgcagatggttctactgcttacatacaacacaattctaaagatgcaaaactcatagatggccaggtcattcagttggaagatggttctgcggcctatgttcaacatgtacccatacctaaaagtacaggggacagtttgcgtctagaggatggtcaagcagtacagttagaagatggtaccacagcatttattcaccacacctccaaagatagttatgaccagagtgcattacaggcggttcagctggaagatggtaccacagcttatatccaccatgcagtgcaagtcccgcagtctgacaccatcttggcaattcaggctgatgggacagtggcaggtctgcacactggggatgctaca

SEQ ID NO: 34880 - DNA, 3854 bp, Homo sapiens
  source 1..3854: mol_type = unassigned DNA
aggactcccagacccctcaccttctgcctcccctggtcgcgtccgggtccttgcggagctaactagctcgccacgacgtcaagaacgacgtaacgtcaggccgctgtgggctctgggaattgtagtccagagctagatcggccacggacagaatggcgttctcttatctctgagtcggggcctggctcgttttgacatttttgcgcccacgagtcttcggagagggcgtcgccactccagaccttccagcaagcttgaagtcatctgacgctaaaggactacttacctcaagagctccatcgtcacagaaggaggcggccaagttcgcggggggaggggaggagacagagagtcgaccagtaaagcctcaagggaaatgtagtccaaggcctgagaagcgacgttgctggtaatagaaggtaattcagtaccagcctgggcctggccgcggtgaccgaggcgggccgcgtcgcggagacttctgggagtgcttcctcgctctccgagtgcgcaagcgcagcgcaccgagtggacattttggtctttgtccgcgggtcagtacggcccctgggtccacgtggcgcgaaagtaggaggaagacataggccaaggagccagacttcctgtgttaactccttcctctgccactttttaccttggggacctcagttaatatgatcctctgttgaagcaagaagacaaactgtatggtggagaaagaagtgggaaggatctgcgcggaagaagcctgagaagatgatgcacagatagagaggcaccaggacttgagaggcaccaggacttgggaggcatgttgatccatctccaggaaagactgagaaaaagagcgttgaatataagaaaaaatacttcctctgttctcagatcgtatttgttttaaggccacacctttttgaagttttcagtttgaaacacaacctggactgaaatcatgagggaggttgtgtaggaaagaatcatcaagggacttagttgggagcttctctaccacagcttactccttatggtattaaccccctttaagtgtaaatgtctttggtttaaaacgtttgtacctcatctgttaccagagtgttcatactggagagaaaccctatgaatttactgaatgtgggggaactgttactcatatgttgcatttcgtcgaacgtgcaagtcatgctgaagagaaaccctgtgcttctaaggagtattgacaagcccttagctagatgacaatctcattgagaagcagaaaattcatgctggagagaaactagtgaaggtagcaatacttcattgaatattagaaaatttttctagagagaaagcattgaatatactgagtatgataacatttcctctcaaaccttatcccttactctgcatttgggagatcatacacagagaagccttataaatgtaagagatgtggaaatatcttcagccaaaagtaaatcctcactcatcaagaaatttttactggagagaaaccttgtgaatgtgggaaagcttccattcagatgtcacacctcagccagcagagaatttacagtggggaaaacccctttgcctgtaaggtatgtggaaaagtcttcagccacaaatcaaacctcactgagcatgagcattttcacacgagagagaaaccttttgaatgtaacgagtgtggaaaagcctttagccaaaagcagtatgtcattaaacatcagaacacccatactggcgagaagcttttcgaatgtaatgaatgtggaaaatcatttagccagaaggaaaacctccttacgcaccagaaaattcacactggagaaaaaccttttgagtgtaaagattgcgggaaagctttcattcagaagtcaaacctcatcagacaccagagaactcacacaggagagaagccctttgtatgtaaggagtgtggaaaaaccttcagtggcaaatccaaccttactgagcatgagaaaatccatattggagagaagccttttaaatgtagtgaatgtggaacagcctttggccagaagaagtacctcataaaacatcagaacattcacactggagagaaaccctatgaatgtaacgaatgtggaaaagccttctctcagcgaacatcacttattgtacatgtgaggattcattcaggtgataaaccttacgaatgcaatgtttgtggaaaagccttctctcagagctcatctctcactgtgcatgtgagaagccatacaggggagaagccctatggttgtaatgaatgtgggaaagctttctctcagttctcaacccttgctctgcatttgagaatacacacaggtaagaagccttatcagtgcagtgaatgtgggaaagctttcagccagaagtcacaccacattagacaccagaaaattcatactcactaaaaaccccatgaaagccttgaaagtgggaaagctttcattagaaatttgcacctcatcatgccccagaaataatccttctgaagcaaagcaccacgaatgaggttaactttaacaagtactaaaaacttaagggacaccagaaaatttgtactgaagagaaagacatgcatatgattaaaaccctgtgtccaacagagaaacctgcagcagagataatggtgaaagtttaggcacattttcactaaaagtgggaacagaaaatggaggcctgttttttattgctaccaccatagatctggagatcttcgccagtaacaagaaaaattaagttgtaaatattggaaaggaacagacaaaaatagatgacatggtcatctacaactaatattaagactcctgtggtattgattgagcagagcagaagagatttcaaaaaaagacctatgcatttattagaatttggaatatgatacaagtggcatcaggaaatgaggaaataatggaactattttttttaagtggaggtagtttgttctccaagggggaaaaatagaccatgaactatacacaaaagtgaatccagagattaaaaacagaaatatggaaaagctatgtactaaaatgcatatgaccttgggaatagggaaacattccttggaacaatttgagaaatacttagcggttctacttatgagtatgaatgctcaggaaatacgcactaggatatttactgtggcttgatttgtagtagccaaaaattagaaacaactgagaaagcccatcacgaacaatatgggaaattcttatgtaatactatatatctgtaaaatgcaacaaatgaaatccacatgtattaacagaaagatcccagaattgttgaggggggatcaagttgcagaatgatacagatagtacaatgacttttttgtaaatttgaattaaaagtttcctcataaaactcagtactatctattggtaatggatgcatatatgtatgtacatgtttttgaaacggattggaaggatacagaccaaactcttgatagtggtcacctgtgaagagtggagaagggaaaataatgagtgtgggaggtgggatgggtattggttaaaggggacttcagctttttatataaacatccacttctctttcaaaagacttcaagtaaatataagaagatactgattgattctggattgtggtatagggatatcttgtcttattttttgtacttttctgtatttttaaaatttctcaaaataggaatgggagtgaggatgggaatgctgtatctgtggaagtcatgttatactggattcatttccaattaaatactaaacattttatagaaaatatttctaaaattttatcacggatgaatggatggacttgctctctatgtaatatgaaattaatctattttattaaaatttaaaaggacagcacaatcc

SEQ ID NO: 34881 - DNA, 3780 bp, Homo sapiens
  source 1..3780: mol_type = unassigned DNA
aggactcccagacccctcaccttctgcctcccctggtcgcgtccgggtccttgcggagctaactagctcgccacgacgtcaagaacgacgtaacgtcaggccgctgtgggctctgggaattgtagtccagagctagatcggccacggacagaatggcgttctcttatctctgagtcggggcctggctcgttttgacatttttgcgcccacgagtcttcggagagggcgtcgccactccagaccttccagcaagcttgaagtcatctgacgctaaaggactacttacctcaagagctccatcgtcacagaaggaggcggccaagttcgcggggggaggggaggagacagagagtcgaccagtaaagcctcaagggaaatgtagtccaaggcctgagaagcgacgttgctggtaatagaaggtaattcagtaccagcctgggcctggccgcggtgaccgaggcgggccgcgtcgcggagacttctgggagtgcttcctcgctctccgagtgcgcaagcgcagcgcaccgagtggacattttggtctttgtccgcgggtcagtacggcccctgggtccacgtggcgcgaaagtaggagttaatatgatcctctgttgaagcaagaagacaaactgtatggtggagaaagaagtgggaaggatctgcgcggaagaagcctgagaagatgatgcacagatagagaggcaccaggacttgagaggcaccaggacttgggaggcatgttgatccatctccaggaaagactgagaaaaagagcgttgaatataagaaaaaatacttcctctgttctcagatcgtatttgttttaaggccacacctttttgaagttttcagtttgaaacacaacctggactgaaatcatgagggaggttgtgtaggaaagaatcatcaagggacttagttgggagcttctctaccacagcttactccttatggtattaaccccctttaagtgtaaatgtctttggtttaaaacgtttgtacctcatctgttaccagagtgttcatactggagagaaaccctatgaatttactgaatgtgggggaactgttactcatatgttgcatttcgtcgaacgtgcaagtcatgctgaagagaaaccctgtgcttctaaggagtattgacaagcccttagctagatgacaatctcattgagaagcagaaaattcatgctggagagaaactagtgaaggtagcaatacttcattgaatattagaaaatttttctagagagaaagcattgaatatactgagtatgataacatttcctctcaaaccttatcccttactctgcatttgggagatcatacacagagaagccttataaatgtaagagatgtggaaatatcttcagccaaaagtaaatcctcactcatcaagaaatttttactggagagaaaccttgtgaatgtgggaaagcttccattcagatgtcacacctcagccagcagagaatttacagtggggaaaacccctttgcctgtaaggtatgtggaaaagtcttcagccacaaatcaaacctcactgagcatgagcattttcacacgagagagaaaccttttgaatgtaacgagtgtggaaaagcctttagccaaaagcagtatgtcattaaacatcagaacacccatactggcgagaagcttttcgaatgtaatgaatgtggaaaatcatttagccagaaggaaaacctccttacgcaccagaaaattcacactggagaaaaaccttttgagtgtaaagattgcgggaaagctttcattcagaagtcaaacctcatcagacaccagagaactcacacaggagagaagccctttgtatgtaaggagtgtggaaaaaccttcagtggcaaatccaaccttactgagcatgagaaaatccatattggagagaagccttttaaatgtagtgaatgtggaacagcctttggccagaagaagtacctcataaaacatcagaacattcacactggagagaaaccctatgaatgtaacgaatgtggaaaagccttctctcagcgaacatcacttattgtacatgtgaggattcattcaggtgataaaccttacgaatgcaatgtttgtggaaaagccttctctcagagctcatctctcactgtgcatgtgagaagccatacaggggagaagccctatggttgtaatgaatgtgggaaagctttctctcagttctcaacccttgctctgcatttgagaatacacacaggtaagaagccttatcagtgcagtgaatgtgggaaagctttcagccagaagtcacaccacattagacaccagaaaattcatactcactaaaaaccccatgaaagccttgaaagtgggaaagctttcattagaaatttgcacctcatcatgccccagaaataatccttctgaagcaaagcaccacgaatgaggttaactttaacaagtactaaaaacttaagggacaccagaaaatttgtactgaagagaaagacatgcatatgattaaaaccctgtgtccaacagagaaacctgcagcagagataatggtgaaagtttaggcacattttcactaaaagtgggaacagaaaatggaggcctgttttttattgctaccaccatagatctggagatcttcgccagtaacaagaaaaattaagttgtaaatattggaaaggaacagacaaaaatagatgacatggtcatctacaactaatattaagactcctgtggtattgattgagcagagcagaagagatttcaaaaaaagacctatgcatttattagaatttggaatatgatacaagtggcatcaggaaatgaggaaataatggaactattttttttaagtggaggtagtttgttctccaagggggaaaaatagaccatgaactatacacaaaagtgaatccagagattaaaaacagaaatatggaaaagctatgtactaaaatgcatatgaccttgggaatagggaaacattccttggaacaatttgagaaatacttagcggttctacttatgagtatgaatgctcaggaaatacgcactaggatatttactgtggcttgatttgtagtagccaaaaattagaaacaactgagaaagcccatcacgaacaatatgggaaattcttatgtaatactatatatctgtaaaatgcaacaaatgaaatccacatgtattaacagaaagatcccagaattgttgaggggggatcaagttgcagaatgatacagatagtacaatgacttttttgtaaatttgaattaaaagtttcctcataaaactcagtactatctattggtaatggatgcatatatgtatgtacatgtttttgaaacggattggaaggatacagaccaaactcttgatagtggtcacctgtgaagagtggagaagggaaaataatgagtgtgggaggtgggatgggtattggttaaaggggacttcagctttttatataaacatccacttctctttcaaaagacttcaagtaaatataagaagatactgattgattctggattgtggtatagggatatcttgtcttattttttgtacttttctgtatttttaaaatttctcaaaataggaatgggagtgaggatgggaatgctgtatctgtggaagtcatgttatactggattcatttccaattaaatactaaacattttatagaaaatatttctaaaattttatcacggatgaatggatggacttgctctctatgtaatatgaaattaatctattttattaaaatttaaaaggacagcacaatcc

SEQ ID NO: 34882 - DNA, 9651 bp, Homo sapiens
  source 1..9651: mol_type = unassigned DNA
ggcgaccgcggcggcgctctagctgcggcatgtctgcgtctctactgctctgggaggaggaagagaaggaggaagaggaggaggaggaggagggggaggaagaggagaaaggcgcaggggtgggagctgttgccgaagctgccacagcaaaagttctcccccctccccccttcccctcctctcaaggcccctagaaaggttggagctgccgccgcctgcagtcggtgaccgcgcgactcggcgcccgcccgcggatagagggaggaatcagcagcttggaaattcaagcacgtgatctggcgggatgggcgtttgcctaacgtatttaatggaggaatcggatggcataagtgattaaggtggtattgaggatttctgaagcctatgaaaggtagaaactcaaccatgatttctttttcaactctacagcattcctttccttgaagtcttcgtttttaccttagtctcgggcagttatacttaagcatgaacattgacgacaaactggaaggattgtttcttaaatgtggcggcatagacgaaatgcagtcttccaggacaatggttgtaatgggtggagtgtctggccagtctactgtgtctggagagctacaggattcagtacttcaagatcgaagtatgcctcaccaggagatccttgctgcagatgaagtgttacaagaaagtgaaatgagacaacaggatatgatatcacatgatgaactcatggtccatgaggagacagtgaaaaatgatgaagagcagatggaaacacatgaaagacttcctcaaggactacagtatgcacttaatgtccctataagcgtaaagcaggaaattacttttactgatgtatctgagcaactgatgagagacaaaaaacaaatcagagagccagtagacttacagaaaaagaagaagcggaaacaacgttctcccgcaaaaatccttacaataaatgaggatggatcacttggtttgaaaacccctaaatctcacgtttgtgagcactgcaatgctgcctttagaacgaactatcacttacagagacatgtcttcattcatacaggtgaaaaaccatttcaatgtagtcaatgtgacatgcgtttcatacagaagtacctgcttcagagacatgagaagattcatactggtgaaaaaccatttcgctgtgatgaatgtggtatgagattcatacaaaaatatcatatggaaaggcataagagaactcatagtggagaaaaaccttaccagtgtgaatactgtttacagtatttttccagaacagatcgtgtattgaaacataaacgtatgtgccatgaaaatcatgacaaaaaactaaatagatgtgccatcaaaggtggccttctgacatctgaggaagattctggcttttctacatcaccaaaagacaactcactgccaaaaaagaaaaggcagaaaacggagaaaaaatcatctggaatggacaaagagagtgctttggacaaatctgacctgaaaaaagacaaaaatgattacttgcctctttattcttcaagtactaaagtaaaagatgagtatatggttgcagaatatgctgttgaaatgccacattcgtcagttgggggctcgcatttagaagatgcgtcaggagaaatacacccacctaagttagttctcaaaaaaattaatagtaagagaagtctgaaacagccactggagcaaaatcaaacaatttcacctttatccacatatgaagagagcaaagtttcaaagtatgcttttgaacttgtggataaacaggctttactggactcagaaggcaatgctgacattgatcaggttgataatttgcaggaggggcccagtaaacctgtgcatagtagtactaattatgatgatgccatgcagtttttgaagaagaagcggtatcttcaagcagcaagtaacaacagcagggaatatgcgctgaatgtgggtaccatagcttctcagccttctgtaacacaagcagctgtggcaagtgtcattgatgaaagtaccacggcatccatattagagtcacaggcactgaatgtggagattaagagtaatcatgacaaaaatgttattccagatgaggtactgcagactctgttggatcattattcccacaaagctaatggacagcatgagatatccttcagtgttgcagatactgaagtgacttctagcatatcaataaattcttcagaagtaccagaggtcaccccgtcagagaatgttggatcaagctcccaagcatcctcatcagataaagccaacatgttgcaggaatactccaagtttctgcagcaggctttggacagaactagccaaaatgatgcctatttgaatagcccgagccttaactttgtgactgataaccagaccctcccaaatcagccagcattctcttccatagacaagcaggtctatgccaccatgcccatcaatagctttcgatcaggaatgaattctccactaagaacaactccagataagtcccactttggactaatagttggtgattcacagcactcatttcccttttcaggtgatgagacaaaccatgcttctgccacatcaacacaggactttctggatcaagtgacttctcagaagaaagctgaggcccagcctgtccaccaagcttaccaaatgagctcctttgaacagcccttccgtgctccctatcatggatcaagagctggaatagctactcaatttagcactgccaatggacaggtgaaccttcggggaccagggacaagtgctgaattttcagaatttcccttggtgaatgtaaatgataatagagctgggatgacatcttcacctgatgccacaactggccagacttttggctaaaaaaaaaaaaaaagtgtaaataatactggcactttagaacagattaatcaagagtggggttactctgtgtaaatggagtgctgtacagatttaagagcaatgcgtaataacaagttaagctgatatgaatagcaagataatccaataactgcatttcgtttggttagtcagcattctttgaactgccttacatgttgtcacctttatagaagcaatgcattacttgttttagatcagaaacttgctattccacccacaccaagttaaaaaggaaaaaaaaaagactttcgcacaattgtttcctaactgataacattgtacattcttaggagattagtaattgtgtgaaatttactcatactgtttctaagtttttcagcatagtcattgcacttcagcagggaatctgagtatactttacagacagagtgaacttaaaagtttaatgtcaagagattatggcttaaataaattagtgtgtcctatagggggaaaaaaaccaagaaaccaccttttaaaaagaatgatatgccatatacccttgattttcattttgcattatattgacgtgtttttttgaaggaaaaaaagtaataaaaatctgatagtctaagactccactatttaaaagcctaattactttaaaaatatgcatactttcagaacttttaccaaaacacacaactgttgaagcagtcacttctctatggaagtatgcatattggtgtcagtttctttgtacagttgtacttagatattttttatgatttttcatgtgcaggtatcaaggttttgaagttttagtaaaagaaattctgtagattacattcccaagaacataatgcttacacaaaatgtatattccacgttttaaagcttaattgtattttactttacatatacacttcagttaacatagagcacttagaatctatttggtatttttgatttctcaaagtaaaaaaaaaattagatttttaggtttgatatggttgtgtcataatcatctcgtaattgacaattttaacttttggcaataaaaggaaattgggatatctttggaactgtaaaacctggtttaatctttttctttctagactcttgatagattggataattaaacagtatccagagaaactaaagaaatgggcattttaattgcatattttatcttgagttactttttaatgaacactgctcattacaactttacaaaccaaaagtgtttactaattccagtaactaccatttctttttcagctagatgagtgatcggaaaatttttgttgcatttcaaaatctaaataaactacagactttatccttataccatgaatgtttttttttaatactctgtcttaaaataatacagcatggtacaataaatagtgcttttatgtatatatacacacacacacttttctgaagaatgatggtttgagttatgcgttgggcagttttgatttttggaagttatattagttattgactctttgttacaactttttcatttttacattttaaattttctgccatcgttgtcacaatgcacatcctgatatagcaccagtgaaaatctaaaattaatacccttggaaaatgaaaatattcttaatttccattttgactcttatactggccctatagctctgcagtctttgtttcaatatagaatatgttatccatttaaattattttttcttttatttaatgttatcccaagactgttctcataaagaaagggaagaaataactatccacccttaacatccttcatttattttgaatatattggtgtttttatgataaggaatataaattatatttaatgtggtttcctgtatactttggttattaagttttgcttgaaatagtagttttcccgtttgacagctttctttgctgccaaagttttcaagaatttaagacttctttgaagtaaatatttaagttctgccattattgactcttaagattgtgtgtgttgtgttgtgcattacataattacaaaaaggcttcattcaggtgatacgttaaaaatggaactgtgctcaccctaaataggcattggtatttttctcttttggtgagagtaggcatttatttcttgagttgttttggagcctgatcaaaaattttgttcatggagaacttgatgcaattttgatacagtggagaggtttttttcggttgttttaacatcaccagcatagtttttagaatgtgactcttgctgagcatttagggtgagcttgggaaggaaggcctttgaaaatggtagttatgcaagcagactttcaggtgttgcattcctgttttcaacacatttctttaaatctacataatggcagacttttctaccaggttataagcagtttttagataagtgatactcagccagcataacttattgacttaccatttacgtatagtcatcactctcttactgtgaaattccaaatgcctaccagagttaccttgttctatcataatatgacaaacatctcaacagttttggatttccccactttggttcagaaggttatttaatttctatctgggcattaatggagaaaataagtagccttgtgtgctgcttcagattgaaacatggaggatatgagatattcttctgcaattcatgtttctcatttctcaaagtgagcacattgttctataaaaacatgctggtacacccttaaacttttgatcaatctgagtgaggtgtgcttttcctcttgggacctactcacgtttgaagattggaaacatcacgttaggcgaggcagtatctcttgaacatcttctaaagggttttttaaaaccttattctcacatatttcatttgtcttgaatatttaagtggctcttaaacgttttgggtctacatgcaaatgtggtacttaacaaggtaggaatccatcttcttagctctggctgagggtgccagccatcggtcaggtcatttttatctcaagaggcagaaggcagttatgtcaagaattgtgctcagggcaggatttcgtttccacagaggagagacacttgcagagtgccagctaggttagatcttttgccgcttctttcatttgattaatttgggtttttaaagggctgtttaaaaaaaaaaaaaaaaggccgggaaactttaaaagtaggcattactgtagtactgcatttcttagaacattttaaactagaactcatttttttttcacagtatatttacttgaagaagcactataataatcattgagaagtattttgagtctgaaatttaatttaattttccgtttcaaattgctttatttcagggaaataattttccagttgttttgctatattctgcaaataaaaaccgtgtttccttttttcacttaaactttggtaggaaacaaactaaagcagacaaacatttcttgttatgtttgttgctttctttaatccaatggataaaaaagtaaaaccctgtaaacattattttatttttttatgcaataccatgctgtaaatatggttcatcaaataaggatgtacctatgattgaatctttaattctgcacagttagagtttatatataaacgtgtcttgacaatcaaggacttttatgtgagtcttcctttatgatgtttattaatgttatgcattccatttgttttgaagtgagtaccaatgtgctaatttgtattgtctgaaagtatgtaatgtttttacagcttgtttttaagaatctgtaaatatgtacaaacaaatcacagtactgctttatgttagaaggcatatgatgttgtactgtatgtaagcaataatacatagcagtgctaactttacaagtagcatcaggaaagttctaaaaacatttcagagttattaattatccttatttcatttaataatgattatctttaatcagtttttataagcaaattccattgttcctcctattggaacgtaacactgtttacacagcataattgaagttgcaggggagacaggctaaatctgacttcatctgtactcactttcactaagcattgaatggccttaccactcttctgcaagatggaggaagaccgcaaaacttagtgcccatcacactgaaggaagggatgtggttttttttcctgcttctgtactgctacctaactttgtgatttgctttggattttaatatttgtttctgttttagattcaagcccgtaagttttgaggtgacttcagctccattgtgaaatagatagttctcttcatatttcataactacatttcaataattctaaactttctacattgatttttagatacttatttttcaagcttggtttctcagctgatcagatgaatttattcaacttcaatacaaagaaagacaaacctattatagtttcaagtgagtagatattatactgtacaggacagctatttgaacacacacatcactgctttagaaataaaaccgccaatttataaatgtatatgacctacattttataggaaaaaatgtttttaaatgctagtcatttatataatgtgctttgaaggatttgctagtccacttctgtcactttttagtacactggtatcttttatatgtaatgtatgctttttattattgtagcaaagcatttcagtagaaagaattttgcaacaatatgggggaaatttttcattgttggatttgaattatactggattttatctgtgtagtcttacttgtctttattttaatgctgtctgaagggaacttggtatccaaataaagcaggtaacctcattttacttcaagggcatactgtgtagtgctgaatttaatctgaaaatctgatgattttgaaaagaaaaacaagtttataaacattgtacagaagaaattaaatgtgtgtgatggaaatcctgatggtggagcacgttgaattttctgatatatagtgttattttcctgggatcccctatgccttctttgtatttcaactaataaaggaaaaaccctgtcattaaaactggtaagataataggatattctgattatacagtattactattcctatcccattttctgaccttttctcaatcactgtaaatttttattttctatttcctattgataattaaatatgtacataatatagacactgttgtatagaactaaatgaattgggttgctatgcttgagtgggtagtgaaatggaaatatttgatgaatactgagagttcctaaaatgctagagcaaatttccgagggaaaggggggcatcgtgtgtcttgggaaggttgcagcaggttgtttcttcaactccctaagaaatcattgggaaggactcaactgcaaactcgggatcagatacaaaatgggtctttccttcccctctcccccaaaaaataggagcactaaattttaaaatctactcaggtgacagttgctttgcaatgaaacttatcacattgaaattttcagtgttaaataaaaagagatttgtgatatttttaaatataaacttttacatcagtagtcagcagcctgacaattgaaatttggtaagtcgatatattttaaaatattttgctctccaaatagaattgtttttaaacaattgggaggttttttgtttctttaaatatgttttaattgtcattgtaaaaacaaaatcttgcttgaccctatattatgccatgaatgaattgctgagcctttataatacagtgacagcttgtttcatgcatagtcatggaacatagagatgttctttaaactgacctattgataagaggtttaatgagtttcacggctttcaacactattgtcatatagttatctttgccatttggagtttataaaaccattttatgtattgtgatactaaaggaagttgttttgctttactttaaattgaattattagactaatatttgcaaattctgcattttaaatgtggacactggctgtttgaaaaataaaatatagaatacagttttatggataattttcgagctgaatttttcacaatattctgaaccaaataacgaatggtaaatatgcaaaaatcatggtgcatagatataaccgtaaagagaaaagaatttctgtgtggaattaacagttacacaaattgggtaacaattatcagggcctttattatagctttatgtggaatgttattctaaaatgcaagagtcaaatgttactgtcattgaatattttagacttgaaacgtgtttatcatagagcgaagaaaatatgtgttcttttctttacagataagactctgttaacccactgtcagcatacgtgggatttcttttcttttttctttcattagtggagatttgttttcatccatctaccaccttgccagtaccctagcttgtgaccagcgggatgcattgtaagaaagttgtctgtggttaggagtgcagtctgggtccatggaacaaatttaaactaattggccctcgcaatgatcagtcctaggaccctggccttattattagcatggtgctttaaccaattgtacataataataccactgatagtctactaatgcatttcctagatcccagtttttcttgaatgattaggaatggtggggagaggggaggggagatattctacatgatacttctccaatcttctaaagattataagaaaaaataaaaaattgaagtcacttgaattaatgtgttgtcattgagtcttactcgacaatttatcatgcacaaagtgattatgaagattttcctgattatatgtttggattgaatttaaaaattttttttttcag

SEQ ID NO: 34883 - DNA, 566 bp, Homo sapiens
  source 1..566: mol_type = unassigned DNA
ctgtgttctgcagcgttttgttggatactattgataactggttctttaaggaaaggggcttaaacaggccttggtttgtagaggatagagggaggaatcagcagcttggaaattcaagcacgtgatctggcgggatgggcgtttgcctaacgtatttaatggaggaatcggatggcataagtgattaaggtggtattgaggatttctgaagcctatgaaaggtagaaactcaaccatgatttctttttcaactctacagcattcctttccttgaagtcttcgtttttaccttagtctcgggcagttatacttaagcatgaacattgacgacaaactggaaggattgtttcttaaatgtggcggcatagacgaaatgcagtcttccaggacaatggttgtaatgggtggagtgtctggccagtctactgtgtctggagagctacaggattcagtacttcaagatcgaagtatgcctcaccaggagatccttgctgcagatgaagtgttacaagaaagtgaaatgagacaacaggatatgatatcacatgatgaactcatggtccatg

SEQ ID NO: 34884 - DNA, 1025 bp, Homo sapiens
  source 1..1025: mol_type = unassigned DNA
ggaggaggaggaggagggggaggaagaggagaaaggcgcaggggtgggagctgttgccgaagctgccacagcaaaagttctcccccctccccccttcccctcctctcaaggcccctagaaaggttggagctgccgccgcctgcagtcggtgaccgcgcgactcggcgcccgcccgcggatagagggaggaatcagcagcttggaaattcaagcacgtgatctggcgggatgggcgtttgcctaacgtatttaatggaggaatcggatggcataagtgattaaggtggtattgaggatttctgaagcctatgaaaggtgaaaaaccatttcaatgtagtcaatgtgacatgcgtttcatacagaagtacctgcttcagagacatgagaagattcatactggtgaaaaaccatttcgctgtgatgaatgtggtgatgagacaaaccatgcttctgccacatcaacacaggactttctggatcaagtgacttctcagaagaaagctgaggcccagcctgtccaccaagcttaccaaatgagctcctttgaacagcccttccgtgctccctatcatggatcaagagctggaatagctactcaatttagcactgccaatggacaggtgaaccttcggggaccagggacaagtgctgaattttcagaatttcccttggtgaatgtaaatgataatagagctgggatgacatcttcacctgatgccacaactggccagacttttggctaaaaaaaaaaaaaaagtgtaaataatactggcactttagaacagattaatcaagagtggggttactctgtgtaaatggagtgctgtacagatttaagagcaatgcgtaataacaagttaagctgatatgaatagcaagataatccaataactgcatttcgtttggttagtcagcattctttgaactgccttacatgttgtcacctttatagaagcaatgcattacttgttttagatcagaaacttgctattccacccacaccaagttaaaaaggaaaaaaaaaa

SEQ ID NO: 34885 - DNA, 566 bp, Homo sapiens
  source 1..566: mol_type = unassigned DNA
aggagggggaggaagaggagaaaggcgcaggggtgggagctgttgccgaagctgccacagcaaaagttctcccccctccccccttcccctcctctcaaggcccctagaaaggttggagctgccgccgcctgcagtcggtgaccgcgcgactcggcgcccgcccgcggcacacctctacattgtgttcagtgcctagtgtaattctgggcatgtattctagacagagtagatcggattggttctggcattgaataaggatagagggaggaatcagcagcttggaaattcaagcacgtgatctggcgggatgggcgtttgcctaacgtatttaatggaggaatcggatggcataagtgattaaggtggtattgaggatttctgaagcctatgaaaggtagaaactcaaccatgatttctttttcaactctacagcattcctttccttgaagtcttcgtttttaccttagtctcgggcagttatacttaagcatgaacattgacgacaaactggaaggattgtttcttaaatgtggcggcatagacgaaatgcagtcttccaggacaat

SEQ ID NO: 34886 - DNA, 2952 bp, Homo sapiens
  source 1..2952: mol_type = unassigned DNA
agaaaggcgcaggggtgggagctgttgccgaagctgccacagcaaaagttctcccccctccccccttcccctcctctcaaggcccctagaaaggttggagctgccgccgcctgcagtcggtgaccgcgcgactcggcgcccgcccgcggatagagggaggaatcagcagcttggaaattcaagcacgtgatctggcgggatgggcgtttgcctaacgtatttaatggaggaatcggatggcataagtgattaaggtggtattgaggatttctgaagcctatgaaaggcagttatacttaagcatgaacattgacgacaaactggaaggattgtttcttaaatgtggcggcatagacgaaatgcagtcttccaggacaatggttgtaatgggtggagtgtctggccagtctactgtgtctggagagctacaggattcagtacttcaagatcgaagtatgcctcaccaggagatccttgctgcagatgaagtgttacaagaaagtgaaatgagacaacaggatatgatatcacatgatgaactcatggtccatgaggagacagtgaaaaatgatgaagagcagatggaaacacatgaaagacttcctcaaggactacagtatgcacttaatgtccctataagcgtaaagcaggaaattacttttactgatgtatctgagcaactgatgagagacaaaaaacaaatcagagagccagtagacttacagaaaaagaagaagcggaaacaacgttctcccgcaaaaatccttacaataaatgaggatggatcacttggtttgaaaacccctaaatctcacgtttgtgagcactgcaatgctgcctttagaacgaactatcacttacagagacatgtcttcattcatacaggtgaaaaaccatttcaatgtagtcaatgtgacatgcgtttcatacagaagtacctgcttcagagacatgagaagattcatactggtgaaaaaccatttcgctgtgatgaatgtggtatgagattcatacaaaaatatcatatggaaaggcataagagaactcatagtggagaaaaaccttaccagtgtgaatactgtttacagtatttttccagaacagatcgtgtattgaaacataaacgtatgtgccatgaaaatcatgacaaaaaactaaatagatgtgccatcaaaggtggccttctgacatctgaggaagattctggcttttctacatcaccaaaagacaactcactgccaaaaaagaaaaggcagaaaacggagaaaaaatcatctggaatggacaaagagagtgctttggacaaatctgacctgaaaaaagacaaaaatgattacttgcctctttattcttcaagtactaaagtaaaagatgagtatatggttgcagaatatgctgttgaaatgccacattcgtcagttgggggctcgcatttagaagatgcgtcaggagaaatacacccacctaagttagttctcaaaaaaattaatagtaagagaagtctgaaacagccactggagcaaaatcaaacaatttcacctttatccacatatgaagagagcaaagtttcaaagtatgcttttgaacttgtggataaacaggctttactggactcagaaggcaatgctgacattgatcaggttgataatttgcaggaggggcccagtaaacctgtgcatagtagtactaattatgatgatgccatgcagtttttgaagaagaagcggtatcttcaagcagcaagtaacaacagcagggaatatgcgctgaatgtgggtaccatagcttctcagccttctgtaacacaagcagctgtggcaagtgtcattgatgaaagtaccacggcatccatattagagtcacaggcactgaatgtggagattaagagtaatcatgacaaaaatgttattccagatgaggtactgcagactctgttggatcattattcccacaaagctaatggacagcatgagatatccttcagtgttgcagatactgaagtgacttctagcatatcaataaattcttcagaagtaccagaggtcaccccgtcagagaatgttggatcaagctcccaagcatcctcatcagataaagccaacatgttgcaggaatactccaagtttctgcagcaggctttggacagaactagccaaaatgatgcctatttgaatagcccgagccttaactttgtgactgataaccagaccctcccaaatcagccagcattctcttccatagacaagcaggtctatgccaccatgcccatcaatagctttcgatcaggaatgaattctccactaagaacaactccagataagtcccactttggactaatagttggtgattcacagcactcatttcccttttcaggtgatgagacaaaccatgcttctgccacatcaacacaggactttctggatcaagtgacttctcagaagaaagctgaggcccagcctgtccaccaagcttaccaaatgagctcctttgaacagcccttccgtgctccctatcatggatcaagagctggaatagctactcaatttagcactgccaatggacaggtgaaccttcggggaccagggacaagtgctgaattttcagaatttcccttggtgaatgtaaatgataatagagctgggatgacatcttcacctgatgccacaactggccagacttttggctaaaaaaaaaaaaaaagtgtaaataatactggcactttagaacagattaatcaagagtggggttactctgtgtaaatggagtgctgtacagatttaagagcaatgcgtaataacaagttaagctgatatgaatagcaagataatccaataactgcatttcgtttggttagtcagcattctttgaactgccttacatgttgtcacctttatagaagcaatgcattacttgttttagatcagaaacttgctattccacccacaccaagtt

SEQ ID NO: 34887 - DNA, 2960 bp, Homo sapiens
  source 1..2960: mol_type = unassigned DNA
ctactgctctgggaggaggaagagaaggaggaagaggaggaggaggaggagggggaggaagaggagaaaggcgcaggggtgggagctgttgccgaagctgccacagcaaaagttctcccccctccccccttcccctcctctcaaggcccctagaaaggttggagctgccgccgcctgcagtcggtgaccgcgcgactcggcgcccgcccgcggatagagggaggaatcagcagcttggaaattcaagcacgtgatctggcgggatgggcgtttgcctaacgtatttaatggaggaatcggatggcataagtgattaaggtggtattgaggatttctgaagcctatgaaaggtagaaactcaaccatgatttctttttcaactctacagcattcctttccttgaagtcttcgtttttaccttagtctcggggtcttattctgtcacctaggtggagtgcagtagtacagtcacagctcactgcagccccaacatcctgggctcaagccatcctcctgcctcagcctcccaagtagctgggaccacaggcagttatacttaagcatgaacattgacgacaaactggaaggattgtttcttaaatgtggcggcatagacgaaatgcagtcttccaggacaatggttgtaatgggtggagtgtctggccagtctactgtgtctggagagctacaggattcagtacttcaagatcgaagtatgcctcaccaggagatccttgctgcagatgaagtgttacaagaaagtgaaatgagacaacaggatatgatatcacatgatgaactcatggtccatgaggagacagtgaaaaatgatgaagagcagatggaaacacatgaaagacttcctcaaggactacagtatgcacttaatgtccctataagcgtaaagcaggaaattacttttactgatgtatctgagcaactgatgagagacaaaaaacaaatcagagagccagtagacttacagaaaaagaagaagcggaaacaacgttctcccgcaaaaatccttacaataaatgaggatggatcacttggtttgaaaacccctaaatctcacgtttgtgagcactgcaatgctgcctttagaacgaactatcacttacagagacatgtcttcattcatacaggtgaaaaaccatttcaatgtagtcaatgtgacatgcgtttcatacagaagtacctgcttcagagacatgagaagattcatactggtgaaaaaccatttcgctgtgatgaatgtggtatgagattcatacaaaaatatcatatggaaaggcataagagaactcatagtggagaaaaaccttaccagtgtgaatactgtttacagtatttttccagaacagatcgtgtattgaaacataaacgtatgtgccatgaaaatcatgacaaaaaactaaatagatgtgccatcaaaggtggccttctgacatctgaggaagattctggcttttctacatcaccaaaagacaactcactgccaaaaaagaaaaggcagaaaacggagaaaaaatcatctggaatggacaaagagagtgctttggacaaatctgacctgaaaaaagacaaaaatgattacttgcctctttattcttcaagtactaaagtaaaagatgagtatatggttgcagaatatgctgttgaaatgccacattcgtcagttgggggctcgcatttagaagatgcgtcaggagaaatacacccacctaagttagttctcaaaaaaattaatagtaagagaagtctgaaacagccactggagcaaaatcaaacaatttcacctttatccacatatgaagagagcaaagtttcaaagtatgcttttgaacttgtggataaacaggctttactggactcagaaggcaatgctgacattgatcaggttgataatttgcaggaggggcccagtaaacctgtgcatagtagtactaattatgatgatgccatgcagtttttgaagaagaagcggtatcttcaagcagcaagtaacaacagcagggaatatgcgctgaatgtgggtaccatagcttctcagccttctgtaacacaagcagctgtggcaagtgtcattgatgaaagtaccacggcatccatattagagtcacaggcactgaatgtggagattaagagtaatcatgacaaaaatgttattccagatgaggtactgcagactctgttggatcattattcccacaaagctaatggacagcatgagatatccttcagtgttgcagatactgaagtgacttctagcatatcaataaattcttcagaagtaccagaggtcaccccgtcagagaatgttggatcaagctcccaagcatcctcatcagataaagccaacatgttgcaggaatactccaagtttctgcagcaggctttggacagaactagccaaaatgatgcctatttgaatagcccgagccttaactttgtgactgataaccagaccctcccaaatcagccagcattctcttccatagacaagcaggtctatgccaccatgcccatcaatagctttcgatcaggaatgaattctccactaagaacaactccagataagtcccactttggactaatagttggtgattcacagcactcatttcccttttcaggtgatgagacaaaccatgcttctgccacatcaacacaggactttctggatcaagtgacttctcagaagaaagctgaggcccagcctgtccaccaagcttaccaaatgagctcctttgaacagcccttccgtgctccctatcatggatcaagagctggaatagctactcaatttagcactgccaatggacaggtgaaccttcggggaccagggacaagtgctgaattttcagaatttcccttggtgaatgtaaatgataatagagctgggatgacatcttcacctgatgccacaactggccagacttttggctaaaaaaaaaaaaaaa

SEQ ID NO: 34888 - DNA, 2949 bp, Homo sapiens
  source 1..2949: mol_type = unassigned DNA
ggagaaaggcgcaggggtgggagctgttgccgaagctgccacagcaaaagttctcccccctccccccttcccctcctctcaaggcccctagaaaggttggagctgccgccgcctgcagtcggtgaccgcgcgactcggcgcccgcccgcggaatcggatggcataagtgattaaggtggtattgaggatttctgaagcctatgaaaggtagaaactcaaccatgatttctttttcaactctacagcattcctttccttgaagtcttcgtttttaccttagtctcgggcagttatacttaagcatgaacattgacgacaaactggaaggattgtttcttaaatgtggcggcatagacgaaatgcagtcttccaggacaatggttgtaatgggtggagtgtctggccagtctactgtgtctggagagctacaggattcagtacttcaagatcgaagtatgcctcaccaggagatccttgctgcagatgaagtgttacaagaaagtgaaatgagacaacaggatatgatatcacatgatgaactcatggtccatgaggagacagtgaaaaatgatgaagagcagatggaaacacatgaaagacttcctcaaggactacagtatgcacttaatgtccctataagcgtaaagcaggaaattacttttactgatgtatctgagcaactgatgagagacaaaaaacaaatcagagagccagtagacttacagaaaaagaagaagcggaaacaacgttctcccgcaaaaatccttacaataaatgaggatggatcacttggtttgaaaacccctaaatctcacgtttgtgagcactgcaatgctgcctttagaacgaactatcacttacagagacatgtcttcattcatacaggtgaaaaaccatttcaatgtagtcaatgtgacatgcgtttcatacagaagtacctgcttcagagacatgagaagattcatactggtgaaaaaccatttcgctgtgatgaatgtggtatgagattcatacaaaaatatcatatggaaaggcataagagaactcatagtggagaaaaaccttaccagtgtgaatactgtttacagtatttttccagaacagatcgtgtattgaaacataaacgtatgtgccatgaaaatcatgacaaaaaactaaatagatgtgccatcaaaggtggccttctgacatctgaggaagattctggcttttctacatcaccaaaagacaactcactgccaaaaaagaaaaggcagaaaacggagaaaaaatcatctggaatggacaaagagagtgctttggacaaatctgacctgaaaaaagacaaaaatgattacttgcctctttattcttcaagtactaaagtaaaagatgagtatatggttgcagaatatgctgttgaaatgccacattcgtcagttgggggctcgcatttagaagatgcgtcaggagaaatacacccacctaagttagttctcaaaaaaattaatagtaagagaagtctgaaacagccactggagcaaaatcaaacaatttcacctttatccacatatgaagagagcaaagtttcaaagtatgcttttgaacttgtggataaacaggctttactggactcagaaggcaatgctgacattgatcaggttgataatttgcaggaggggcccagtaaacctgtgcatagtagtactaattatgatgatgccatgcagtttttgaagaagaagcggtatcttcaagcagcaagtaacaacagcagggaatatgcgctgaatgtgggtaccatagcttctcagccttctgtaacacaagcagctgtggcaagtgtcattgatgaaagtaccacggcatccatattagagtcacaggcactgaatgtggagattaagagtaatcatgacaaaaatgttattccagatgaggtactgcagactctgttggatcattattcccacaaagctaatggacagcatgagatatccttcagtgttgcagatactgaagtgacttctagcatatcaataaattcttcagaagtaccagaggtcaccccgtcagagaatgttggatcaagctcccaagcatcctcatcagataaagccaacatgttgcaggaatactccaagtttctgcagcaggctttggacagaactagccaaaatgatgcctatttgaatagcccgagccttaactttgtgactgataaccagaccctcccaaatcagccagcattctcttccatagacaagcaggtctatgccaccatgcccatcaatagctttcgatcaggaatgaattctccactaagaacaactccagataagtcccactttggactaatagttggtgattcacagcactcatttcccttttcaggtgatgagacaaaccatgcttctgccacatcaacacaggactttctggatcaagtgacttctcagaagaaagctgaggcccagcctgtccaccaagcttaccaaatgagctcctttgaacagcccttccgtgctccctatcatggatcaagagctggaatagctactcaatttagcactgccaatggacaggtgaaccttcggggaccagggacaagtgctgaattttcagaatttcccttggtgaatgtaaatgataatagagctgggatgacatcttcacctgatgccacaactggccagacttttggctaaaaaaaaaaaaaaagtgtaaataatactggcactttagaacagattaatcaagagtggggttactctgtgtaaatggagtgctgtacagatttaagagcaatgcgtaataacaagttaagctgatatgaatagcaagataatccaataactgcatttcgtttggttagtcagcattctttgaactgccttacatgttgtcacctttatagaagcaatgcattacttgttttagatcagaaacttgctattccacccacaccaa

SEQ ID NO: 34889 - DNA, 763 bp, Homo sapiens
  source 1..763: mol_type = unassigned DNA
ggaggaggaggcggaggggcgcggagaagctggcgcactttgggcctcggcggggtcgtctgcggcggccggacctcccagataccgcgccttctgggcctgccccgctggcgcagtcaggaccccttccctcaacgggatgggaaactttgtgagtggcttctccgcagccactaacaagtgtccgccagacagcgggggggccgccgaaggctgatgatggacacccgtttttcttcttattcctcttttacaaatcttctgttgaactgcattgtgtttacagtttcacgtctgtgaaaaggatagagggaggaatcagcagcttggaaattcaagcacgtgatctggcgggatgggcgtttgcctaacgtatttaatggaggaatcggatggcataagtgattaaggtggtattgaggatttctgaagcctatgaaaggtagaaactcaaccatgatttctttttcaactctacagcattcctttccttgaagtcttcgtttttaccttagtctcgggcagttatacttaagcatgaacattgacgacaaactggaaggattgtttcttaaatgtggcggcatagacgaaatgcagtcttccaggacaatggttgtaatgggtggagtgtctggccagtctactgtgtctggagagctacaggattcagtacttcaagatcgaagtatgcctcaccaggagatccttgctgcagatgaagtgttacaagaaagtgaaatgagacaacaggatatgatat

SEQ ID NO: 34890 - DNA, 2375 bp, Homo sapiens
  source 1..2375: mol_type = unassigned DNA
ggagaaaggcgcaggggtgggagctgttgccgaagctgccacagcaaaagttctcccccctccccccttcccctcctctcaaggcccctagaaaggttggagctgccgccgcctgcagtcggtgaccgcgcgactcggcgcccgcccgcggatagagggaggaatcagcagcttggaaattcaagcacgtgatctggcgggatgggcgtttgcctaacgtatttaatggaggaatcggatggcataagtgattaaggtggtattgaggatttctgaagcctatgaaaggtagaaactcaaccatgatttctttttcaactctacagcattcctttccttgaagtcttcgtttttaccttagtctcgggcagttatacttaagcatgaacattgacgacaaactggaaggattgtttcttaaatgtggcggcatagacgaaatgcagtcttccaggacaatggttgtaatgggtggagtgtctggccagtctactgtgtctggagagctacaggattcagtacttcaagatcgaagtatgcctcaccaggagatccttgctgcagatgaagtgttacaagaaagtgaaatgagacaacaggatatgatatcacatgatgaactcatggtccatgaggagacagtgaaaaatgatgaagagcagatggaaacacatgaaagacttcctcaaggactacagtatgcacttaatgtccctataagcgtaaagcaggaaattacttttactgatgtatctgagcaactgatgagagacaaaaaacaaatcagagagccagtagacttacagaaaaagaagaagcggaaacaacgttctcccgcaaaaatccttacaataaatgaggatggatcacttggtttgaaaacccctaaatctcacgtttgtgagcactgcaatgctgcctttagaacgaactatcacttacagagacatgtcttcattcatacaggtgaaaaaccatttcaatgtagtcaatgtgacatgcgtttcatacagaagtacctgcttcagagacatgagaagattcatactggtgaaaaaccatttcgctgtgatgaatgtggtatgagattcatacaaaaatatcatatggaaaggcataagagaactcatagtggagaaaaaccttaccagtgtgaatactgtttacagtatttttccagaacagatcgtgtattgaaacataaacgtatgtgccatgaaaatcatgacaaaaaactaaatagatgtgccatcaaaggtggccttctgacatctgaggaagattctggcttttctacatcaccaaaagacaactcactgccaaaaaagaaaaggcagaaaacggagaaaaaatcatctggaatggacaaagagagtgctttggacaaatctgacctgaaaaaagacaaaaatgattacttgcctctttattcttcaagtactaaagtaaaagatgagtatatggttgcagaatatgctgttgaaatgccacattcgtcagttgggggctcgcatttagaagatgcgtcaggagaaatacacccacctaagttagttctcaaaaaaattaatagtaagagaagtctgaaacagccactggagcaaaatcaaacaatttcacctttatccacatatgaagagagcaagtttcaaagtatgcttttgaacttgtggataaacaggctttactggactcagaaggcaatgctgacattgatcaggttgataatttgcaggagggcccagtaaacctgtgcatagtagtactaattatgatgatgccatgcagtttttgaagaagaagcggtatcttcaagcagcaagtaacaacagcagggaatatgcgctgaatgtgggtaccatagcttctcagccttctgtaacacaagcagctgtggcaagtgtcattgatgaaagtaccacggcatccatattagagtcacaggcactgaatgtggagattaagagtaatcatgacaaaaatgttattccagatgaggtactgcagactctgttggatcattattcccacaaagctaatggacagcatgagatatccttcagtgttgcagatactgaagtgacttctagcatatcaataaattcttcagaagtaccagaggtcaccccgtcagagaatgttggatcaagctcccaagcatcctcatcagataaagccaacatgttgcaggaatactccaagtttctgcagcaggctttggacagaactagccaaaatgatgcctatttgaatagcccgagccttaactttgtgactgataaccagaccctcccaaatcagccagcattctcttccatagacaagcaggtctatgccaccatgcccatcaatagctttcgatcaggaatgaattc

SEQ ID NO: 34891 - DNA, 1008 bp, Homo sapiens
  source 1..1008: mol_type = unassigned DNA
ggaggaggaggaggagggggaggaagaggagaaaggcgcaggggtgggagctgttgccgaagctgccacagcaaaagttctcccccctccccccttcccctcctctcaaggcccctagaaaggttggagctgccgccgcctgcagtcggtgaccgcgcgactcggcgcccgcccgcggatagagggaggaatcagcagcttggaaattcaagcacgtgatctggcgggatgggcgtttgcctaacgtatttaatggaggaatcggatggcataagtgattaaggtggtattgaggatttctgaagcctatgaaaggtgaaaaaccatttcaatgtagtcaatgtgacatgcgtttcatacagaagtacctgcttcagagacatgagaagattcatactggtgaaaaaccatttcgctgtgatgaatgtggtgatgagacaaaccatgcttctgccacatcaacacaggactttctggatcaagtgacttctcagaagaaagctgaggcccagcctgtccaccaagcttaccaaatgagctcctttgaacagcccttccgtgctccctatcatggatcaagagctggaatagctactcaatttagcactgccaatggacaggtgaaccttcggggaccagggacaagtgctgaattttcagaatttcccttggtgaatgtaaatgataatagagctgggatgacatcttcacctgatgccacaactggccagacttttggctaaaaaaaaaaaaaaagtgtaaataatactggcactttagaacagattaatcaagagtggggttactctgtgtaaatggagtgctgtacagatttaagagcaatgcgtaataacaagttaagctgatatgaatagcaagataatccaataactgcatttcgtttggttagtcagcattctttgaactgccttacatgttgtcacctttatagaagcaatgcattacttgttttagatcagaaacttgctattccacccacaccaagtt

SEQ ID NO: 34892 - DNA, 429 bp, Homo sapiens
  source 1..429: mol_type = unassigned DNA
aaaactcattacaactgtggagaacacacaaaagcattcagcggtaaacacacacttgttcagcagcagagaaccctcactacagaaagatgttacatatgcagtgaatgtgggaaatcctttagcaacaagtctaacctcattaaacatcggagagttcacactggggaaaggccatatgagtgcagtgaatgtgggaaatcctttagccaaaggtctgcactccttcaacatcggggagttcacactggggagaggccttatgagtgcagtgaatgtgggaagttttttacatatcattccagtctcataaaacaccagaaagttcacagtggatccaggccttatgagtgcagcgaatgtgggaagtcatttagccaaaactctagcctcattgaacaccatagggttcacactggagaaaggcct

SEQ ID NO: 34893 - DNA, 2746 bp, Homo sapiens
  source 1..2746: mol_type = unassigned DNA
cctcttcgtggcggccattttagcttctctgaggtgtgttcaccggatcagagatagcagagcgccgagttggggccacgaaggcgtgaggggagtcgtcgtccctcctgcacgaaagcgtctaagccttggcgacgccgccctgggggacccacgtcaggcctgggatagggaccgctgtccccgggtccctaccaatgtcgcccgtcgctcccggcccagctctacccgcagagtctgatggcagcggccactctgaggacgccaactcagggcactgtgacctttgaagatgtggccgtacacttctcctgggaggaatggggtctccttgatgaggctcaaagatgcctgtaccgtgatgtgatgctggagaacttggctcttttaacctctctagatgttcatcatcagaagcagcaccttggagaaaaacatttcagaagcaatgtgggcagagccttgtttgtgaagacctgcacattccatgtgtcaggggagccttccacctgcagagaagttgggaaggacttcctggccaagttgggatttctccatcaacaggctgctcacactggggagcaatcaaatagcaaaagcgacggtggggccatcagtcacagaggaaaaactcattacaactgtggagaacacacaaaagcattcagcggtaaacacacacttgttcagcagcagagaaccctcactacagaaagatgttacatatgcagtgaatgtgggaaatcctttagcaaaagctacagtctcaatgaccattggagacttcacactggagaaaagccttatgaatgtcgagagtgtgggaagtcctttaggcaaagctctagtctcattcagcaccggagagttcacactgcagtacgacctcatgaatgtgatgaatgtggaaaattatttagcaacaagtctaacctcattaaacatcggagagttcacactggggaaaggccatatgagtgcagtgaatgtgggaaatcctttagccaaaggtctgcactccttcaacatcggggagttcacactggggagaggccttatgagtgcagtgaatgtgggaagttttttacatatcattccagtctcataaaacaccagaaagttcacagtggatccaggccttatgagtgcagcgaatgtgggaagtcatttagccaaaactctagcctcattgaacaccatagggttcacactggagaaaggccttataagtgcagcgaatgtgggaaatcctttagccaaaggtctgcactccttcaacatcggggagttcacactggggagaggccttatgagtgcagtgaatgtgggaagttctttccctacagctccagtctccgaaaacaccagagagttcacactggatcaagaccctatgagtgcagtgaatgtgggaaatcctttactcaaaattccggcctcattaagcacaggagggttcacactggggagaagccttatgagtgcacggaatgtgggaaatcctttagccataactccagccttattaaacatcagagaattcatagtcgataaaagccttatgagtggcaaatgtggaaaatctgttagcaccctggagaaagtccttgagtacacagtgaatgtcagaaagcttcagctgaaggccatatctcattgagtgccacacagttcacaagggaaagacacttttgatatgtagggatgtccagttgatataacagctctgaaggagatcccttatgagggtggcatcagcctgaattgaacatcctatatctgaacatctgcataaattccaggtatgtgtgaactgcattgcaccttttgccctgcccagggcccatgtcagatttatgtctctgctgatactatagtggaagccattttacctctactgcctggcaggtgaccaccagtgtgcaccactcacccatcccagtgtattcaggtaagtgaaccttggtgttctgttcatgggaggaatttgtaaatagcctaagcatttattccgttttttttttttcctttctgatgagttaggccatggacctgacccagtttggcccagaggactctgctggtgacctgaaaagagggactacatatttcaggatattgttggtctcacatgactcttgatagagtttgccagccttcaaatcaccaactgtgggaaccaactgcctcttattgccttggtttgtacaataacaaaggccttattaatcttgggggttctatatgtatgggttggtttgaaaacagttgggttctgctaacatgaaggggtgaataactttttttggagatcccaaacattgtgtagctcaacagggacagggacagggacagtaggatggcagaatatagctctctctctagtttgagcctagttttcattgctattcaaggcctctgagaaaaaactacagggtattgtcctaatttatatcctggatgccatagaggtcagcctgaggaggcagcagttacttgacatcctttgatgtttctgaaagcaacatgaaattgttctcttgttcacaaggaatactgcatcgtgttcagtgccagtgggggaaatctgttccccaggtcctgtatgccttgatatcctgaattccacagggtagcaccacaggtggtaagattatagtaggaattataattgttatagaagtactggattgatagagagtggaaaactgcaataacactgcaataaatagaatgtgcccctttt

SEQ ID NO: 34894 - DNA, 5687 bp, Homo sapiens
  source 1..5687: mol_type = unassigned DNA
cggatcagagatagcagagcgccgagttggggccacgaaggcgtgaggggagtcgtcgtccctcctgcacgaaagcgtctaagccttggcgacgccgccctgggggacccacgtcaggcctgggatagggaccgctgtccccgggtccctaccaatgtcgcccgtcgctcccggcccagctctacccgcagagtctgatggcagcggccactctgaggacgccaactcagggcactgtgacctttgaagatgtggccgtacacttctcctgggaggaatggggtctccttgatgaggctcaaagatgcctgtaccgtgatgtgatgctggagaacttggctcttttaacctctctagatgttcatcatcagaagcagcaccttggagaaaaacatttcagaagcaatgtgggcagagccttgtttgtgaagacctgcacattccatgtgtcaggggagccttccacctgcagagaagttgggaaggacttcctggccaagttgggatttctccatcaacaggctgctcacactggggagcaatcaaatagcaaaagcgacggtggggccatcagtcacagaggaaaaactcattacaactgtggagaacacacaaaagcattcagcggtaaacacacacttgttcagcagcagagaaccctcactacagaaagatgttacatatgcagtgaatgtgggaaatcctttagcaaaagctacagtctcaatgaccattggagacttcacactggagaaaagccttatgaatgtcgagagtgtgggaagtcctttaggcaaagctctagtctcattcagcaccggagagttcacactgcagtacgacctcatgaatgtgatgaatgtggaaaattatttagcaacaagtctaacctcattaaacatcggagagttcacactggggaaaggccatatgagtgcagtgaatgtgggaaatcctttagccaaaggtctgcactccttcaacatcggggagttcacactggggagaggccttatgagtgcagtgaatgtgggaagttttttacatatcattccagtctcataaaacaccagaaagttcacagtggatccaggccttatgagtgcagcgaatgtgggaagtcatttagccaaaactctagcctcattgaacaccatagggttcacactggagaaaggccttataagtgcagcgaatgtgggaaatcctttagccaaaggtctgcactccttcaacatcggggagttcacactggggagaggccttatgagtgcagtgaatgtgggaagttctttccctacagctccagtctccgaaaacaccagagagttcacactggatcaagaccctatgagtgcagtgaatgtgggaaatcctttactcaaaattccggcctcattaagcacaggagggttcacactggggagaagccttatgagtgcacggaatgtgggaaatcctttagccataactccagccttattaaacatcagagaattcatagtcgataaaagccttatgagtggcaaatgtggaaaatctgttagcaccctggagaaagtccttgagtacacagtgaatgtcagaaagcttcagctgaaggccatatctcattgagtgccacacagttcacaagggaaagacacttttgatatgtagggatgtccagttgatataacagctctgaaggagatcccttatgagggtggcatcagcctgaattgaacatcctatatctgaacatctgcataaattccaggtatgtgtgaactgcattgcaccttttgccctgcccagggcccatgtcagatttatgtctctgctgatactatagtggaagccattttacctctactgcctggcaggtgaccaccagtgtgcaccactcacccatcccagtgtattcaggccatggacctgacccagtttggcccagaggactctgctggtgacctgaaaagagggactacatatttcaggatattgttggtctcacatgactcttgatagagtttgccagccttcaaatcaccaactgtgggaaccaactgcctcttattgccttggtttgtacaataacaaaggccttattaatcttgggggttctatatgtatgggttggtttgaaaacagttgggttctgctaacatgaaggggtgaataactttttttggagatcccaaacattgtgtagctcaacagggacagggacagggacagtaggatggcagaatatagctctctctctagtttgagcctagttttcattgctattcaaggcctctgagaaaaaactacagggtattgtcctaatttatatcctggatgccatagaggtcagcctgaggaggcagcagttacttgacatcctttgatgtttctgaaagcaacatgaaattgttctcttgttcacaaggaatactgcatcgtgttcagtgccagtgggggaaatctgttccccaggtcctgtatgccttgatatcctgaattccacagggtagcaccacaggtggtaagattatagtaggaattataattgttatagaagtactggattgatagagagtggaaaactgcaataacactgcaataaatagaatgtgccccttttacagaggtttccatgatgttcgttattatggctcttaaggatgagcaggtacagaaatcctcaggacctacagaattgtgtatcttgtgtagctgaggtcattgtcagaaattttatggaatcctgtagcctctgggattttcacctcaaggtcattgctatgcaggcaggaaaacaaggatagagaagggaggtctaggccattgatacagcctttgtgatccagccaacatttctgttgagtcaggtggaaatggccttcactgttcacttgtatttgtgatcactgaggcaaaatcctctcccaggacatgaggagagagatggtggaatcaacatagggttgtcaaacctgattttccaaaaacaataggaaattcagacttttattttgaaccatattttgttaggttggtgcaaaagtaactgtggttttgaaccatgatttatttttatttttatttttttttgagtcagagtcttgctctgttgcccagtctggagggcaatggcactatctcagctcattgcaacctccgcctcccaggttcaagcgattcttctgcctcagcctcccaggtagctgggattacaggcacccgccaccacgcccatctgagttttgcatttttagtagacatggggtttcaccatgttggccaggctggtcttgaactcctgacttcatgtgatccacccaccttggcctcccaaagtgctgggatttacaggcatgagccactgcgcccagccaagctttttcaccattccaatttccttcaaatgctgaacagccgtggaatggttgacattgagttcttaggcaacttctcatgtagttgtaagaggatcagcttctaatattgctctcaattggtcattgtcaacttccagtggctggccactacttctcttcaaggctcttgtctcctttgcaaaacttcttgaaccaccactgcactgtacattcgttagcagttcctgggccaaatgtgtttatatcgtgagttgtctctgctgctttacgacccattgggaactcaagtaagaaaatctcagccgggtgcggtggctcacgcctgtaatcccagcactttgggaggctgaagtaggtggatcacaaggtcaggagttagagaccagcctgaccaacatattgaaacctcatctctactaaaaatacaaaaattagccgggcgtggtggcatgtgcctgtagtcccagctacttgggaggctgaggcaggagaatcacttgaacccgggaggcagaagtcacagtgagccaagatcacgccactgcactccagcctggacgacagacaaaacaagactccgtctcaaaaaaaagaggccagatgcggtggcttacacctgtaatcccagcactttgggaggccgaggtgggtggatcacaggtcacgagttcgagaccagcctggccaacatggtgaaaccccgtctctactaaaaatacaaaaattagctgggcatagtggcatgcacctgtaatcccagctactggggagcctgaggcacgagaattgtttgaaccccgggaggtggaggttgcagtgagccaagatcatgtcactgcactccagcctgggcaacagagcaagactctatctcaaaaaaatcgctgaaatttgagttttgtctaacatttccatagtctaaaataaacataaacagcaagtagtaagtcagcaaaaaaacataaagcgagaaatgcctattaaaatgatgtataaccacatttatttaagaatgttttccaatataaaatggcaaaatccaacatgcaaaaacggcaattacttttgcactaacctgataataattttaataagaataaatggtacatatttaaactatataatttgatcagctttgatattcatattaacctgtaattgctcccaccatgccaattttgaaactgccaacatgttactgaatgtagaattgggaagagttgctgatagcatcctaatatattctgtttctaccatactgatacagtggccacgaataacctcaagaatgtagaaaataaaatgtagtgaaatgattaggaagaagttgtttcttcacaatcatgacaatgaacgtgtcattccacaagttacctcattgtcctttaataattatctgcctataggcaactattgatttactttccattataatacattagttttcatttgctagaattttatatgattgaaaccataatgtatttactcttttttaatccctgggtatagtcacgtatttattttgagattcatcattatacctctatgagtagtttcttttttttgtattgctgagaagtatgatgttctgtggatataccagtattcgtttattcattcattcatttgttatggatattttgagtagttttttaaagtagtttgaggtataatggaacttaaagtgcttatatttaaaatgcatattttgatattttcatacatgcttacaccctggaacgcagtttccttctgtctttttagttcattctcaacatataaaattaattttcattgtgtaaaattactggtacaatgacatattttgtctcctgttacagctgtgttcaattacaaaaaaagatggaaaagactgttatgaagccagatgaacctttctccagtcttccttcactatttttttttccttcaccatttatcatttcatagtcatttatgtttcatcggtcctcatgtgtactagtgcgttattttacttatactcccggatatcatattatttaatgcatagcctcttcagaatgcaattttaaaatgtaaaggctcttttataaccccccaaaaaatcacacaaatatattttaaaatgtaaatattttatcgcttctgttttctcagttgtctaaaacaatgtgtttcttaaggaagatcatttttattcaggatccaaatgtatatttaatagctttcagtagttgtatctcataagtctgtaacctacaggttccatttacctttgttttcttatttcttgaagttgctgagtcattttttaattagaatttgctgtattct

SEQ ID NO: 34895 - DNA, 2673 bp, Homo sapiens
  source 1..2673: mol_type = unassigned DNA
ctccgagcaggacactgctacttaacaaggtggtttgagccaagtatgtgtcttgcgggtctttgcgaaagtgaaccagttattaggggcgcctaacgacctggggggtcaactaaggggactgtggcacgtttcaggcaggattcctccttcattcaaactgcatcacccaggagtctgcaaattccccaaagtaggaggaaaaatgaccacattcaaggaggcagtgaccttcaaggatgtggctgtggtcttcactgaggaggagctggggctgctggaccctgcccagaggaagctgtaccgagatgtgatgctggagaacttcaggaacctgctctcagtggggcatcaaccgttccaccaagatacttgccacttcctaagggaagaaaagttttggatgatggggacagcaacccaaagagaagggaattcaggaggcaagatccaaactgagttggagtctgttccagaagcaggagcacatgaagagtggtcctgccagcaaatctgggaacaaattgcaaaagacttaaccaggtctcaggactctatcataaataactctcagttctttgaaaatggtgatgtcccctcccaggttgaagcaggactacccacaattcatacaggacagaaaccttcccagggtgggaagtgtaaacagtccatcagtgatgttcccatctttgatcttcctcagcagttatactcagaagagaagtcttatacatgtgatgagtgtggaaaaagcatctgttacatctcagctcttcatgttcatcagagagtccacgtgggagagaaactctttatgtgtgatgtgtgtggcaaggaatttagtcaaagctcacatctgcaaactcatcagagagtccacactggagagaaaccattcaaatgtgagcaatgtgggaaaggtttcagtcgtagatcagcacttaatgttcatcgtaaattacacacaggagagaaaccttacatttgtgaggcatgtgggaaggccttcattcatgattcccagcttaaggaacataagagaatccatactggggagaaaccattcaaatgtgatatatgtggtaagaccttctattttaggtcaagacttaagagccattccatggttcacacaggagaaaaaccatttaggtgtgatacatgtgataagagctttcatcagagatcagcacttaataggcattgcatggtccacacaggagagaaaccgtacagatgtgagcagtgtggaaaaggctttattggtaggctagatttttataagcatcaggtggtccacacaggagaaaaaccatataattgtaaagaatgtgggaagagcttcagatggtcctcatgccttttgaaccatcagcgagtccacagtggagaaaaaagcttcaaatgtgaagaatgtggaaagggattttatacaaattcacaactgtcttcccatcagagatcccacagtggtgaaaagccatataaatgtgaggagtgtgggaagggctatgttactaagtttaatcttgacttgcaccagagggtccacacgggagagagaccttataattgtaaggaatgtgggaagaactttagccgggcctcaagtattttgaatcataagagactccactgccagaaaaaaccattcaaatgtgaggactgtggaaagaggcttgtacacaggacataccgtaaagaccagccgagagactatagtggggaaaacccatccaaatgtgaggattgtgggagacgctacaagaggcgcttgaatctggatatacttttatcattatttctaaatgacacataattgttcatatttatggggtacaacgtgctattttaatgtgtgcatacaatttatagtgatccaatcagtgtaattggtgtatctgttacctcaaacatttaccatttctttgtgttggaaaattcaaaatccatttgagaggagttggtagacagcaagggaagggtccctggagacccccagccaaacgggtcagtgtctcatccccacataacacaaaaagcagcctggggaagacaatcaagctacaggcactgataagggaactagcacaggggattgtgcctggagacatgcccatggctgcacagatagaagaacctccagcccattcaggtaaaaactcgcacaaacctccggctcactcagttaagggaacaagaccagacacagaaatgcctttgtcctttgtataatcagcaggctccgaggaaaaagtttcttcttttgtgggcatgaacacagtgggcttcagtaggttcaggttggcactttcttttgtggaaaaggaaaagcccagcctctgtaaatcatcacttcagctcctgattggtcccaggccaagctgaatagcccttaggaataatcacttcaactcctgattggtcccgggccaagctgaatagcccttatgaatcatcacttcggttcctgattggtcccgggccaaggtcccagaccaagctgaatcacgctttctccaagacagcccgcaggctaagtgcattccttccccttcccagtccataaaaaccccggaccccagcctcatactgggcaacttatttggatccccatctccactgtggagagcttttttctttcacttattaaacttttactccaatttc

SEQ ID NO: 34896 - DNA, 2222 bp, Homo sapiens
  source 1..2222: mol_type = unassigned DNA
acttccggtctccgagcaggacactgctacttaacaaggtggtttgagccaaactgtggcacgtttcaggcaggattcctccttcattcaaactgcatcacccaggagtctgcaaattccccaaagtaggaggaaaaatgaccacattcaagattaccaagactgtgggaatacttataacctgctcttggtcatgataaagagaagcaaagtacttgtattctgttcaaagattatggaggaggcagtgaccttcaaggatgtggctgtggtcttcactgaggaggagctggggctgctggaccctgcccagaggaagctgtaccgagatgtgatgctggagaacttcaggaacctgctctcagtggggcatcaaccgttccaccaagatacttgccacttcctaagggaagaaaagttttggatgatggggacagcaacccaaagagaagggaattcaggaggcaagatccaaactgagttggagtctgttccagaagcaggagcacatgaagagtggtcctgccagcaaatctgggaacaaattgcaaaagacttaaccaggtctcaggactctatcataaataactctcagttctttgaaaatggtgatgtcccctcccaggttgaagcaggactacccacaattcatacaggacagaaaccttcccagggtgggaagtgtaaacagtccatcagtgatgttcccatctttgatcttcctcagcagttatactcagaagagaagtcttatacatgtgatgagtgtggaaaaagcatctgttacatctcagctcttcatgttcatcagagagtccacgtgggagagaaactctttatgtgtgatgtgtgtggcaaggaatttagtcaaagctcacatctgcaaactcatcagagagtccacactggagagaaaccattcaaatgtgagcaatgtgggaaaggtttcagtcgtagatcagcacttaatgttcatcgtaaattacacacaggagagaaaccttacatttgtgaggcatgtgggaaggccttcattcatgattcccagcttaaggaacataagagaatccatactggggagaaaccattcaaatgtgatatatgtggtaagaccttctattttaggtcaagacttaagagccattccatggttcacacaggagaaaaaccatttaggtgtgatacatgtgataagagctttcatcagagatcagcacttaataggcattgcatggtccacacaggagagaaaccgtacagatgtgagcagtgtggaaaaggctttattggtaggctagatttttataagcatcaggtggtccacacaggagaaaaaccatataattgtaaagaatgtgggaagagcttcagatggtcctcatgccttttgaaccatcagcgagtccacagtggagaaaaaagcttcaaatgtgaagaatgtggaaagggattttatacaaattcacaactgtcttcccatcagagatcccacagtggtgaaaagccatataaatgtgaggagtgtgggaagggctatgttactaagtttaatcttgacttgcaccagagggtccacacgggagagagaccttataattgtaaggaatgtgggaagaactttagccgggcctcaagtattttgaatcataagagactccactgccagaaaaaaccattcaaatgtgaggactgtggaaagaggcttgtacacaggacataccgtaaagaccagccgagagactatagtggggaaaacccatccaaatgtgaggattgtgggagacgctacaagaggcgcttgaatctggatatacttttatcattatttctaaatgacacataattgttcatatttatggggtacaacgtgctattttaatgtgtgcatacaatttatagtgatccaatcagtgtaattggtgtatctgttacctcaaacatttaccatttctttgtgttggaaaattcaaaatccatttgagaggagttggtagacagcaagggaagggtccctggagacccccagccaaacgggtcagtgtctcatccccacataacacaaaaagcagcctggggaagacaatcaagctacaggcactgataagggaactagcacaggggattgtgcctggagacatgcccatggctgcacagatagaagaacctccagcccattcaggtaaaaactcgcacaaacctccggctcactcagttaagggaac

SEQ ID NO: 34897 - DNA, 1731 bp, Homo sapiens
  source 1..1731: mol_type = unassigned DNA
acttccggtctccgagcaggacactgctacttaacaaggtggtttgagccaaactgtggcacgtttcaggcaggattcctccttcattcaaactgcatcacccaggagtctgcaaattccccaaagtaggaggaaaaatgaccacattcaaggaggcagtgaccttcaaggatgtggctgtggtcttcactgaggaggagctggggctgctggaccctgcccagaggaagctgtaccgagatgtgatgctggagcacatgaagagtggtcctgccagcaaatctgggaacaaattgcaaaagacttaaccaggtctcaggactctatcataaataactctcagttctttgaaaatggtgatgtcccctcccaggttgaagcaggactacccacaattcatacaggacagaaaccttcccagggtgggaagtgtaaacagtccatcagtgatgttcccatctttgatcttcctcagcagttatactcagaagagaagtcttatacatgtgatgagtgtggaaaaagcatctgttacatctcagctcttcatgttcatcagagagtccacgtgggagagaaactctttatgtgtgatgtgtgtggcaaggaatttagtcaaagctcacatctgcaaactcatcagagagtccacactggagagaaaccattcaaatgtgagcaatgtgggaaaggtttcagtcgtagatcagcacttaatgttcatcgtaaattacacacaggagagaaaccttacatttgtgaggcatgtgggaaggccttcattcatgattcccagcttaaggaacataagagaatccatactggggagaaaccattcaaatgtgatatatgtggtaagaccttctattttaggtcaagacttaagagccattccatggttcacacaggagaaaaaccatttaggtgtgatacatgtgataagagctttcatcagagatcagcacttaataggcattgcatggtccacacaggagagaaaccgtacagatgtgagcagtgtggaaaaggctttattggtaggctagatttttataagcatcaggtggtccacacaggagaaaaaccatataattgtaaagaatgtgggaagagcttcagatggtcctcatgccttttgaaccatcagcgagtccacagtggagaaaaaagcttcaaatgtgaagaatgtggaaagggattttatacaaattcacaactgtcttcccatcagagatcccacagtggtgaaaagccatataaatgtgaggagtgtgggaagggctatgttactaagtttaatcttgacttgcaccagagggtccacacgggagagagaccttataattgtaaggaatgtgggaagaactttagccgggcctcaagtattttgaatcataagagactccactgccagaaaaaaccattcaaatgtgaggactgtggaaagaggcttgtacacaggacataccgtaaagaccagccgagagactatagtggggaaaacccatccaaatgtgaggattgtgggagacgctacaagaggcgcttgaatctggatatacttttatcattatttctaaatgacacataattgttcatatttatggggtacaacgtgctattttaatgtgtgcatacaatttatagtgatccaatcagtgtaattggtgtatctgttacctcaaacatttaccatttctttgtgttggaaaattcaaaatccatttgaga

SEQ ID NO: 34898 - DNA, 2318 bp, Homo sapiens
  source 1..2318: mol_type = unassigned DNA
agccttaccccttactggaggctgcaggaccctctacacacagacagctgtccagcacggaaggtgggctgaggcccagggtgaacatgccagctaatgggacatcaccccagagattccctgccctgattccaggagaacctggcagatcttttgaggggtccgtgtcattcgaggatgtggctgtggatttcacccgacaggagtggcacagactggaccctgctcagaggaccatgcacaaggatgtgatgctggagacctacagcaacctggcatctgtgggcctctgcgtggccaaaccagagatgatcttcaagttggagcgaggagaagagctgtggatattagaggaggaatcctcaggccatggttactcaggatctctctcactgctgtgtggcaatggttctgttggggataatgccctcaggcatgataatgaccttcttcaccatcagaagattcaaacattggatcaaaatgttgaatataatggatgcaggaaagccttccatgagaaaacaggctttgttagacgtaaaagaacacccagaggagataaaaactttgaatgtcatgaatgtgggaaagcttactgtaggaagtcaaaccttgttgaacatctgagaatacacacaggagagagaccctatgaatgcggtgaatgtgcaaaaaccttcagtgcaagatcatacctcattgctcatcagaaaactcacacaggggagaggccctttgaatgtaatgaatgtgggaaatcttttggcaggaagtcacaactcatcctacatacaagaacacacactggagagagaccctatgaatgtactgaatgtgggaaaaccttttctgagaaggcaaccctcacgattcatcagagaactcacacaggggagaaaccctatgaatgtagtgaatgtgggaaaacatttcgtgtaaagatatcccttacccaacaccacagaactcatacaggggagaaaccttatgaatgtggggagtgtgggaaaaacttccgtgcaaagaaatccctaaatcagcatcaaagaattcacacaggtgagaaaccctatgagtgtggtgaatgtgggaaattcttccgaatgaagatgactctcaataatcatcaaagaactcacacaggtgaaaagccctatcagtgtaatgaatgtgggaaatctttcagggtgcactcatctcttgggatccatcagagaattcacacaggagagaaaccttacgaatgtaatgagtgtggtaatgctttctatgtgaaagcacgcctaattgaacatcagaggatgcattcaggagagaaaccctacgaatgtagtgaatgtgggaaaatcttcagtatgaagaaatccctttgtcaacaccggagaactcacacaggagagaaaccttatgaatgtagtgaatgtggaaatgccttctatgtgaaagtacgcctcattgaacatcagcgaattcacacaggagagagaccctttgagtgtcaagaatgtgggaaagctttctgccggaaagcacacctcacagaacatcagagaactcacataggctggtcctggcgttgtacaatgaagaaagcctctcactgaagacttccctcaccattggatcaagctccttgggggcatatgatcaccagggcacacagtgtgcctgtgaaaatttggcacctacatttgtatcaaagtatgtcctgatccccttaggggatagctcattgtttttattcagatttccctaattagtggtgtgtgaacatcttatctgttgattggctatttgggttttttcttctgtgcattgactgttcatgtcctctgctcattgttttcaaatgggctgttcatctcttgctttttggtttaaatgttgttttttaacatatgagaatataaaaatcctttttttttcagtcatatgtgttgcaaatatcttctcccagactgtcgttggttttttaaattttgccatctgttttcttctgctgaagttttatattttatttatttattttttatttttttgagatggagtctcactctgtcacccaggctggagtgcaatggcatgacctcagctcatttcaaccttcgcctcccgggttcaagcgattctcctgcctcagtctcccaagtagctgggattacaggtgtgcaccaccatgcctggctaatttttgtatttttagtaaagacggggtttcaccatgttggccaggctggtctctaactcctgacctcaggtgatccacctgcctcggcctccaaaagtgttgggattacaggtgtgagccaccgtgc

SEQ ID NO: 34899 - DNA, 2616 bp, Homo sapiens
  source 1..2616: mol_type = unassigned DNA
aattcggggcgggacttccgggggtcagccggcgttggctgagacgtcttcgtgccacggtgctgcctcctttccaagcgcgacccgttgagatccccttgaccacaccctcattctcagctggtgctcatgaaggacagaagagtcaatgtcagtacaatgtgagtgaagggctgaggtccttgtcatgcccagcctcagaactcgccgtgaggaggcagagatggagctctcagttccaggaccatccccctggacccctgcagcccaggcccgtgtgagagatgctcctgctgtgacccaccctggatctgcagcctgtggtaccccctgctgtagtgatactgagctggaagccatctgccctcactatcagcagccagattgtgacaccaggactgaagacaaggagtttcttcacaaggaagacattcatgaagatttggaatcacaggcagaaatatcagaaaactatgctggtgatgtttcccaggtacccgagcttggagatctgtgtgatgatgtatcagaaagagactggggagtccccgaaggcaggaggctgccacagtccctctcccaggagggggacttcacaccagctgccatggggctccttaggggccccttaggggagaaagatctggactgtaatggttttgacagtcgcttcagtctgagcccaaacctgatggcatgtcaggaaatccctacagaagagaggccacatccatatgacatgggtggccagagtttccagcacagtgtggacctaactggtcatgagggggttcccacagctgaaagtccactcatatgtaatgagtgtgggaaaaccttccaaggaaatcctgaccttattcagcgtcaaatagtccacactggggaggcttcctttatgtgtgatgattgtgggaaaaccttcagccagaactcagttcttaaaaaccgtcatcgatctcatatgagtgagaaagcttaccagtgcagcgaatgtgggaaagccttccgagggcactcagacttttctaggcatcagagtcaccacagcagtgagaggccttatatgtgtaatgaatgtggaaaagccttcagccagaactcgagccttaaaaagcaccaaaagtctcacatgagtgagaagccctatgaatgcaatgaatgtgggaaggcttttaggcggagctcaaacctcatccaacatcaaagaatccattctggggagaaaccgtatgtgtgcagtgagtgtgggaaggccttcaggcgaagctcaaacctcatcaaacaccacaggactcacacaggagagaagccttttgagtgtggcgagtgtgggaaagccttcagccagagtgcacacctgaggaagcaccagagggtccacactggagagaagccttatgagtgtaatgattgtggcaagcccttcagtcgggtctccaacctcattaagcaccacagggttcacactggagagaagccctataagtgcagtgactgtgggaaagcatttagtcagagctccagccttattcagcatcggagaattcacactggagaaaagcctcacgtgtgtaatgtatgtggaaaagcctttagttatagctcagtgctccgaaagcaccagatcatccacacgggagagaagccgtacagatgcagtgtctgtgggaaggccttcagccacagctcagccctcattcagcaccagggcgtgcacacaggcgacaagccctacgcctgccacgagtgtgggaagacctttggtcgcagctccaacctcatccttcaccagcgagtccacactggagagaagccctatgaatgtactgaatgtggaaaaaccttcagccagagctcaaccctcattcagcatcagaggattcataatgggctgaagccccatgaatgtaaccagtgtggtaaagccttcaaccgaagctcaaatctcattcaccaccagaaagttcatactggggaaaaaccctacacctgtgttgaatgtggtaagggcttcagccagagctcacacctcattcagcatcagataatccacacgggcgagcgcccctacaaatgcagtgagtgtgggaaagccttcagtcagcgttcggtcctcatccagcaccagaggattcacactggggtgaagccctatgactgtgctgcttgtgggaaagccttcagccagcgatcaaagttgatcaaacaccagttgattcacaccagggaataggctgttgggctggcaggagtgaaaccgagcatagtttcctctccaactcctctttggccattgtctcagcctctgccacttcccagaccgaaagcctggactcagctcactgcctacatccagtggccacatagcctgggaccctcctttgaaacatcctttacaggctcccttctcactgccactgctcttgcctcttgtgatgtcttgggtttgggcttgtttttacagcttgtgaacggactgcacgtttgttacaagggagaagattatggaggctgcatattcatgaatagagtttattattataatgaaaagttaccaaaaaagtaaagtgacgtttggtttgagataaccatagtagtttgtttgattggtaa

SEQ ID NO: 34900 - DNA, 2503 bp, Homo sapiens
  source 1..2503: mol_type = unassigned DNA
aattcggggcgggacttccgggggtcagccggcgttggctgagacgtcttcgtgccacggtgctgcctcctttccaagcgcgacccgttgaggtccttgtcatgcccagcctcagaactcgccgtgaggaggcagagatggagctctcagttccaggaccatccccctggacccctgcagcccaggcccgtgtgagagatgctcctgctgtgacccaccctggatctgcagcctgtggtaccccctgctgtagtgatactgagctggaagccatctgccctcactatcagcagccagattgtgacaccaggactgaagacaaggagtttcttcacaaggaagacattcatgaagatttggaatcacaggcagaaatatcagaaaactatgctggtgatgtttcccaggtacccgagcttggagatctgtgtgatgatgtatcagaaagagactggggagtccccgaaggcaggaggctgccacagtccctctcccaggagggggacttcacaccagctgccatggggctccttaggggccccttaggggagaaagatctggactgtaatggttttgacagtcgcttcagtctgagcccaaacctgatggcatgtcaggaaatccctacagaagagaggccacatccatatgacatgggtggccagagtttccagcacagtgtggacctaactggtcatgagggggttcccacagctgaaagtccactcatatgtaatgagtgtgggaaaaccttccaaggaaatcctgaccttattcagcgtcaaatagtccacactggggaggcttcctttatgtgtgatgattgtgggaaaaccttcagccagaactcagttcttaaaaaccgtcatcgatctcatatgagtgagaaagcttaccagtgcagcgaatgtgggaaagccttccgagggcactcagacttttctaggcatcagagtcaccacagcagtgagaggccttatatgtgtaatgaatgtggaaaagccttcagccagaactcgagccttaaaaagcaccaaaagtctcacatgagtgagaagccctatgaatgcaatgaatgtgggaaggcttttaggcggagctcaaacctcatccaacatcaaagaatccattctggggagaaaccgtatgtgtgcagtgagtgtgggaaggccttcaggcgaagctcaaacctcatcaaacaccacaggactcacacaggagagaagccttttgagtgtggcgagtgtgggaaagccttcagccagagtgcacacctgaggaagcaccagagggtccacactggagagaagccttatgagtgtaatgattgtggcaagcccttcagtcgggtctccaacctcattaagcaccacagggttcacactggagagaagccctataagtgcagtgactgtgggaaagcatttagtcagagctccagccttattcagcatcggagaattcacactggagaaaagcctcacgtgtgtaatgtatgtggaaaagcctttagttatagctcagtgctccgaaagcaccagatcatccacacgggagagaagccgtacagatgcagtgtctgtgggaaggccttcagccacagctcagccctcattcagcaccagggcgtgcacacaggcgacaagccctacgcctgccacgagtgtgggaagacctttggtcgcagctccaacctcatccttcaccagcgagtccacactggagagaagccctatgaatgtactgaatgtggaaaaaccttcagccagagctcaaccctcattcagcatcagaggattcataatgggctgaagccccatgaatgtaaccagtgtggtaaagccttcaaccgaagctcaaatctcattcaccaccagaaagttcatactggggaaaaaccctacacctgtgttgaatgtggtaagggcttcagccagagctcacacctcattcagcatcagataatccacacgggcgagcgcccctacaaatgcagtgagtgtgggaaagccttcagtcagcgttcggtcctcatccagcaccagaggattcacactggggtgaagccctatgactgtgctgcttgtgggaaagccttcagccagcgatcaaagttgatcaaacaccagttgattcacaccagggaataggctgttgggctggcaggagtgaaaccgagcatagtttcctctccaactcctctttggccattgtctcagcctctgccacttcccagaccgaaagcctggactcagctcactgcctacatccagtggccacatagcctgggaccctcctttgaaacatcctttacaggctcccttctcactgccactgctcttgcctcttgtgatgtcttgggtttgggcttgtttttacagcttgtgaacggactgcacgtttgttacaagggagaagattatggaggctgcatattcatgaatagagtttattattataatgaaaagttaccaaaaaagtaaagtgacgtttggtttgagat

SEQ ID NO: 34901 - DNA, 1295 bp, Homo sapiens
  source 1..1295: mol_type = unassigned DNA
gcggagcaagcatcacaccatggcgtatgagtgttcctctgtgtagactcaacctgcgcctcgccgtcccccattcgcacacccgatgcccgggggtcgctacggacttaaaatctccgcaccgcaccctccacctcagaaacgttcctggatccgaacactgccccctgacgacctagagagatcccggctcccagcccactgagtggcttcagcctcgctgtcccccgcccacttcatccctcaggcacctcccaactcctggcctctctgcacgaggcgcctgccccgggccccgcctacaggggacccagctcttcttgcagccactggaagctgatcacctggagtgaagacctcacacgaagaagtctggaagaagaggaagaggaaagaaaaggagtcagggatggcccttactcaggtacggttgacatttagggatgtggccatagaattctctcaggaggagtggaaatgcctggaccctgctcagaggatcttatacagggacgtgatgttggagaactactggaaccttgtttctctgggactgtgtcattttgatatgaatattatctccatgttggaggaagggaaagagccctggactgtgaagagctgtgtgaaaatagcaagaaaaccaagaacgccggaatgtgtcaaaggcgtggtcacagacctgctcaggagatggaaacattggctgctgctccttggcatctgctgccccaaacctcatggaagagtctccagccgtctccgcctgtcgaggtccctcggccatttcttccattctgcttttgccactttcatgggggtgtgtgataagcgagtgggttctatcttctaagattgttctcagcataaccgtaaagacacctaacaaaatccttctgtcattgatcctcagtcttacatggggtgcgtattctgtttttccaggcttcagcacagaaatacaagtactgcatgttgtcacttacatttggaatctaaaccaataaaactaatagcagcaaagagtagaatgtgggttaccacaggttggggactggagggaatagggagatgttggtcactgggtgaaaacattaggagtaaatgataggtttttgagatgacttatatggtaataggcttgtttccatcagtccatattgtatacctataacagaatatcagtttgtttcctgtaaatatatataactataatttgtcaatatagaatttttttaaaaatcatattccagttcttattgtgttggttctaaataaaaatgcttctttctctt

SEQ ID NO: 34902 - DNA, 4219 bp, Homo sapiens
  source 1..4219: mol_type = unassigned DNA
gcagttgcccacagacccggaagtggatcgtgcggagcaagcatcacaccatggcgtatgagtgttcctctgtgtagactcaacctgcgcctcgccgtcccccattcgcacacccgatgcccgggggtcgctacggacttaaaatctccgcaccgcaccctccacctcagaaacgttcctggatccgaacactgccccctgacgacctagagagatcccggctcccagcccactgagtggcttcagcctcgctggaagaagtctggaagaagaggaagaggaaagaaaaggagtcagggatggcccttactcaggtacggttgacatttagggatgtggccatagaattctctcaggaggagtggaaatgcctggaccctgctcagaggatcttatacagggacgtgatgttggagaactactggaaccttgtttctctgggactgtgtcattttgatatgaatattatctccatgttggaggaagggaaagagccctggactgtgaagagctgtgtgaaaatagcaagaaaaccaagaacgccggaatgtgtcaaaggcgtggtcacagatatccctcctaaatgtacaatcaaggatttgctaccaaaagagaagagcagtacagaagcagtattccacacagtggtgttggaaagacacgaaagccctgacattgaagacttttccttcaaggaaccccagaaaaatgtgcatgattttgagtgtcaatggagagatgacacaggaaattacaagggagtgcttatggcccagaaagaaggtaaaagagatcaacgcgacagaagagacatagaaaacaagcttatgaacaatcagcttggagtaagctttcattctcatctgcctgaactgcagctatttcaaggtgaggggaaaatgtatgaatgtaatcaagttgagaagtctaccaacaatggttcctcagtgtcaccacttcaacaaattccttctagtgtccaaacccacaggtctaaaaaatatcatgaacttaaccatttttcattactcacacaaagacgaaaagcaaacagttgtggaaaaccttataaatgtaatgaatgtggcaaggcgttcactcagaattcgaaccttacaagtcataggagaattcatagtggagagaagccttacaaatgcagtgagtgcggcaaaacctttactgttcgttcaaatctaactattcatcaggtcatccatactggagaaaaaccttacaaatgtcatgagtgtggcaaggtcttcaggcacaattcataccttgcaactcatcggcgaattcatactggagagaaaccttacaagtgtaatgagtgtggaaaagcctttagaggacattcaaacctaactacccatcagttaattcatactggagaaaaaccgttcaaatgtaatgaatgtggcaagctcttcactcaaaattcacaccttataagtcattggagaattcacactggagagaaaccttacaagtgcaatgagtgcggcaaagcctttagtgttcgttcaagcctagcaatccatcagacaatccacactggagaaaaaccttacaaatgtaatgaatgtggcaaagtctttaggtacaattcatacctcggaaggcatcggagagttcatactggtgagaaaccttacaagtgtaatgaatgtggcaaagccttcagtatgcattcaaacctagctacccatcaggtcatccatactggaacaaaacctttcaaatgcaatgaatgcagcaaggttttcactcaaaattcacaacttgcaaatcatcgaagaattcatactggagagaaaccttacaagtgtaatgagtgtgggaaagccttcagtgttcgttcaagtctgactacccatcaggcaatccattctggagagaaaccttacaaatgtattgaatgtggcaagagcttcactcaaaaatcacaccttagaagtcatcggggaattcattctggagagaaaccttacaagtgtaatgaatgtggtaaagtcttcgctcaaacatcacaacttgcaaggcattggagagttcatactggagaaaaaccttacaagtgtaatgactgtggcagagcctttagtgatcgttcaagcctaacttttcatcaggcaatacatactggagagaaaccttacaaatgtcatgaatgcggcaaggtttttaggcacaattcataccttgcaactcatcggcgaattcatactggagagaaaccttacaagtgtaatgagtgtgggaaagcctttagtatgcattcaaacctaactacccataaggtcatccatactggagagaagccttacaaatgtaatcaatgtggcaaggtcttcactcagaactcacaccttgcaaatcatcaaaggactcacaccggagagaaaccttaccgatgcaatgagtgtgggaaagccttcagtgttcgttcaagcctaaccacccatcaggcaatccatactgggaaaaaaccttacaaatgtaatgaatgtggcaaggtctttactcaaaatgctcacctggcaaatcaccgaagaattcatactggggagaaaccttacaggtgtacagagtgtgggaaagcctttagggtaagatcaagtctaactacccatatggcaatccacactggagaaaagcgttacaaatgtaatgagtgtggcaaggtcttcaggcagagttcaaatcttgcaagtcatcacagaatgcataccggagagaaaccttacaaatgagtgtggtgaggtcattaggtacaattcactcctttcacatcagttaatttcattcttgacagaatccttacaaatgtagtgacagtggccaatccctcatgagttgaagcattaatagatatgagaggccataagcaagagacatcatgtaaacatatgtggcagagggtctatccaggcctcgcaggttactaggcatcaagatttatatctttgatgaaacgaaacaaatgtaatatgcatcctgaggccattacccagtgaccgatggtaagtgaggattcctaggaggaataacagtctctggtttccctgtttgcctttgatattatacactgtagaatactcacaagtccaaatatgctaaaaattatatatttttaactcacatacgaaaaggttgcaggatatttgtaggcagtcagttaccttcaccttatgaaatgtttcactgagttatttgaggttttttggaaagcctactattgcgtttcaatgtgaactttgaaatcttattgtgcatccttacacaccttccatggtgctttcttggaaagatcattgggatggaaggatcattgattgggtgaagatcattgattaggtgaaggattatttctatccaatttgtgaagaaggaggactttgcttttaaaattaagtatcatctgaattagcatttgggagtggcgaaaaacaatgtaaaactatgatgtcactcaccattctgataatgttcagggtgcctttctcctaccaggagagtactgtggcttagaggaaagaaatggtctatcaactgaacatgaaatggagcaggccaagaccttaggacattgggatttttgtgggaggagagtaataggtaattagacactgattgtgtggtagaaatactgcaggggaaaaggtcgccctcttatgcatcaaagagcaatacctgttgtttagcaaagagtgatgaaaaattgatcttgttttgaaattgaagagagaggccaggcgcggtggctcacacctgtaatcccagcactttgggaggctgaggcaggtggatcacctgaggtcgggagttcgagaccagcctgaccaacatggagaaaccccaattgtactaaaaatacaaaattagccgggcgtggtggcaggtgcctgtaatcccagctacttgggaggctgaggcaggagagtgcttgaacccaggaggcggaggttgtggtgagccaagatcatgccactgcactccagcctgggcaacaagaacaaaactccatctaaagaagaaaaagaaaaactgaagagagagtagttgtcagagtgaagagtttaatcaacagaagtagagtaacatattctttagtagaactcacattatctgcttgaagcacattttgctaatgttttattcagaatgtatcatagatataatgttttaactaataaaatagaatggtttttctcta

SEQ ID NO: 34903 - DNA, 4336 bp, Homo sapiens
  source 1..4336: mol_type = unassigned DNA
gcagttgcccacagacccggaagtggatcgtgcggagcaagcatcacaccatggcgtatgagtgttcctctgtgtagactcaacctgcgcctcgccgtcccccattcgcacacccgatgcccgggggtcgctacggacttaaaatctccgcaccgcaccctccacctcagaaacgttcctggatccgaacactgccccctgacgacctagagagatcccggctcccagcccactgagtggcttcagcctcgctggcacctcccaactcctggcctctctgcacgaggcgcctgccccgggccccgcctacaggggacccagctcttcttgcagccactggaagctgatcacctggagtgaagacctcacacgaagaagtctggaagaagaggaagaggaaagaaaaggagtcagggatggcccttactcaggtacggttgacatttagggatgtggccatagaattctctcaggaggagtggaaatgcctggaccctgctcagaggatcttatacagggacgtgatgttggagaactactggaaccttgtttctctgggactgtgtcattttgatatgaatattatctccatgttggaggaagggaaagagccctggactgtgaagagctgtgtgaaaatagcaagaaaaccaagaacgccggaatgtgtcaaaggcgtggtcacagatatccctcctaaatgtacaatcaaggatttgctaccaaaagagaagagcagtacagaagcagtattccacacagtggtgttggaaagacacgaaagccctgacattgaagacttttccttcaaggaaccccagaaaaatgtgcatgattttgagtgtcaatggagagatgacacaggaaattacaagggagtgcttatggcccagaaagaaggtaaaagagatcaacgcgacagaagagacatagaaaacaagcttatgaacaatcagcttggagtaagctttcattctcatctgcctgaactgcagctatttcaaggtgaggggaaaatgtatgaatgtaatcaagttgagaagtctaccaacaatggttcctcagtgtcaccacttcaacaaattccttctagtgtccaaacccacaggtctaaaaaatatcatgaacttaaccatttttcattactcacacaaagacgaaaagcaaacagttgtggaaaaccttataaatgtaatgaatgtggcaaggcgttcactcagaattcgaaccttacaagtcataggagaattcatagtggagagaagccttacaaatgcagtgagtgcggcaaaacctttactgttcgttcaaatctaactattcatcaggtcatccatactggagaaaaaccttacaaatgtcatgagtgtggcaaggtcttcaggcacaattcataccttgcaactcatcggcgaattcatactggagagaaaccttacaagtgtaatgagtgtggaaaagcctttagaggacattcaaacctaactacccatcagttaattcatactggagaaaaaccgttcaaatgtaatgaatgtggcaagctcttcactcaaaattcacaccttataagtcattggagaattcacactggagagaaaccttacaagtgcaatgagtgcggcaaagcctttagtgttcgttcaagcctagcaatccatcagacaatccacactggagaaaaaccttacaaatgtaatgaatgtggcaaagtctttaggtacaattcatacctcggaaggcatcggagagttcatactggtgagaaaccttacaagtgtaatgaatgtggcaaagccttcagtatgcattcaaacctagctacccatcaggtcatccatactggaacaaaacctttcaaatgcaatgaatgcagcaaggttttcactcaaaattcacaacttgcaaatcatcgaagaattcatactggagagaaaccttacaagtgtaatgagtgtgggaaagccttcagtgttcgttcaagtctgactacccatcaggcaatccattctggagagaaaccttacaaatgtattgaatgtggcaagagcttcactcaaaaatcacaccttagaagtcatcggggaattcattctggagagaaaccttacaagtgtaatgaatgtggtaaagtcttcgctcaaacatcacaacttgcaaggcattggagagttcatactggagaaaaaccttacaagtgtaatgactgtggcagagcctttagtgatcgttcaagcctaacttttcatcaggcaatacatactggagagaaaccttacaaatgtcatgaatgcggcaaggtttttaggcacaattcataccttgcaactcatcggcgaattcatactggagagaaaccttacaagtgtaatgagtgtgggaaagcctttagtatgcattcaaacctaactacccataaggtcatccatactggagagaagccttacaaatgtaatcaatgtggcaaggtcttcactcagaactcacaccttgcaaatcatcaaaggactcacaccggagagaaaccttaccgatgcaatgagtgtgggaaagccttcagtgttcgttcaagcctaaccacccatcaggcaatccatactgggaaaaaaccttacaaatgtaatgaatgtggcaaggtctttactcaaaatgctcacctggcaaatcaccgaagaattcatactggggagaaaccttacaggtgtacagagtgtgggaaagcctttagggtaagatcaagtctaactacccatatggcaatccacactggagaaaagcgttacaaatgtaatgagtgtggcaaggtcttcaggcagagttcaaatcttgcaagtcatcacagaatgcataccggagagaaaccttacaaatgagtgtggtgaggtcattaggtacaattcactcctttcacatcagttaatttcattcttgacagaatccttacaaatgtagtgacagtggccaatccctcatgagttgaagcattaatagatatgagaggccataagcaagagacatcatgtaaacatatgtggcagagggtctatccaggcctcgcaggttactaggcatcaagatttatatctttgatgaaacgaaacaaatgtaatatgcatcctgaggccattacccagtgaccgatggtaagtgaggattcctaggaggaataacagtctctggtttccctgtttgcctttgatattatacactgtagaatactcacaagtccaaatatgctaaaaattatatatttttaactcacatacgaaaaggttgcaggatatttgtaggcagtcagttaccttcaccttatgaaatgtttcactgagttatttgaggttttttggaaagcctactattgcgtttcaatgtgaactttgaaatcttattgtgcatccttacacaccttccatggtgctttcttggaaagatcattgggatggaaggatcattgattgggtgaagatcattgattaggtgaaggattatttctatccaatttgtgaagaaggaggactttgcttttaaaattaagtatcatctgaattagcatttgggagtggcgaaaaacaatgtaaaactatgatgtcactcaccattctgataatgttcagggtgcctttctcctaccaggagagtactgtggcttagaggaaagaaatggtctatcaactgaacatgaaatggagcaggccaagaccttaggacattgggatttttgtgggaggagagtaataggtaattagacactgattgtgtggtagaaatactgcaggggaaaaggtcgccctcttatgcatcaaagagcaatacctgttgtttagcaaagagtgatgaaaaattgatcttgttttgaaattgaagagagaggccaggcgcggtggctcacacctgtaatcccagcactttgggaggctgaggcaggtggatcacctgaggtcgggagttcgagaccagcctgaccaacatggagaaaccccaattgtactaaaaatacaaaattagccgggcgtggtggcaggtgcctgtaatcccagctacttgggaggctgaggcaggagagtgcttgaacccaggaggcggaggttgtggtgagccaagatcatgccactgcactccagcctgggcaacaagaacaaaactccatctaaagaagaaaaagaaaaactgaagagagagtagttgtcagagtgaagagtttaatcaacagaagtagagtaacatattctttagtagaactcacattatctgcttgaagcacattttgctaatgttttattcagaatgtatcatagatataatgttttaactaataaaatagaatggtttttctcta

SEQ ID NO: 34904 - DNA, 4229 bp, Homo sapiens
  source 1..4229: mol_type = unassigned DNA
cctgcgcctcgccgtcccccattcgcacacccgatgcccgggggtcgctacggacttaaaatctccgcaccgcaccctccacctcagaaacgttcctggatccgaacactgccccctgacgacctagagagatcccggctcccagcccactgagtggcttcagcctcgctggcgcctgccccgggccccgcctacaggggacccagctcttcttgcagccactggaagctgatcacctggagtgaagacctcacacgaagaagtctggaagaagaggaagaggaaagaaaaggagtcagggatggcccttactcaggtacggttgacatttagggatgtggccatagaattctctcaggaggagtggaaatgcctggaccctgctcagaggatcttatacagggacgtgatgttggagaactactggaaccttgtttctctgggactgtgtcattttgatatgaatattatctccatgttggaggaagggaaagagccctggactgtgaagagctgtgtgaaaatagcaagaaaaccaagaacgccggaatgtgtcaaaggcgtggtcacagatatccctcctaaatgtacaatcaaggatttgctaccaaaagagaagagcagtacagaagcagtattccacacagtggtgttggaaagacacgaaagccctgacattgaagacttttccttcaaggaaccccagaaaaatgtgcatgattttgagtgtcaatggagagatgacacaggaaattacaagggagtgcttatggcccagaaagaaggtaaaagagatcaacgcgacagaagagacatagaaaacaagcttatgaacaatcagcttggagtaagctttcattctcatctgcctgaactgcagctatttcaaggtgaggggaaaatgtatgaatgtaatcaagttgagaagtctaccaacaatggttcctcagtgtcaccacttcaacaaattccttctagtgtccaaacccacaggtctaaaaaatatcatgaacttaaccatttttcattactcacacaaagacgaaaagcaaacagttgtggaaaaccttataaatgtaatgaatgtggcaaggcgttcactcagaattcgaaccttacaagtcataggagaattcatagtggagagaagccttacaaatgcagtgagtgcggcaaaacctttactgttcgttcaaatctaactattcatcaggtcatccatactggagaaaaaccttacaaatgtcatgagtgtggcaaggtcttcaggcacaattcataccttgcaactcatcggcgaattcatactggagagaaaccttacaagtgtaatgagtgtggaaaagcctttagaggacattcaaacctaactacccatcagttaattcatactggagaaaaaccgttcaaatgtaatgaatgtggcaagctcttcactcaaaattcacaccttataagtcattggagaattcacactggagagaaaccttacaagtgcaatgagtgcggcaaagcctttagtgttcgttcaagcctagcaatccatcagacaatccacactggagaaaaaccttacaaatgtaatgaatgtggcaaagtctttaggtacaattcatacctcggaaggcatcggagagttcatactggtgagaaaccttacaagtgtaatgaatgtggcaaagccttcagtatgcattcaaacctagctacccatcaggtcatccatactggaacaaaacctttcaaatgcaatgaatgcagcaaggttttcactcaaaattcacaacttgcaaatcatcgaagaattcatactggagagaaaccttacaagtgtaatgagtgtgggaaagccttcagtgttcgttcaagtctgactacccatcaggcaatccattctggagagaaaccttacaaatgtattgaatgtggcaagagcttcactcaaaaatcacaccttagaagtcatcggggaattcattctggagagaaaccttacaagtgtaatgaatgtggtaaagtcttcgctcaaacatcacaacttgcaaggcattggagagttcatactggagaaaaaccttacaagtgtaatgactgtggcagagcctttagtgatcgttcaagcctaacttttcatcaggcaatacatactggagagaaaccttacaaatgtcatgaatgcggcaaggtttttaggcacaattcataccttgcaactcatcggcgaattcatactggagagaaaccttacaagtgtaatgagtgtgggaaagcctttagtatgcattcaaacctaactacccataaggtcatccatactggagagaagccttacaaatgtaatcaatgtggcaaggtcttcactcagaactcacaccttgcaaatcatcaaaggactcacaccggagagaaaccttaccgatgcaatgagtgtgggaaagccttcagtgttcgttcaagcctaaccacccatcaggcaatccatactgggaaaaaaccttacaaatgtaatgaatgtggcaaggtctttactcaaaatgctcacctggcaaatcaccgaagaattcatactggggagaaaccttacaggtgtacagagtgtgggaaagcctttagggtaagatcaagtctaactacccatatggcaatccacactggagaaaagcgttacaaatgtaatgagtgtggcaaggtcttcaggcagagttcaaatcttgcaagtcatcacagaatgcataccggagagaaaccttacaaatgagtgtggtgaggtcattaggtacaattcactcctttcacatcagttaatttcattcttgacagaatccttacaaatgtagtgacagtggccaatccctcatgagttgaagcattaatagatatgagaggccataagcaagagacatcatgtaaacatatgtggcagagggtctatccaggcctcgcaggttactaggcatcaagatttatatctttgatgaaacgaaacaaatgtaatatgcatcctgaggccattacccagtgaccgatggtaagtgaggattcctaggaggaataacagtctctggtttccctgtttgcctttgatattatacactgtagaatactcacaagtccaaatatgctaaaaattatatatttttaactcacatacgaaaaggttgcaggatatttgtaggcagtcagttaccttcaccttatgaaatgtttcactgagttatttgaggttttttggaaagcctactattgcgtttcaatgtgaactttgaaatcttattgtgcatccttacacaccttccatggtgctttcttggaaagatcattgggatggaaggatcattgattgggtgaagatcattgattaggtgaaggattatttctatccaatttgtgaagaaggaggactttgcttttaaaattaagtatcatctgaattagcatttgggagtggcgaaaaacaatgtaaaactatgatgtcactcaccattctgataatgttcagggtgcctttctcctaccaggagagtactgtggcttagaggaaagaaatggtctatcaactgaacatgaaatggagcaggccaagaccttaggacattgggatttttgtgggaggagagtaataggtaattagacactgattgtgtggtagaaatactgcaggggaaaaggtcgccctcttatgcatcaaagagcaatacctgttgtttagcaaagagtgatgaaaaattgatcttgttttgaaattgaagagagaggccaggcgcggtggctcacacctgtaatcccagcactttgggaggctgaggcaggtggatcacctgaggtcgggagttcgagaccagcctgaccaacatggagaaaccccaattgtactaaaaatacaaaattagccgggcgtggtggcaggtgcctgtaatcccagctacttgggaggctgaggcaggagagtgcttgaacccaggaggcggaggttgtggtgagccaagatcatgccactgcactccagcctgggcaacaagaacaaaactccatctaaagaagaaaaagaaaaactgaagagagagtagttgtcagagtgaagagtttaatcaacagaagtagagtaacatattctttagtagaactcacattatctgcttgaagcacattttgctaatgttttattcagaatgtatcatagatataatgttttaactaataaaatagaatggtttttctctatgaatgaa

SEQ ID NO: 34905 - DNA, 3528 bp, Homo sapiens
  source 1..3528: mol_type = unassigned DNA
gtgttcacggccggctagacattctgtgctcgtgcaggaggagggctgctaccatcagggacgtgcacgatttcccccaccccgccccctccccaaactccaaaaaaaaatccaaaacacactgccacccaccgtgcccccgcgccccgagcccctccggtcccggcctgcgtttgctagcgagcgcggggaacccacggcagtgtctgtgcctgtgccaggctgcaggatatgggtctgcaggatggagttcttccggtctggcgtgctcctgatcagagttactctgatctgaagattttggcgttcaaggcattaagataatagcctgagttgttcatggagtttttcatcagtatgtctgaaaccattaaatataatgacgatgatcataaaactctgtttctgaaaacactaaatgaacaacgcctggaaggagaattttgtgatattgctattgtggttgaggatgtgaaattcagagcacacagatgtgttcttgctgcctgcagcacttactttaaaaagcttttcaagaagcttgaggttgatagttcttcggtcatagaaatagattttcttcgttctgatatatttgaagaggtcctgaactacatgtacacagcaaagatttccgtgaaaaaagaagatgttaacttaatgatgtcatcgggtcagattcttggtatccgatttttggataaactgtgttctcagaagcgtgatgtgtccagtcccgatgaaaacaatggtcagtccaaaagtaagtattgccttaaaataaatcgccccattggagatgctgctgacacccaggatgatgatgtagaggaaatcggggatcaggatgacagtccttctgatgacacagtagaaggcacacccccgagtcaggaggacggcaagtcgcccaccacaacgctcagggttcaggaagcgatcctgaaagagctggggagtgaggaagttcggaaggtcaattgctacggccaggaagtagaatccatggagaccccagaatcaaaagacttggggtcccagacccctcaagccttaacatttaatgatgggatgagtgaagtgaaagatgaacagacaccaggctggacaacagccgccagtgacatgaagtttgagtatttgctttatggtcaccatcgggagcagattgcctgccaggcgtgtgggaagacgttttctgatgaaggcagattgaggaagcatgagaaactccacacggcggacaggccatttgtttgtgaaatgtgcacaaaaggtttcaccacacaggcccacctgaaagaacacctaaaaatccacacaggatataagccctatagctgtgaggtgtgtggaaaatcatttatccgtgccccagacttaaagaagcatgagagagttcacagtaatgaaagaccgtttgcgtgccacatgtgtgacaaagccttcaaacacaagtctcacctcaaggatcatgaaagaagacacagaggggaaaagccttttgtgtgtggctcctgcaccaaggcatttgccaaggcatctgatctgaaaaggcacgagaacaatatgcacagtgaaaggaagcaggttacccccagtgccatccagagcgagacagaacagttgcaggcggcagcgatggctgcggaagcagaacagcagctggagacgatagcctgtagctagaggcggtgggacagggacactttgcctggaaagtggagactgagatgacgtggatcataatgagtgaatgccagttacaatatttttgtggaaacgtatggaacattgtactcactggacttaaggcagtgcttggttagctatttttaagacttttcaaggaaatggtgttcctcagttctgaccaaaccgtttcactgtcttgtctggtgtctagtattaatgttgcccagtaagcacctctctcccttttttttttttattattttaatttgagaactcctgtgtccagtttagaagtgagagacttccatttttagttcctttacactcaccaccctagcaagtgccctgcacagagtaataagtaaattgatttcctaatcacaattctatgtgacttatggtcaaaagagcagttttaataactttaaaagtacttcagatagacgcagaaaattggtgagtggttgaccaagaacactgcacaaatataaaaaaagttctggaaatgcagaatggcgttagatttatatttggtttgttaattttatatcactgtttttcactgtttttgtggacaaataatggttgctttgctgaagtgttcttcctcaatcttgattgccctgtacctacccaaaagctgtagtcacacatcctaaaggccaagcaaacccaccgggatggtggggggtcttggagccaagctcttaggttcctcttatttggggcagtaccagtccataccagctgcgatttgtgagtggacctgtggtaagaagaatagaaaaggctctcagagataaggttttttacatgtgtaacaatcccaagatttcctagattaaaatcttaattgattttgaaattggatttttatttagaatcaaaattaggacaagaacagataacttcttcagatacatttgtgtaactttacagaatgtcatcaagctttggggctctgtggggcacatgatttatccataaaggagatgcagtatgcttacttaaattaataaatttaaaatcttttaagtgtgtaaatagtagtgttggtcttacgtatttcaagtaaaaagtagacagctgcactttttttgcacattggattaaaataacttccatcagcaacaaacatcagactgtttttaacaaatattaaagattgtcagaccaaatgtttatgttttcgaaatatatttcatcactggttacagttttaaatagaagttgattgccttttcatagccgtaaatgagaattataaactctattccagttttggtatactaaatgttcttttaaccatctttaggaatatattgaaatgccaacaatagtttgaattgtgttctgtaaaaaagtattagtcaattatttttcaaaatgtagaattgtagaaaatgtcaatttttcaaactcatttttcattgctaggatttcttttaaaaaaattaaagtaatttcacttcatagcttgttgcattaacacctgtaattctattgtgaaagaaatttgattttttaattggtgtgtgttatgcccaagatgttaggatgaagatgctacctttttaaaaattttagttattggtaaaatgtttaattttacttaaaattaatttcttttcttgaaagttgtttattctgttctaaaagtagtcctgtcactgtgtttttatgctacttatagaaggggaactgattgccgttcctaggctgttttaaccaaagcaaaggaaaaataattttaacatcttgtcaatagctacttcaacaaaccatattttgggacttcattttttgtatataaaagaaaatatacttctatca

SEQ ID NO: 34906 - DNA, 3497 bp, Homo sapiens
  source 1..3497: mol_type = unassigned DNA
gtgttcacggccggctagacattctgtgctcgtgcaggaggagggctgctaccatcagggacgtgcacgatttcccccaccccgccccctccccaaactccaaaaaaaaatccaaaacacactgccacccaccgtgcccccgcgccccgagcccctccggtcccggcctgcgtttgctagcgagcgcggggaacccacggcagtgtctgtgcctgtgccaggctgcaggtctggcgtgctcctgatcagagttactctgatctgaagattttggcgttcaaggcattaagataatagcctgagttgttcatggagtttttcatcagtatgtctgaaaccattaaatataatgacgatgatcataaaactctgtttctgaaaacactaaatgaacaacgcctggaaggagaattttgtgatattgctattgtggttgaggatgtgaaattcagagcacacagatgtgttcttgctgcctgcagcacttactttaaaaagcttttcaagaagcttgaggttgatagttcttcggtcatagaaatagattttcttcgttctgatatatttgaagaggtcctgaactacatgtacacagcaaagatttccgtgaaaaaagaagatgttaacttaatgatgtcatcgggtcagattcttggtatccgatttttggataaactgtgttctcagaagcgtgatgtgtccagtcccgatgaaaacaatggtcagtccaaaagtaagtattgccttaaaataaatcgccccattggagatgctgctgacacccaggatgatgatgtagaggaaatcggggatcaggatgacagtccttctgatgacacagtagaaggcacacccccgagtcaggaggacggcaagtcgcccaccacaacgctcagggttcaggaagcgatcctgaaagagctggggagtgaggaagttcggaaggtcaattgctacggccaggaagtagaatccatggagaccccagaatcaaaagacttggggtcccagacccctcaagccttaacatttaatgatgggatgagtgaagtgaaagatgaacagacaccaggctggacaacagccgccagtgacatgaagtttgagtatttgctttatggtcaccatcgggagcagattgcctgccaggcgtgtgggaagacgttttctgatgaaggcagattgaggaagcatgagaaactccacacggcggacaggccatttgtttgtgaaatgtgcacaaaaggtttcaccacacaggcccacctgaaagaacacctaaaaatccacacaggatataagccctatagctgtgaggtgtgtggaaaatcatttatccgtgccccagacttaaagaagcatgagagagttcacagtaatgaaagaccgtttgcgtgccacatgtgtgacaaagccttcaaacacaagtctcacctcaaggatcatgaaagaagacacagaggggaaaagccttttgtgtgtggctcctgcaccaaggcatttgccaaggcatctgatctgaaaaggcacgagaacaatatgcacagtgaaaggaagcaggttacccccagtgccatccagagcgagacagaacagttgcaggcggcagcgatggctgcggaagcagaacagcagctggagacgatagcctgtagctagaggcggtgggacagggacactttgcctggaaagtggagactgagatgacgtggatcataatgagtgaatgccagttacaatatttttgtggaaacgtatggaacattgtactcactggacttaaggcagtgcttggttagctatttttaagacttttcaaggaaatggtgttcctcagttctgaccaaaccgtttcactgtcttgtctggtgtctagtattaatgttgcccagtaagcacctctctcccttttttttttttattattttaatttgagaactcctgtgtccagtttagaagtgagagacttccatttttagttcctttacactcaccaccctagcaagtgccctgcacagagtaataagtaaattgatttcctaatcacaattctatgtgacttatggtcaaaagagcagttttaataactttaaaagtacttcagatagacgcagaaaattggtgagtggttgaccaagaacactgcacaaatataaaaaaagttctggaaatgcagaatggcgttagatttatatttggtttgttaattttatatcactgtttttcactgtttttgtggacaaataatggttgctttgctgaagtgttcttcctcaatcttgattgccctgtacctacccaaaagctgtagtcacacatcctaaaggccaagcaaacccaccgggatggtggggggtcttggagccaagctcttaggttcctcttatttggggcagtaccagtccataccagctgcgatttgtgagtggacctgtggtaagaagaatagaaaaggctctcagagataaggttttttacatgtgtaacaatcccaagatttcctagattaaaatcttaattgattttgaaattggatttttatttagaatcaaaattaggacaagaacagataacttcttcagatacatttgtgtaactttacagaatgtcatcaagctttggggctctgtggggcacatgatttatccataaaggagatgcagtatgcttacttaaattaataaatttaaaatcttttaagtgtgtaaatagtagtgttggtcttacgtatttcaagtaaaaagtagacagctgcactttttttgcacattggattaaaataacttccatcagcaacaaacatcagactgtttttaacaaatattaaagattgtcagaccaaatgtttatgttttcgaaatatatttcatcactggttacagttttaaatagaagttgattgccttttcatagccgtaaatgagaattataaactctattccagttttggtatactaaatgttcttttaaccatctttaggaatatattgaaatgccaacaatagtttgaattgtgttctgtaaaaaagtattagtcaattatttttcaaaatgtagaattgtagaaaatgtcaatttttcaaactcatttttcattgctaggatttcttttaaaaaaattaaagtaatttcacttcatagcttgttgcattaacacctgtaattctattgtgaaagaaatttgattttttaattggtgtgtgttatgcccaagatgttaggatgaagatgctacctttttaaaaattttagttattggtaaaatgtttaattttacttaaaattaatttcttttcttgaaagttgtttattctgttctaaaagtagtcctgtcactgtgtttttatgctacttatagaaggggaactgattgccgttcctaggctgttttaaccaaagcaaaggaaaaataattttaacatcttgtcaatagctacttcaacaaaccatattttgggacttcattttttgtatataaaagaaaatatacttctatc

SEQ ID NO: 34907 - DNA, 2107 bp, Homo sapiens
  source 1..2107: mol_type = unassigned DNA
gtccgggtttggggatccagatgtccagccccgtgtccccctccaaacatccagtccctctcatattgcctttgaaattagcagcctctgggtgaccagaccttggccctcagaggaatcccggagaaaggtagaaccagcttcggcgttgggaacgcaggcgcgcttacgcatttagtgagggtttggcggtctccatagttaccgccgccgcgcgtgacgtcatagtggagcgctgagggcttggtggcgtggggtgggggctgtcctactgatcctgaatttggggtcactggtaagaggagttgcccattccagccaggtggaacggggaggggtgccacatgtctcagatctgccattgtctgcgaaaagaaactgctgcgaggaccatccccaatcccctgcttcccttgggaagagtaaccgccgttttgtaggacacttggggacaaccccgcttgtcctgaaatttattgacacggtaaatagtatttcctgtgtgccgaggatgcagttaaaccaacactgaccccctgcccttgagaaacacaagatggctacagaaccaaagaaagctgcagcccagaactctccagaggatgaaggacttctgatagtgaagatagaagaggaagaatttatccatgggcaggacacttgcttacagagaagtgaactccttaagcaggagctctgcaggcagctttttaggcagttctgctaccaggattctcctggacctcgcgaggcactgagccgcctccgggagctctgctgtcagtggctgaagccagagatccataccaaggaacagattctggaactgctggtgctagagcagttcctgaccatcctgccaggagatttgcaggcctgggtacatgaacattacccagagagtggagaggaggcagtgaccatactagaagatttggagagaggcactgatgaagcagtactccaggttcaagcccatgaacatggacaagaaatattccagaaaaaagtgtcacctcctggaccagcacttaatgtcaagttacagccagtggagaccaaggcccattttgattcatcagaaccccagctcctatgggactgtgataatgagagtgaaaacagtagatccatgccaaagctggaaatttttgaaaaaattgaatcacagagaattatatctggaagaatctcaggatacatatcagaagcatctggtgagtctcaagacatctgtaagtctgcaggcagggtaaagagacaatgggaaaaagaatcaggggagtctcagagactctcgtctgcccaggatgaaggttttggtaaaatcctcacccacaaaaatacagtcagaggtgaaataataagccacgatggatgtgagaggagattaaatctgaactcaaatgaattcacacaccagaaatcttgtaaacatggtacctgtgaccagagcttcaaatggaactcagattttattaaccatcaaataatttatgctggagaaaaaaatcaccaatatggaaaatctttcaagagcccaaaacttgctaaacatgcagcagttttcagtggagataaaactcatcagtgtaatgaatgtgggaaagctttcaggcacagctcaaaacttgctaggcatcagagaatccacactggagagagatgctatgaatgtaatgaatgtgggaaaagctttgcagagagctcagatcttactagacatcggcgaattcacactggggaaagaccctttggttgcaaagaatgtgggagagcattcaacctgaactcacatcttatcaggcatcagagaattcacaccagagagaaaccctacgagtgtagtgaatgtgggaaaaccttccgagtgagctcacatcttattcgacactttagaattcacactggagaaaaaccctatgaatgcagtgagtgtggaagagccttcagtcagagctcaaaccttagtcaacaccagagaattcacatgagggaaaacctattaatgtaaggaacttaaatttgtaagtaaatgctgaggaaatggcacaatatgaaaaatattaaataaaaaataaatattgggcaagatggaagactgaaa

SEQ ID NO: 34908 - DNA, 2319 bp, Homo sapiens
  source 1..2319: mol_type = unassigned DNA
gatttgcctctgcaacttgactctcctctaggaagagtactccagagagcagggatatgtcaccaggactcctgacaaccaggaaggaggcattgatggccttccgggatgtggctgtggccttcacccagaaggagtggaagctattgagttctgctcagaggaccctgtacagggaggtgatgctggagaactacagccatctggtctccctgggaattgcattttccaaaccaaaactcatcgaacagctggagcaaggcgacgaaccttggagagaggagaacgaacatcttctggacctttgtccagctcagacaccaagttcttggctcttgcataaacagcaggccgaacaaatgtttctcaggcaaggtttaataggcttgagctggagcaaaagcaagggagcggcgcccaagaaaggaagataaatgtgtaactctacttgcagcaatttatagagctgaagctgcctgtgatgcttttttgaaccttttagtttggctgataggactagtttgtagtgtgggttttctgtgctgcaatagagcatgtaatgtgcccttgtgggttggaagataagtctttgttgtgaacatctgaagaaaactgctgggcaggtattacaatccatggtcacctgtggtgattctgaccaagactttctctctagcagagcctagaacagaattccagccaagttttccccacctggtggccttttctagctcgcagctcctcagacaatatgcgctaagtggccatcccacacagatcttcccaagctcatctgcaggaggtgacttccaactagaagctccaagatgctctagtgaaaaaggagaaagtggagagacagaaggccccgacagctcattaagaaagaggccaagcagaatttctaggacattcttcagcccacatcaaggtgacccagtagaatgggtagaagggaacagagaaggaggaacagaccttcgcctggcccaaaggatgagtcttggggggtcagacacaatgttgaagggagcagacacttcagaatctggagcagtcatacgtggaaactatagactgggacttagcaaaaagtcaagcctgttcagccaccagaagcatcatgtgtgccctgaatgcgggagaggcttttgccagagatcagaccttatcaagcaccagaggacacacaccggggagaagccatacctgtgtcctgagtgtgggcgtcggtttagccagaaggcctccctctccatacaccagaggaagcactcgggggagaagccgtatgtgtgcagggaatgtgggcgacacttcaggtatacatcctctctcactaatcacaagaggattcactccggggagaggccctttgtatgtcaggagtgtgggcgaggctttcgccagaagatagccctccttctacaccagaggacgcacttggaggagaagcccttcgtgtgtcctgagtgtgggagaggcttttgccagaaggcatcactcctccagcaccagagctcacacacaggggagaggcccttcctgtgccttgagtgtgggcgtagcttcaggcagcagtcactcctccttagtcaccaggtcacacactcaggagagaagccttatgtctgtgctgagtgtgggcacagctttcgccaaaaggtcactctcatcaggcaccagaggacacacacaggggagaagccttacctgtgcccccagtgtgggcggggttttagccagaaggtcaccctcattggacaccagaggacacacacaggggagaagccctacctgtgccctgattgtgggcgtggctttggtcagaaggtcaccctcatcagacaccagaggacacacacaggggagaagccttatctgtgccccaagtgtgggcgtgcatttggctttaagtcgctcctcacccgacaccagaggacacactcagaggaggagctttacgtagacagggtgtgtggacaaggacttggccagaagtcacaccttatctctgaccaaaggacacactcaggagagaagccctgcatttgcgatgaatgtgggcgcggctttggctttaagtctgccctcatccgacatcagcggacccattctggggagaagccgtatgtctgcagggagtgtgggcgtggctttagccagaagtctcacttgcatagacacaggaggaccaagtctggtcatcagctcctaccccaagaggtcttctgacctttcctttccccgtgagtgtgaagctggcagaaatcactagtaaatgcttcagtttcctgaaatggaatggaaaaaaaaaaa

SEQ ID NO: 34909 - DNA, 543 bp, Homo sapiens
  source 1..543: mol_type = unassigned DNA
atttgcctctgcaacttgactctcctctaggaagagtactccagagagcagggatatgtcaccaggactcctgacaaccaggaaggaggcattgatggccttccgggatgtggctgtggccttcacccagaaggagtggaagctattgagttctgctcagaggaccctgtacagggaggtgatgctggagaactacagccatctggtctccctgggaattgcattttccaaaccaaaactcatcgaacagctggagcaaggcgacgaaccttggagagaggagaacgaacatcttctggacctttgtccaggcaggcggatcacaaggtcaggagttcgagactagtctggccaacatagtgaaaccccatctctactaaaaatacaaaaaaaactagccgagtgtggtggtgcgcacctgtaatcacagctactcgggaggctgaggcaggaggatcgcgtgaactcgggaggcggaggttgcagtgagccgagatcacactattgcactccagcccaggcaacagtgcgagactccatctc

SEQ ID NO: 34910 - DNA, 1986 bp, Homo sapiens
  source 1..1986: mol_type = unassigned DNA
tacttccgcgttccggcatcgtcgcctggtgcgtgatttgcctctgcaacttgactctcctctaggaagagtactccagagagcagggatatgtcaccaggactcctgacaaccaggaaggaggcattgatggccttccgggatgtggctgtggccttcacccagaaggagtggaagctattgagttctgctcagaggaccctgtacagggaggtgatgctggagaactacagccatctggtctccctgggaattgcattttccaaaccaaaactcatcgaacagctggagcaaggcgacgaaccttggagagaggagaacgaacatcttctggacctttgtccagagcctagaacagaattccagccaagttttccccacctggtggccttttctagctcgcagctcctcagacaatatgcgctaagtggccatcccacacagatcttcccaagctcatctgcaggaggtgacttccaactagaagctccaagatgctctagtgaaaaaggagaaagtggagagacagaaggccccgacagctcattaagaaagaggccaagcagaatttctaggacattcttcagcccacatcaaggtgacccagtagaatgggtagaagggaacagagaaggaggaacagaccttcgcctggcccaaaggatgagtcttggggggtcagacacaatgttgaagggagcagacacttcagaatctggagcagtcatacgtggaaactatagactgggacttagcaaaaagtcaagcctgttcagccaccagaagcatcatgtgtgccctgaatgcgggagaggcttttgccagagatcagaccttatcaagcaccagaggacacacaccggggagaagccatacctgtgtcctgagtgtgggcgtcggtttagccagaaggcctccctctccatacaccagaggaagcactcgggggagaagccgtatgtgtgcagggaatgtgggcgacacttcaggtatacatcctctctcactaatcacaagaggattcactccggggagaggccctttgtatgtcaggagtgtgggcgaggctttcgccagaagatagccctccttctacaccagaggacgcacttggaggagaagcccttcgtgtgtcctgagtgtgggagaggcttttgccagaaggcatcactcctccagcaccagagctcacacacaggggagaggcccttcctgtgccttgagtgtgggcgtagcttcaggcagcagtcactcctccttagtcaccaggtcacacactcaggagagaagccttatgtctgtgctgagtgtgggcacagctttcgccaaaaggtcactctcatcaggcaccagaggacacacacaggggagaagccttacctgtgcccccagtgtgggcggggttttagccagaaggtcaccctcattggacaccagaggacacacacaggggagaagccctacctgtgccctgattgtgggcgtggctttggtcagaaggtcaccctcatcagacaccagaggacacacacaggggagaagccttatctgtgccccaagtgtgggcgtgcatttggctttaagtcgctcctcacccgacaccagaggacacactcagaggaggagctttacgtagacagggtgtgtggacaaggacttggccagaagtcacaccttatctctgaccaaaggacacactcaggagagaagccctgcatttgcgatgaatgtgggcgcggctttggctttaagtctgccctcatccgacatcagcggacccattctggggagaagccgtatgtctgcagggagtgtgggcgtggctttagccagaagtctcacttgcatagacacaggaggaccaagtctggtcatcagctcctaccccaagaggtcttctgacctttcctttccccgtgagtgtgaagctggcagaaatcactagtaaatgcttcagtttcctgaaatggaatggaaaaaaaaaaa

SEQ ID NO: 34911 - DNA, 2260 bp, Homo sapiens
  source 1..2260: mol_type = unassigned DNA
ccgccctggaggccggagccactgggcctgcggcgcctcggcagcgagcagccgctttgctcgcgtgcaggaggctgttcgctacctcacacccccggctggcgctgtggcctcgcttagctctaccgtttagcacccggcgacatgcacccggtcggtttccgccaggatgcgggagagttggggcaagctacctgcgacagcttgaacttttcctagggattccgctccacccgccggttagagcgtattgctcattaaatccgagacctgtgtgcttgctactgaaataaaagaagtattttttccccagagtccttttaggacgttatgacttttctcctttgcaagactgcaaaaaactgacaagaagacaaaactcttcccactcccagggaccgcgttgtcttgagtttggctagtaaaggctagcaagtgaggctttgtctctgcatcccgttccccctaacatcctcagagaaccttcgtttctagaatctttctagtattcagagacttctccagggtcatgatcccaaaggcttaacccgtttacaaggagagagttgtctcctgacgcccaaaatggcagctaaaatggagataactttaagctccaacactgaagcttcctccaagcaagagagacacataatagccaaactagaagagaaacggggccctcctctgcaaaaaaactgcccagatcctgagctctgccgccagagcttcagacgcttttgttatcaagaggtgtctggaccccaagaggctctctcccagctccgacagctctgccgtcagtggttgcaacccgagctgcacaccaaggagcagattttggagcttctggtgatggagcagttcctgaccatcctgcccccggagatccaggctcgggtcaggcatcgatgtccaatgagcagcaaggagattgtgaccctcgtggaagattttcacagagcatccaagaaaccaaagcagtgggtggccgtttgtatgcaggggcaaaaggtgctcttggagaaaactggatctcagcttggagaacaggaactgccagactttcaaccgcagactcctaggagagatctcagggagagctctccagcagagccttcccaggcaggagcttatgaccggctgagcccccatcattgggagaaatccccactcctccaagaaccaacccccaaattggctgggacagaggcccccagaatgagaagtgacaacaaggaaaatccacaacaggaaggggctaaaggagcaaagccatgtgcagtgtcagctggcagatccaaagggaatggtctgcagaatcctgaaccaagaggggcaaatatgagtgaacctcggttgtcacggaggcaggtcagctccccaaatgctcaaaagccatttgctcactaccagagacattgcagggtggaatacatcagcagccccctaaaaagccacccactgagagagctaaagaaaagcaaaggaggtaaacggagtctgagcaaccgtttgcaacatcttggtcaccagcccacccgctcagcaaagaaaccctacaaatgtgatgactgtgggaaaagcttcacgtggaattcagagctgaagagacacaagagagtccacacaggagagagaccctacacgtgcggagagtgtggaaactgctttgggcggcagtcaaccctgaagctgcaccagaggatccacactggagagaagccataccagtgtggccagtgtgggaaaagctttcgccagagctcaaaccttcaccagcatcaccgacttcaccatggggactaaaaggagcactccatgctttagattcacacggaaggtgtttgtgtttctcctcccccttacttgcatgtaaatcacaaaaactgtgtgacttacaaggaaagcacgaggcccttgaggaatgatgatgcacattctgctgtgaggaggcccagaaaaggccaaccagggcccaaccgtgcatgatgacagggtgaagagaaggcaggtctgggcactggggcaaagagaacttaagtctctgcagagagcaaggagtaactactgagagagaatcaggacaatcctgcaggtggcccgcttactgttaaatcgtccctctgttgctttatcctctaaaatatgttaagggataaattctatatatatagttatgcatttgctgtcataccagacaattttttatcatgagcacacttctttaataaagatgagtgatctaccagaatttcaa

SEQ ID NO: 34912 - DNA, 1574 bp, Homo sapiens
  source 1..1574: mol_type = unassigned DNA
agcgagtggcatcggccccgcccccagcccgtgctcgccggtgtcgggtcctaagtccctcggtcttgggttcccggagaggtgagtcggctgcaggtgggtgcggggcgccgggctgttcggggtaccggtgtcgcagtcgccagtccgagctcacaccgggcgtggagttcagctgcgcatcgggttgcggcagcttcgccaggcctggggctggctgggccgcggggccgccctggaggccggagccactgggcctgcggcgcctcggcagcgagcagccgctttgctcgcgtgcaggaggctgttcgctacctcacacccccggctggcgctgtggcctcgcttagctctaccgtttagcacccggcgacatgcacccggtcggtttccgccaggatgcgggagagttggggcaagctacctgcgacagcttgaacttttcctagggattccgctccacccgccggttagagcgtattgctcattaaatccgagacctgtgtgcttgctactgaaataaaagaagtattttttccccagagtccttttaggacgttatgacttttctcctttgcaagactgcaaaaaactgacaagaagacaaaactcttcccactcccagggaccgcgttgtcttgagtttggctagtaaaggctagcaagtgaggctttgtctctgcatcccgttccccctaacatcctcagagaaccttcgtttctagaatctttctagtattcagagacttctccagggtcatgatcccaaaggcttaacccgtttacaaggagagagttgtctcctgacgcccaaaatggcagctaaaatggagataactttaagctccaacactgaagcttcctccaagcaagagagacacataatagccaaactagaagagaaacggggccctcctctgcaaaaaaactgcccagatcctgagctctgccgccagagcttcagacgcttttgttatcaagaggtgtctggaccccaagaggctctctcccagctccgacagctctgccgtcagtggttgcaacccgagctgcacaccaaggagcagattttggagcttctggtgatggagcagttcctgaccatcctgcccccggagatccaggctcgggtcaggcatcgatgtccaatgagcagcaaggagattgtgaccctcgtggaagattttcacagagcatccaagaaaccaaagcagtgggtggccgtttgtatgcaggggcaaaaggtgctcttggagaaaactggatctcagcttggagaacaggaactgccagactttcaaccgcagactcctaggagagatctcagggagagctctccagcagagccttcccaggcaggagcttatgaccggctgagcccccatcattgggagaaatccccactcctccaagaaccaacccccaaattggctgggacagaacttcttatagaaaagacagatccaaatatggccacagatgaacttccatgcaagctatggctgagtttcattgcttaaaatgctcctctgtttagaggggcctggtagaaataaaaacccaccctatatctt

SEQ ID NO: 34913 - DNA, 3742 bp, Homo sapiens
  source 1..3742: mol_type = unassigned DNA
gttgttaagtggatctaagcctatgtcgcttactggacgctgaagtgattgggaatattagcagtgggggttctgtagggtcaggaaggggcggctggctttgggggagtgatgaggggcttgttgggggtgggggtgcgtgataaagggatttctcggctgaagacgaggctgtgaggcttctgcagaacccccaggtcaggccacatcattgaggctgcaggatctctcttcatagcccagtacgactctccgccgtgtccctggttggaaaatccaaacacctatccagcttctggctcctgggaaaagtggagttgtcagcaagagagaccgagagtagaagcccagagtggagatgcctgctgatgtgaatttatcccagaagcctcaggtcctgggtccagagaagcaggatggatcttgcgaggcatcagtgtcatttgaggacgtgaccgtggacttcagcagggaggagtggcagcaactggaccctgcccagagatgcctgtaccgggatgtgatgctggagctctatagccatctcttcgcagtggggtatcacattcccaacccagaggtcatcttcagaatgctaaaagaaaaggagccgcgtgtggaggaggctgaagtctcacatcagaggtgtcaagaaagggagtttgggcttgaaatcccacaaaaggagatttctaagaaagcttcatttcaaaaggatatggtaggtgagttcacaagagatggttcatggtgttccattttagaagaactgaggctggatgctgaccgcacaaagaaagatgagcaaaatcaaattcaacccatgagtcacagtgctttcttcaacaagaaaacattgaacacagaaagcaattgtgaatataaggaccctgggaaaatgattcgcacgaggccccaccttgcttcttcacagaaacaacctcagaaatgttgcttatttacagaaagtttgaagctgaacctagaagtgaacggtcagaatgaaagcaatgacacagaacagcttgatgacgttgttgggtctggtcagctattcagccatagctcttctgatgcctgcagcaagaatattcatacaggagagacattttgcaaaggtaaccagtgtagaaaagtctgtggccataaacagtcactcaagcaacatcaaattcatactcagaagaaaccagatggatgttctgaatgtggggggagcttcacccagaagtcacacctctttgcccaacagagaattcatagtgtaggaaacctccatgaatgtggcaaatgtggaaaagccttcatgccacaactaaaactcagtgtatatctgacagatcatacaggtgatataccctgtatatgcaaggaatgtgggaaggtctttattcagagatcagaattgcttacgcaccagaaaacacacactagaaagaagccctataaatgccatgactgtggaaaagcctttttccagatgttatctctcttcagacatcagagaactcacagtagagaaaaactctatgaatgcagtgaatgtggcaaaggcttctcccaaaactcaaccctcattatacatcagaaaattcatactggtgagagacagtatgcatgcagtgaatgtgggaaagcctttacccagaagtcaacactcagcttgcaccagagaatccactcagggcagaagtcctatgtgtgtatcgaatgcgggcaggccttcatccagaaggcacacctgattgtccatcaaagaagccacacaggagaaaaaccttatcagtgccacaactgtgggaaatccttcatttccaagtcacagcttgatatacatcatcgaattcatacaggggagaaaccttatgaatgcagtgactgtggaaaaaccttcacccaaaagtcacacctgaatatacaccagaaaattcatactggagaaagacaccatgtatgcagtgaatgcgggaaagccttcaaccagaagtcaatactcagcatgcatcagagaattcacaccggagagaagccttacaaatgcagtgaatgtgggaaagccttcacttctaagtctcaattcaaagagcatcagcgaattcacacgggtgagaaaccctatgtgtgcactgaatgtgggaaggccttcaacggcaggtcaaatttccataaacatcaaataactcacactagagagaggccttttgtctgttacaaatgtgggaaggcttttgtccagaaatcagagttgattacccatcaaagaactcacatgggagagaaaccctatgaatgccttgactgtgggaaatcgttcagtaagaaaccacaactcaaggtgcatcagcgaattcacacgggagaaagaccttatgtgtgttctgaatgtggaaaggccttcaacaacaggtcaaacttcaataaacaccaaacaactcataccagagacaaatcttacaaatgcagttattctgtgaaaggctttaccaagcaatgaattcctagtgcatcagcatattcataaatgaaatatactccgagtttcttgaagaagagaaaatcttctcagaatcaggtctaattatatgttattgaattcatgcttcagaaaaactctagggatgcactgcatgtgtgaacacatgataaaaaagtcatgctttattttagtgagggcaattacagagaaaagagtaagcagaaatgtccttctgagtactggcctcattaaggattataaattttctccccgggaagaaaccctgactaacgcattgagaaaagcctttctgtaaagaatggtacaagacaggttgttactcgattatttatagtaaaatatgtgggaaattatatcaatgataaccctgtttattgtgggatatcaatatttttaaagtgccaacacagtcatgataggacaatattttatgtgtgtgtgtgcgccttatgtatataagcatatatataatatataagcatattattatatacaggttgagtatcccttctccaaaatgcctgggatcagaagcattttggatttcagatacttacagattttggaatatttgcattatatttattggttgagcatccctaatctgaaaatccaagattaaatgctccaattagcatttcctttgagcgtcatgttagagttcaaaaagtttcagattttgggttttcagattaggaatacccaacctgtatgtacgtatatttctgtatctatgtatgtatatatatgcatatgcagacatatgtatatggtctggtcagcatatgtgtatgtatgcgtatgtatgtatgtatgtatgccctcagtgcagtggggtttgctgcagaattcactgcatagcaggagatgtaagcagatgagttattttttaagagaatctaatctaattgtttttataaaaattattccctattgaatatttatataatgaggttgtatcaacaatgattaactcctttattatacatacacatgaatgtgcatttttggtaaatgcataaatgagattctataatgtttactgatctttatattacagattttctcttcttttaggattagctcagcttgccccccctttccatctccaccatctatagtgagcctctccataattagtgccaaccattagtctcgttcatatttttacaccaggagtcaacaaactgtggccattggccaaatatggcctcccaactgtttttttaaaataaagttttattg

SEQ ID NO: 34914 - DNA, 2260 bp, Homo sapiens
  source 1..2260: mol_type = unassigned DNA
cgccatctcccatagctgtcgcctgcagctgagaaagggttgctgtcccagcaggccaggtccagggctgggtataagtaagcaagaagagggcctgggagaagagtctgacgagcaaggggaaggtagccaaggatggagtgaaatacagggtgacctgtgtttttcccctggctgctttggaaattatgggaaaaaatcaaataccaaggaagaaaaatctataatgaaattagatgtggatttctttttatgtattcagcttgggggcttatgatacttctagtacccaaagagatgcggtcttgctgtgttgcctaggctggtctcaaactcctgctctcaagtgatcctcctgcctcagcctcctgagtacatttatatttaaagtaattattgatggctctgcctgcttaggactctgcccagccaggaaggaaacctacaggaggaagaatggctgcagggtggctgacaacctggtcacagaactcagtaaccttccaggaagtggcagtggacttttcccaggaggagtgggcattgctggaccctgctcaaaaaaatctatacaaagatgtgatgctggagaactttaggaacctggcctcagtagggtatcagctctgcagacacagtctgatctccaaggtggatcaagaacagctgaagacagatgaaagaggaattttacaaggtgactgtgcagactgggaaactcaacttaaaccaaaagatacaattgctatgcagaacattcctgggggaaaaacatccaatggcataaacacgaactgtgtcagaactcactctggagagatgccctatgaatgcagtgactgtgggaaagccttcatttttcagtcttcccttaagaaacacatgagatctcatactggagagaagccttatgagtgtgatcactgtggaaaatcctttagccagagctctcatctgaatgtgcacaaaagaactcacactggagagaaaccctatgactgtaaggaatgtgggaaggctttcactgttccttcatcccttcagaaacatgtgagaacccacactggagagaaaccctatgaatgcagtgactgtggaaaagccttcatcgatcagtcatcccttaagaaacacacacgctctcacactggagagaagccttatgagtgtaaccagtgtggaaagtccttcagcacaggctcttaccttattgtgcacaagagaactcacactggtgagaaaacctatgagtgtaaagaatgtgggaaggcctttaggaattcctcttgcctgagggtacacgtgagaactcacactggagagaagccttataaatgtattcagtgtgaaaaagcctttagcacaagcactaaccttataatgcacaagcgaatccacaatggccagaaactccatgaatgaaatgactcagggaagtgtttgttgcccctcatgcctcctttctcactttagaacatatattggagagaagccctgttatggtcacctggaaacagccttctggcccaactctggatgcctgttatactgggacaaaccttataaatgttatagctatgattgtttttatcagtgagtatttcattcttatatgtgtcacaactgtagatcctatgaatattttagttatcttttcagtttaattgcattgtgaacagaacacatggtcttcaatatgtagattctgtgtgacatagatttgaacataattgctggacactgactgatgtactgtggcagacagaactagttgctgtctcaatatccattcctcccttctttcttaaagtaataaaatttaccatttagttcaagctggcaatgtggacagttttcacccagcttcccttacagctgtgagcggccaaatatgttcacatccctagcccatgcaaagtaggcagaagtcactggatacagctgctaaggaagctcatggaaatgggaatatctcatctggtgtttttttcttaactatttgccctttgtcttgtcccttatttcctagaaaatatatacaccaagaggaggacagagaaaggatactaaatgaaacaacaggggagatacaatattatctggttgcactaatcctgtgctgcttatctctggatttcatgttacatgagaaaaattaactgccatgtggtttaaaccactcttgtgggaagttcctctttcagctgatttcagtcccaactgttacatctaataaatggtcaagttttaggaatcgttc

SEQ ID NO: 34915 - DNA, 2340 bp, Homo sapiens
  source 1..2340: mol_type = unassigned DNA
tagctctgcctgcttaggactctgcccagccaggaaggaaacctacaggaggaagaatggctgcagggtggctgacaacctggtcacagaactcagtaaccttccaggaagtggcagtggacttttcccaggaggagtgggcattgctggaccctgctcaaaaaaatctatacaaagatgtgatgctggagaactttaggaacctggcctcagtagggtatcagctctgcagacacagtctgatctccaaggtggatcaagaacagctgaagacagatgaaagaggaattttacaaggtgactgtgcagactgggaaactcaacttaaaccaaaagatacaattgctatgcagaacattcctgggggaaaaacatccaatggcataaacacggcagaaaatcaacctggtgagcactccctggagtgtaaccattgtgggaaattcagaaagaacactcgctttatttgtacaagatattgcaagggagagaaatgctataaatatataaagtatagcaaagtcttcaaccatccctcaactcttaggagtcatgtgagcattcacattggagagaaaactcttgaatttactgattgtagaaaagctttcaatcaagagtcatccctcaggaaacacttaagaactcccacaggacagaagtttcaggagtatgagcaatgtgatatgtccttcagcctacactcttcctgctcagtacgtgagcaaatacctactggagagaaaggtgatgaatgcagtgactatggcaaaatatctccccttagtgtccacacaaaaactggtagtgtggaggagggtttggaatgtaatgaacatgagaaaactttcactgaccctttgtcccttcagaactgtgtcagaactcactctggagagatgccctatgaatgcagtgactgtgggaaagccttcatttttcagtcttcccttaagaaacacatgagatctcatactggagagaagccttatgagtgtgatcactgtggaaaatcctttagccagagctctcatctgaatgtgcacaaaagaactcacactggagagaaaccctatgactgtaaggaatgtgggaaggctttcactgttccttcatcccttcagaaacatgtgagaacccacactggagagaaaccctatgaatgcagtgactgtggaaaagccttcatcgatcagtcatcccttaagaaacacacacgctctcacactggagagaagccttatgagtgtaaccagtgtggaaagtccttcagcacaggctcttaccttattgtgcacaagagaactcacactggtgagaaaacctatgagtgtaaagaatgtgggaaggcctttaggaattcctcttgcctgagggtacacgtgagaactcacactggagagaagccttataaatgtattcagtgtgaaaaagcctttagcacaagcactaaccttataatgcacaagcgaatccacaatggccagaaactccatgaatgaaatgactcagggaagtgtttgttgcccctcatgcctcctttctcactttagaacatatattggagagaagccctgttatggtcacctggaaacagccttctggcccaactctggatgcctgttatactgggacaaaccttataaatgttatagctatgattgtttttatcagtgagtatttcattcttatatgtgtcacaactgtagatcctatgaatattttagttatcttttcagtttaattgcattgtgaacagaacacatggtcttcaatatgtagattctgtgtgacatagatttgaacataattgctggacactgactgatgtactgtggcagacagaactagttgctgtctcaatatccattcctcccttctttcttaaagtaataaaatttaccatttagttcaagctggcaatgtggacagttttcacccagcttcccttacagctgtgagcggccaaatatgttcacatccctagcccatgcaaagtaggcagaagtcactggatacagctgctaaggaagctcatggaaatgggaatatctcatctggtgtttttttcttaactatttgccctttgtcttgtcccttatttcctagaaaatatatacaccaagaggaggacagagaaaggatactaaatgaaacaacaggggagatacaatattatctggttgcactaatcctgtgctgcttatctctggatttcatgttacatgagaaaaattaactgccatgtggtttaaaccactcttgtgggaagttcctctttcagctgatttcagtcccaactgttacatctaataaatggtcaagttttaggaatcgttc

SEQ ID NO: 34916 - DNA, 2383 bp, Homo sapiens
  source 1..2383: mol_type = unassigned DNA
gaccttcgcttggtgtcctcctggcctcagcaacctgacaattctgtcgtgtcccgggctgggtataagtaagcaagaagagggcctgggagaagagtctgacgagcaaggggaaggtagccaaggatggagtgaaatacagggtgacctgtgtttttcccctggctgctttggaaattatgggaaaaaatcaaataccaaggaagaaaaatctataatgaaattagatgtggatttctttttatgtattcagcttgggggcttatgatacttctagtacccaaagagatgcggtcttgctgtgttgcctaggctggtctcaaactcctgctctcaagtgatcctcctgcctcagcctcctgagtacatttatatttaaagtaattattgatggctctgcctgcttaggactctgcccagccaggaaggaaacctacaggaggaagaatggctgcagggtggctgacaacctggtcacagaactcagtaaccttccaggaagtggcagtggacttttcccaggaggagtgggcattgctggaccctgctcaaaaaaatctatacaaagatgtgatgctggagaactttaggaacctggcctcagtagggtatcagctctgcagacacagtctgatctccaaggtggatcaagaacagctgaagacagatgaaagaggaattttacaaggtgactgtgcagactgggaaactcaacttaaaccaaaagatacaattgctatgcagaacattcctgggggaaaaacatccaatggcataaacacgaatcctcatggaagagaattcctgtgaataaggtgaaagtgaaaaagcctctagtcaccacttactcccttttcaacaggcagaaaatcaacctggtgagcactccctggagtgtaaccattgtgggaaattcagaaagaacactcgctttatttgtacaagatattgcaagggagagaaatgctataaatatataaagtatagcaaagtcttcaaccatccctcaactcttaggagtcatgtgagcattcacattggagagaaaactcttgaatttactgattgtagaaaagctttcaatcaagagtcatccctcaggaaacacttaagaactcccacaggacagaagtttcaggagtatgagcaatgtgatatgtccttcagcctacactcttcctgctcagtacgtgagcaaatacctactggagagaaaggtgatgaatgcagtgactatggcaaaatatctccccttagtgtccacacaaaaactggtagtgtggaggagggtttggaatgtaatgaacatgagaaaactttcactgaccctttgtcccttcagaactgtgtcagaactcactctggagagatgccctatgaatgcagtgactgtgggaaagccttcatttttcagtcttcccttaagaaacacatgagatctcatactggagagaagccttatgagtgtgatcactgtggaaaatcctttagccagagctctcatctgaatgtgcacaaaagaactcacactggagagaaaccctatgactgtaaggaatgtgggaaggctttcactgttccttcatcccttcagaaacatgtgagaacccacactggagagaaaccctatgaatgcagtgactgtggaaaagccttcatcgatcagtcatcccttaagaaacacacacgctctcacactggagagaagccttatgagtgtaaccagtgtggaaagtccttcagcacaggctcttaccttattgtgcacaagagaactcacactggtgagaaaacctatgagtgtaaagaatgtgggaaggcctttaggaattcctcttgcctgagggtacacgtgagaactcacactggagagaagccttataaatgtattcagtgtgaaaaagcctttagcacaagcactaaccttataatgcacaagcgaatccacaatggccagaaactccatgaatgaaatgactcagggaagtgtttgttgcccctcatgcctcctttctcactttagaacatatattggagagaagccctgttatggtcacctggaaacagccttctggcccaactctggatgcctgttatactgggacaaaccttataaatgttatagctatgattgtttttatcagtgagtatttcattcttatatgtgtcacaactgtagatcctatgaatattttagttatcttttcagtttaattgcattgtgaacagaacacatggtcttcaatatgtagattctgtgtgacatagatttgaacataattgctggacactgactgatgtactgtggcagacagaactagttgctgtctcaatatccattcctcccttctttcttaaagtaataaaatttaccatttagttc

SEQ ID NO: 34917 - DNA, 2429 bp, Homo sapiens
  source 1..2429: mol_type = unassigned DNA
atttcgagcatcttgtgggctctcccaagtcgcggcccctcctctgagagccacagtcaggaacagcatctctgccttcctgttcacggtgaccttcgcttggtgtcctcctggcctcagcaacctgacaattctgtcgtgtcccgatcatctttctcaagatgttttctgtcttcatgagtcaaaatttgaagaggaaaggatggtggctgggtggttgacaaattactctcagttgctttgattagaaagtttggctttgctgagatacgtagttggaaaagagagaagcattttcagtttcttcagtgtactagatggctgactgggaagattccagggtcccaacaggcttcagagttgcgaaggctctagagggctgggtataagtaagcaagaagagggcctgggagaagagtctgacgagcaaggggaaggtagccaaggatggagtgaaatacaggagatgcggtcttgctgtgttgcctaggctggtctcaaactcctgctctcaagtgatcctcctgcctcagcctcctgagtacatttatatttaaagtaattattgatggctctgcctgcttaggactctgcccagccaggaaggaaacctacaggaggaagaatggctgcagggtggctgacaacctggtcacagaactcagtaaccttccaggaagtggcagtggacttttcccaggaggagtgggcattgctggaccctgctcaaaaaaatctatacaaagatgtgatgctggagaactttaggaacctggcctcagtagggtatcagctctgcagacacagtctgatctccaaggtggatcaagaacagctgaagacagatgaaagaggaattttacaaggtgactgtgcagactgggaaactcaacttaaaccaaaagatacaattgctatgcagaacattcctgggggaaaaacatccaatggcataaacacgaactgtgtcagaactcactctggagagatgccctatgaatgcagtgactgtgggaaagccttcatttttcagtcttcccttaagaaacacatgagatctcatactggagagaagccttatgagtgtgatcactgtggaaaatcctttagccagagctctcatctgaatgtgcacaaaagaactcacactggagagaaaccctatgactgtaaggaatgtgggaaggctttcactgttccttcatcccttcagaaacatgtgagaacccacactggagagaaaccctatgaatgcagtgactgtggaaaagccttcatcgatcagtcatcccttaagaaacacacacgctctcacactggagagaagccttatgagtgtaaccagtgtggaaagtccttcagcacaggctcttaccttattgtgcacaagagaactcacactggtgagaaaacctatgagtgtaaagaatgtgggaaggcctttaggaattcctcttgcctgagggtacacgtgagaactcacactggagagaagccttataaatgtattcagtgtgaaaaagcctttagcacaagcactaaccttataatgcacaagcgaatccacaatggccagaaactccatgaatgaaatgactcagggaagtgtttgttgcccctcatgcctcctttctcactttagaacatatattggagagaagccctgttatggtcacctggaaacagccttctggcccaactctggatgcctgttatactgggacaaaccttataaatgttatagctatgattgtttttatcagtgagtatttcattcttatatgtgtcacaactgtagatcctatgaatattttagttatcttttcagtttaattgcattgtgaacagaacacatggtcttcaatatgtagattctgtgtgacatagatttgaacataattgctggacactgactgatgtactgtggcagacagaactagttgctgtctcaatatccattcctcccttctttcttaaagtaataaaatttaccatttagttcaagctggcaatgtggacagttttcacccagcttcccttacagctgtgagcggccaaatatgttcacatccctagcccatgcaaagtaggcagaagtcactggatacagctgctaaggaagctcatggaaatgggaatatctcatctggtgtttttttcttaactatttgccctttgtcttgtcccttatttcctagaaaatatatacaccaagaggaggacagagaaaggatactaaatgaaacaacaggggagatacaatattatctggttgcactaatcctgtgctgcttatctctggatttcatgttacatgagaaaaattaactgccatgtggtttaaaccactcttgtgggaagttcctctttcagctgatttcagtcccaactgttacatctaataaatggtcaagttttaggaatcgttc

SEQ ID NO: 34918 - DNA, 2767 bp, Homo sapiens
  source 1..2767: mol_type = unassigned DNA
atctgcgtccgcacctgactcagctgggcaccccggagctacggaggggccagcgggctcccttgcccatgcgtctgggagcgcgcgggggacgtggcgaggctgaaaatgagtctctggaagaggaaacccgatgggatgatgcctggagtctctccctctctcatcagagtgcagtcggcatttggggggcgcatggtggagaatacatatccaatgagcagcgctgccctggcctcgagcactaaatgccagttcccctagctgcttgtgacaaccagaaaacgccccaacaaatcaccagacgttggcagttctccccaaagcaaaggctttagagcttcctgggttaatctggctgccacttgtgagcctcggaggttcctgatctgtacaccaggatggagtctccctctgtcgcccaggctggagtgcagtggtacgatcttgactcactgcaacttccgcctcccaggttcaggctgttctcctacctcagcctcctgagttgctgggattacagtgtcctggtgaagacctagttcttgccggagacaattccactgcagaagcactttacttaaaaggacttgccaggctggacaatgcccgttgacttggggcaggccctaggcctgctgccatcgctggcgaaggccgaggactcccagttctcagaatcagatgctgcccttcaagaggaactctccagccctgagaccgcacgccagcttttcaggcagttccgttaccaggtgatgtctgggcctcatgagaccttgaagcaacttcggaagctctgtttccagtggctacagccagaggttcacaccaaagagcagatcctagagatcctcatgttggagcagtttctgaccatcctgcctggggagatccagatgtgggtgcggaaacagtgtccaggaagtggagaagaggcagtgacccttgtggaaagcttgaagggggacccccagagactgtggcaatggatcagtatccaggttctaggacaggacatcttatcagagaagatggaatctccaagctgccaagtgggggaagtggagccccatcttgaagtggtgcctcaggagttgggacttgagaattcatcctcagggcctggggagcttctgagccacatcgtgaaagaggaatctgacacagaagcagaactagccctggctgcctcccagcctgcccgactggaggaaaggctgatcagagaccaggacctcggagcctcactgctcccagcagcacctcaggaacagtggagacaactggattccactcaaaaggagcaatactgggatctcatgctggagacctatgggaaaatggtctcaggagcaggcatttcccatcccaaatctgacctgactaattcaatagaatttggggaagagctggcaggaatataccttcatgtcaatgagaagatcccaagacccacctgcataggagatagacaagagaatgacaaggagaacctaaatttggagaatcacagggaccaggagctcctgcatgcttcctgtcaagcttcaggagaggttccttctcaggcttccttgaggggcttcttcactgaggatgagccaggatgctttggagaaggagagaatctccctgaggctctgcaaaacattcaggatgagggaacaggggaacagctgtctcctcaagaaaggatttctgagaaacaactaggtcagcatttgcctaatcctcattcaggagaaatgtccaccatgtggcttgaggagaagagagagacctcccagaaggggcagccaagagcccccatggcccagaagctccccacctgcagggagtgtgggaagaccttttataggaattctcagcttatttttcaccaaagaactcacaccggagagacatactttcagtgcaccatctgcaaaaaagcctttctgcggagttcagactttgtgaagcatcagagaactcacacgggagagaagccctgtaaatgtgattactgtgggaaaggctttagtgacttctcaggattgcgccaccacgagaaaatccacacaggagagaaaccctataaatgtcctatctgtgagaaaagtttcattcagagatcaaactttaatagacatcagagggttcacactggagagaaaccttataaatgttcgcactgtgggaaaagtttcagctggagctcgagccttgacaaacatcaaagatcccacttaggaaagaagccctttcaatagccagtaaccaaactctctttccccatttctatctcccagcccagtcacaaaaatactcagctccatcaagaggaattgtgtctaagaggatacccctgttaatctccttttttcttggattggagaggagagaatctggacatggctttggacttggaggatatcttggattggattgcacaatggcttaaattcttgattctgcctcaggagaaagaatagtcttcatgtttccactcatccttcctttggacccatcggggaaaaagtctaaattggagatccagttttagaagtgctttctgggaagcatttaatgggattagctgtagtcactgcttatgggaagaacctcagatcagccccttaaaatgagttctagagcaggtcttctgttccagaaggggagaagcatagagggcctgtgagctcacgtgtgttctttgtcataggggtgaaaaactaacttcaagtgtcccttgtttgaaataaacttagcagagtcactttct

SEQ ID NO: 34919 - DNA, 2282 bp, Homo sapiens
  source 1..2282: mol_type = unassigned DNA
tcccggaagtgcgcccggagccggcgccgcgggccgagtgtcctggtgaagacctagttcttgccggagacaattccactgcagaagcactttacttaaaaggacttgccaggctggacaatgcccgttgacttggggcaggccctaggcctgctgccatcgctggcgaaggccgaggactcccagttctcagaatcagatgctgcccttcaagaggaactctccagccctgagaccgcacgccagcttttcaggcagttccgttaccaggtgatgtctgggcctcatgagaccttgaagcaacttcggaagctctgtttccagtggctacagccagaggttcacaccaaagagcagatcctagagatcctcatgttggagcagtttctgaccatcctgcctggggagatccagatgtgggtgcggaaacagtgtccaggaagtggagaagaggcagtgacccttgtggaaagcttgaagggggacccccagagactgtggcaatggatcagtatccaggttctaggacaggacatcttatcagagaagatggaatctccaagctgccaagtgggggaagtggagccccatcttgaagtggtgcctcaggagttgggacttgagaattcatcctcagggcctggggagcttctgagccacatcgtgaaagaggaatctgacacagaagcagaactagccctggctgcctcccagcctgcccgactggaggaaaggctgatcagagaccaggacctcggagcctcactgctcccagcagcacctcaggaacagtggagacaactggattccactcaaaaggagcaatactgggatctcatgctggagacctatgggaaaatggtctcaggagcaggcatttcccatcccaaatctgacctgactaattcaatagaatttggggaagagctggcaggaatataccttcatgtcaatgagaagatcccaagacccacctgcataggagatagacaagagaatgacaaggagaacctaaatttggagaatcacagggaccaggagctcctgcatgcttcctgtcaagcttcaggagaggttccttctcaggcttccttgaggggcttcttcactgaggatgagccaggatgctttggagaaggagagaatctccctgaggctctgcaaaacattcaggatgagggaacaggggaacagctgtctcctcaagaaaggatttctgagaaacaactaggtcagcatttgcctaatcctcattcaggagaaatgtccaccatgtggcttgaggagaagagagagacctcccagaaggggcagccaagagcccccatggcccagaagctccccacctgcagggagtgtgggaagaccttttataggaattctcagcttatttttcaccaaagaactcacaccggagagacatactttcagtgcaccatctgcaaaaaagcctttctgcggagttcagactttgtgaagcatcagagaactcacacgggagagaagccctgtaaatgtgattactgtgggaaaggctttagtgacttctcaggattgcgccaccacgagaaaatccacacaggagagaaaccctataaatgtcctatctgtgagaaaagtttcattcagagatcaaactttaatagacatcagagggttcacactggagagaaaccttataaatgttcgcactgtgggaaaagtttcagctggagctcgagccttgacaaacatcaaagatcccacttaggaaagaagccctttcaatagccagtaaccaaactctctttccccatttctatctcccagcccagtcacaaaaatactcagctccatcaagaggaattgtgtctaagaggatacccctgttaatctccttttttcttggattggagaggagagaatctggacatggctttggacttggaggatatcttggattggattgcacaatggcttaaattcttgattctgcctcaggagaaagaatagtcttcatgtttccactcatccttcctttggacccatcggggaaaaagtctaaattggagatccagttttagaagtgctttctgggaagcatttaatgggattagctgtagtcactgcttatgggaagaacctcagatcagccccttaaaatgagttctagagcaggtcttctgttccagaaggggagaagcatagagggcctgtgagctcacgtgtgttctttgtcataggggtgaaaaactaacttcaagtgtcccttgtttgaaataaacttagcagagtcactttct

SEQ ID NO: 34920 - DNA, 3119 bp, Homo sapiens
  source 1..3119: mol_type = unassigned DNA
acaagagcagccattgtcccgcgcgcggacgcttgctgtcgccgagcagctcggcccttcagacttaacccccagcggccttgcggatgctgactaggagaggggaccgaactagcttaacccgagtcggccgtgttgcagaatcggggcagggggttgcctaacccgagttcgtcctgccgcagagccgtgctaggcactgaggcggtgacaggcccagcctgggctgcgggccagcggacgcccaggttggtaggggcgtggggcagcgcttggtgtccgatgcgcgcatgcgcagggtctacgcgggaagctggaagcggtgctcaggacctcagcaccctgctgtgcctggaggagagcatggaagagcaggatgagaagcccccagagcccccgaaggcctgtgcacaggattctttccttcctcaagagattatcatcaaagtcgagggagaagacactgggtctctgaccatcccatctcaggaaggagtgaacttcaaaattgtgactgtggacttcacacgggaggaacagggtacttggaaccctgctcagaggaccctggacagagatgtgatcctggagaaccacagggacctagtctcttgggacttggcaactgcagttggaaaaaaagattcaacttcaaagcagaggatttttgatgaagaaccagctaatggagtgaagatagaaaggtttacaagggatgatccttggttatcttcatgtgaagaagtggatgattgtaaagaccagttggagaagcaacaggaaaaacaagagatacttttgcaggaagtggcattcactcaaaggaaagcagttattcatgagagagtctgcaaaagtgatgaaactggggagaagagtggtctgaattccagtctattttcatccccagttatacccataagaaaccattttcataaacatgtatcacatgctaaaaaatggcatcttaatgctgctgtaaacagtcatcagaagattaatgagaatgagacactatatgaaaataatgaatgtggaaaaccccctcagagcattcaccttattcagtttacaagaactcaaacaaaagataaatgctatggatttagtgaccgtattcaatctttttgccatggtacacccctacatatacatgaaaaaattcatggaggaggaaaaacctttgattttaaagaatgtgggcaggttttgaaccccaaaatatcccataatgaacaacagagaattccttttgaagagagtcaatataaatgtagtgaaacctctcatagttcctcccttactcaaaacatgagaaataattctgaagagaaaccttttgaatgtaatcagtgtgggaaatccttcagctggagctcgcatcttgttgcacatcagagaactcacacaggggagaaaccttatgaatgtagtgaatgtggaaaatccttcagccggagctcgcaccttgtttcccatcagagaactcatactggagagaaaccttacaggtgtaatcaatgtgggaaatcctttagccagagttatgtccttgttgtgcatcaaagaactcatactggggagaagccttatgaatgcaatcaatgtggaaagtcattcaggcagagctataaacttattgcacatcaaagaacacataccggagagaagccctatgaatgtaatcaatgtgggaaatcatttatccagagctataaacttattgcacatcaaagaattcatactggggaaaaaccctatgaatgcaatcagtgtgggaaatcctttagtcaaagttataaacttgttgctcatcagagaactcacacaggagaaaaaccctttgaatgtaatcagtgtgggaaatccttcagctggagctctcagcttgttgcacatcaaagaactcacactggagagaaaccgtatgaatgtagtgaatgtggaaaatcttttaaccgcagttctcaccttgttatgcatcagagaattcacactggggaaaaaccgtatgaatgtaatcagtgtgggaaatccttcagccagagttatgttcttgttgtacatcagagaactcatactggagaaaagccctatgaatgcagtcaatgtgggaagtccttcagacagagttcatgccttactcaacatcagagaactcatactggagagaaaccatttgaatgtaatcagtgtggaaaaacatttagcttgagtgctcgacttattgtgcatcaaagaactcatactggagagaaaccctttacatgtattcagtgtggaaaagctttcattaatagctataaacttattaggcatcaggcaactcatactgaagagaaactctatgaatgtaactagtttgtaaatcagctgggatttcttcctttttatttcattcttttaaaaaatttattttaaggtagtacatgtagttggaagaactactataaaaacaatatatgtgggaaaacttccagccctctgttaattgtgtgtctcaaatttgttctggaaaagaaagggggaaagtctatgaacgacttttcaacctggcaattccatatacaatgttaaacttgattcttatgacatattcctatgaaaataataaatactggcacttttccttgcagaaagcactcagacctgaatcagagaaaatcatatgccaaagccaactgccagtgttagacctctttttccataaagagtaaatggaatgctaacactagtgggcttattgagaaaatttaaaggttgctgtagtgtttagaacttaggctggaaaaccatattttagtgcatcattttactacatgatcttccaattagatagcttgtaatctgttccttacagcacttgctgttgttacatgtgaagattttataaattttaggaaagtgtctatgatatatagtgaaaagtgtgggaaaagaatatagaaataatattcacttctaaaaccattatgataaaatatttgtgtatggattagaatagaaagggattatggatgtatctattcaatttctcagtttatgttgggccttcctttttggaatgtacgctgttatgctatgataaatgatataatgagtaaaaattattcaaagcc

SEQ ID NO: 34921 - DNA, 3042 bp, Homo sapiens
  source 1..3042: mol_type = unassigned DNA
aagagcagccattgtcccgcgcgcggacgcttgctgtcgccgagcagctcggcccttcagacttaacccccagcggccttgcggatgctgactaggagaggggaccgaactagcttaacccgagtcggccgtgttgcagaatcggggcagggggttgcctaacccgagttcgtcctgccgcagagccgtgctaggcactgaggcggtgacaggcccagcctgggctgcgggccagcggacgcccaggttggtaggggcgtggggcagcgcttggtgtccgatgcgcgcatgcgcagggtctacgcgggaagctggaagcggtgctcaggacctcagcaccctgctgtgcctggaggagagcatggaagagcaggatgagaagcccccagagcccccgaaggcctgtgcacaggaaggagtgaacttcaaaattgtgactgtggacttcacacgggaggaacagggtacttggaaccctgctcagaggaccctggacagagatgtgatcctggagaaccacagggacctagtctcttgggacttggcaactgcagttggaaaaaaagattcaacttcaaagcagaggatttttgatgaagaaccagctaatggagtgaagatagaaaggtttacaagggatgatccttggttatcttcatgtgaagaagtggatgattgtaaagaccagttggagaagcaacaggaaaaacaagagatacttttgcaggaagtggcattcactcaaaggaaagcagttattcatgagagagtctgcaaaagtgatgaaactggggagaagagtggtctgaattccagtctattttcatccccagttatacccataagaaaccattttcataaacatgtatcacatgctaaaaaatggcatcttaatgctgctgtaaacagtcatcagaagattaatgagaatgagacactatatgaaaataatgaatgtggaaaaccccctcagagcattcaccttattcagtttacaagaactcaaacaaaagataaatgctatggatttagtgaccgtattcaatctttttgccatggtacacccctacatatacatgaaaaaattcatggaggaggaaaaacctttgattttaaagaatgtgggcaggttttgaaccccaaaatatcccataatgaacaacagagaattccttttgaagagagtcaatataaatgtagtgaaacctctcatagttcctcccttactcaaaacatgagaaataattctgaagagaaaccttttgaatgtaatcagtgtgggaaatccttcagctggagctcgcatcttgttgcacatcagagaactcacacaggggagaaaccttatgaatgtagtgaatgtggaaaatccttcagccggagctcgcaccttgtttcccatcagagaactcatactggagagaaaccttacaggtgtaatcaatgtgggaaatcctttagccagagttatgtccttgttgtgcatcaaagaactcatactggggagaagccttatgaatgcaatcaatgtggaaagtcattcaggcagagctataaacttattgcacatcaaagaacacataccggagagaagccctatgaatgtaatcaatgtgggaaatcatttatccagagctataaacttattgcacatcaaagaattcatactggggaaaaaccctatgaatgcaatcagtgtgggaaatcctttagtcaaagttataaacttgttgctcatcagagaactcacacaggagaaaaaccctttgaatgtaatcagtgtgggaaatccttcagctggagctctcagcttgttgcacatcaaagaactcacactggagagaaaccgtatgaatgtagtgaatgtggaaaatcttttaaccgcagttctcaccttgttatgcatcagagaattcacactggggaaaaaccgtatgaatgtaatcagtgtgggaaatccttcagccagagttatgttcttgttgtacatcagagaactcatactggagaaaagccctatgaatgcagtcaatgtgggaagtccttcagacagagttcatgccttactcaacatcagagaactcatactggagagaaaccatttgaatgtaatcagtgtggaaaaacatttagcttgagtgctcgacttattgtgcatcaaagaactcatactggagagaaaccctttacatgtattcagtgtggaaaagctttcattaatagctataaacttattaggcatcaggcaactcatactgaagagaaactctatgaatgtaactagtttgtaaatcagctgggatttcttcctttttatttcattcttttaaaaaatttattttaaggtagtacatgtagttggaagaactactataaaaacaatatatgtgggaaaacttccagccctctgttaattgtgtgtctcaaatttgttctggaaaagaaagggggaaagtctatgaacgacttttcaacctggcaattccatatacaatgttaaacttgattcttatgacatattcctatgaaaataataaatactggcacttttccttgcagaaagcactcagacctgaatcagagaaaatcatatgccaaagccaactgccagtgttagacctctttttccataaagagtaaatggaatgctaacactagtgggcttattgagaaaatttaaaggttgctgtagtgtttagaacttaggctggaaaaccatattttagtgcatcattttactacatgatcttccaattagatagcttgtaatctgttccttacagcacttgctgttgttacatgtgaagattttataaattttaggaaagtgtctatgatatatagtgaaaagtgtgggaaaagaatatagaaataatattcacttctaaaaccattatgataaaatatttgtgtatggattagaatagaaagggattatggatgtatctattcaatttctcagtttatgttgggccttcctttttggaatgtacgctgttatgctatgataaatgatataatgagtaaaaattattcaaagcc

SEQ ID NO: 34922 - DNA, 2791 bp, Homo sapiens
  source 1..2791: mol_type = unassigned DNA
cggttcgttgcgcctggaattttgtcccctgcgcggatgattctgggaaatgtcgatcggctgtgggcggcgcactgggtccgccccgctgtagcctcaggacactgcccatctctaagataagagcctggaaagaggactctgttggctgttggaaattgcagagtaatgcctcagcttcagtacccagagggttacctggcaccaaatagatgcttagtaagtaattgtggagtgaataagatgagtaatgacgaactggtggggcagaatcatggcatggaaggtgaagcttgcataggaggggatgtgacatttaatgatgtggctatagacttcactcatgaagagtggggatggctcagttctgctcagagggacttatacaaggatgtgatggtccagaattatgagaacctggtctctgtagcaggtctttctgtaactaagccatatgtgatcacgttattggaggatggaaaagagccctggatgatggagaaaaaactgtcaaaaggtatgattccagattgggaatcaagatgggaaaacaaggaattatcaacaaagaaggataattatgatgaagattcaccccaaacagtaataatagaaaaagttgtaaaacaaagttatgaattttcaaattctaagaagaatttggaatatatagagaagttggaagggaagcatggaagtcaggtagaccatttcagaccagcaattctcacctctagagaaagccccactgcagacagtgtttacaaatacaatatatttagaagcacctttcattcaaagtctactctttctgaaccacaaaaaatttctgctgaagggaattcacacaaatatgatatattaaagaagaacttaccaaaaaagtcagttataaaaaatgagaaagtcaatggtggaaagaaacttttgaattctaataaaagtggggcagccttcagccagggcaaatctcttacccttccccagacttgtaatagagagaaaatctatacatgcagtgaatgtgggaaagcctttggcaaacagtcaatcctcaatcgccactggagaattcatacaggagagaagccctatgaatgtcgtgaatgtgggaagacttttagccatggctcatcccttacacgacatctgataagccatagtggagagaaaccttacaaatgtattgaatgtgggaaggcctttagccatgtctcatcacttactaaccatcagagcactcacactggagagaaaccatatgaatgtatgaactgtggaaagtcttttagtcgtgtgtcccatcttattgaacatctaagaattcatactcaagaaaaactctatgagtgtcgtatatgtggaaaggccttcattcataggtcatctctcattcaccatcagaaaatccatactggagagaagccttatgaatgtagagaatgtgggaaagctttctgctgtagctcacaccttactcgacatcaaagaattcacactatggagaaacaatatgaatgcaacaaatgtctgaaagtctttagtagcctctcatttcttgttcagcatcagagtattcatactgaagaaaaaccctttgaatgtcagaaatgcaggaaatccttcaaccagcttgaatcactgaatatgcatttgagaaatcacattagattgaaaccctacgaatgcagtatatgtgggaaagcctttagtcataggtcatccctgcttcaacatcacagaattcatactggagagaaaccttatgaatgtattaaatgtgggaagaccttcagctgtagttcaaaccttaccgtacatcagagaattcacactggagaaaagccatataaatgtaatgagtgtgggaaagcttttagcaaaggctcaaatcttactgcccatcaaagagtacataatggagagaaacccaatagtgtggtaagtgtggaaaagcctttagactatatgaatcactatacatgtgagaaatcttacagaagagaaactgtatgaagcagtggttatcatggtaaatttcctagattctcccttatttaacattagaaaaatttatactggggaaagtcttatgaatgtggtgaatataggaagaccttttagcaaagatgcaggccagtttgtttattagactttatactgtagagaaatcatatgaagaccataaatgtgggaaagcctttgtcagtattaatcccttaattgacataagtatactcacactaggataaaaccctgtacatgtagcaaatgtgggaaagactacagacaataggaatcttttacaaactcctacaggagagaagctgtatgaatgtagaaaatttagaaattgagggaagtcttcagttccaagtatatcccttattctacagcagagaactcaaaatggagagaaatctcatttaagagatgtagcaaagtgttcactaagagtgtttatcttggtacacatcagaagattaatggtagaacaacctgaaggatttaggagttatgtgtaaatctttgcagtcatgctatttgtaaactggattctacaggagagcaaataaacattataataaaatatgcatttcttagagcagtagcttgcagtttcagttgagttctacttagaaattctttttagctagtgggcatgtgaagatatttagtcacccagaggagccagtaagtgttataatattgaaaattaaagctgcaaaagaaataaagtgatgttaataaaagttttggcatctaataaaatcattttgtatatcacaaa

SEQ ID NO: 34923 - DNA, 1776 bp, Homo sapiens
  source 1..1776: mol_type = unassigned DNA
gtagcctcaggcctgacggcgactcccaggctccgggacgattctgggcagtgtcgtccccagaggacactgcccatctctaagataagagcctggaaagaggactctgttggctgttggaaattgcagagtaatgcctcaggtgacatttaatgatgtggctatagacttcactcatgaagagtggggatggctcagttctgctcagagggacttatacaaggatgtgatggtccagaattatgagaacctggtctctgtaggtctttctgtaactaagccatatgtgatcacgttattggaggatggaaaagagccctggatgatggagaaaaaactgtcaaaaggtatgattccagattgggaatcaagatgggaaaacaaggaattatcaacaaagaaggataattatgatgaagattcaccccaaacagtaataatagaaaaagttgtaaaacaaagttatgaattttcaaattctaagaagaatttggaatatatagagaagttggaagggaagcatggaagtcaggtagaccatttcagaccagcaattctcacctctagagaaagccccactgcagacagtgtttacaaatacaatatatttagaagcacctttcattcaaagtctactctttctgaaccacaaaaaatttctgctgaagggaattcacacaaatatgatatattaaagaagaacttaccaaaaaagtcagttataaaaaatgagaaagtcaatggtggaaagaaacttttgaattctaataaaagtggggcagccttcagccagggcaaatctcttacccttccccagacttgtaatagagagaaaatctatacatgcagtgaatgtgggaaagcctttggcaaacagtcaatcctcaatcgccactggagaattcatacaggagagaagccctatgaatgtcgtgaatgtgggaagacttttagccatggctcatcccttacacgacatctgataagccatagtggagagaaaccttacaaatgtattgaatgtgggaaggcctttagccatgtctcatcacttactaaccatcagagcactcacactggagagaaaccatatgaatgtatgaactgtggaaagtcttttagtcgtgtgtcccatcttattgaacatctaagaattcatactcaagaaaaactctatgagtgtcgtatatgtggaaaggccttcattcataggtcatctctcattcaccatcagaaaatccatactggagagaagccttatgaatgtagagaatgtgggaaagctttctgctgtagctcacaccttactcgacatcaaagaattcacactatggagaaacaatatgaatgcaacaaatgtctgaaagtctttagtagcctctcatttcttgttcagcatcagagtattcatactgaagaaaaaccctttgaatgtcagaaatgcaggaaatccttcaaccagcttgaatcactgaatatgcatttgagaaatcacattgaaaccctacgaatgcagtatatgtgggaaagcctttagtcataggtcatccctgcttcaacatcacagaattcatactggagagaaaccttatgaatgtattaaatgtgggaagaccttcagctgtagttcaaaccttaccgtacatcagagaattcacactggagaaaagccatataaatgtaatgagtgtgggaaagcttttagcaaaggctcaaatcttactgcccatcaaagagtacataatggagagaaacccaatagtgtggtaagtgtgg

SEQ ID NO: 34924 - DNA, 1891 bp, Homo sapiens
  source 1..1891: mol_type = unassigned DNA
cctgcccttctgtgccctcaggacactgcccatctctaagataagagcctggaaagaggactctgttggctgttggaaattgcagagtaatgcctcaggtgacatttaatgatgtggctatagacttcactcatgaagagtggggatggctcagttctgctcagagggacttatacaaggatgtgatggtccagaattatgagaacctggtctctgtaggtctttctgtaactaagccatatgtgatcacgttattggaggatggaaaagagccctggatgatggagaaaaaactgtcaaaaggtatgattccagattgggaatcaagatgggaaaacaaggaattatcaacaaagaaggataattatgatgaagattcaccccaaacagtaataatagaaaaagttgtaaaacaaagttatgaattttcaaattctaagaagaatttggaatatatagagaagttggaagggaagcatggaagtcaggtagaccatttcagaccagcaattctcacctctagagaaagccccactgcagacagtgtttacaaatacaatatatttagaagcacctttcattcaaagtctactctttctgaaccacaaaaaatttctgctgaagggaattcacacaaatatgatatattaaagaagaacttaccaaaaaagtcagttataaaaaatgagaaagtcaatggtggaaagaaacttttgaattctaataaaagtggggcagccttcagccagggcaaatctcttacccttccccagacttgtaatagagagaaaatctatacatgcagtgaatgtgggaaagcctttggcaaacagtcaatcctcaatcgccactggagaattcatacaggagagaagccctatgaatgtcgtgaatgtgggaagacttttagccatggctcatcccttacacgacatctgataagccatagtggagagaaaccttacaaatgtattgaatgtgggaaggcctttagccatgtctcatcacttactaaccatcagagcactcacactggagagaaaccatatgaatgtatgaactgtggaaagtcttttagtcgtgtgtcccatcttattgaacatctaagaattcatactcaagaaaaactctatgagtgtcgtatatgtggaaaggccttcattcataggtcatctctcattcaccatcagaaaatccatactggagagaagccttatgaatgtagagaatgtgggaaagctttctgctgtagctcacaccttactcgacatcaaagaattcacactatggagaaacaatatgaatgcaacaaatgtctgaaagtctttagtagcctctcatttcttgttcagcatcagagtattcatactgaagaaaaaccctttgaatgtcagaaatgcaggaaatccttcaaccagcttgaatcactgaatatgcatttgagaaatcacattagattgaaaccctacgaatgcagtatatgtgggaaagcctttagtcataggtcatccctgcttcaacatcacagaattcatactggagagaaaccttatgaatgtattaaatgtgggaagaccttcagctgtagttcaaaccttaccgtacatcagagaattcacactggagaaaagccatataaatgtaatgagtgtgggaaagcttttagcaaaggctcaaatcttactgcccatcaaagagtacataatggagagaaacccaatagtgtggtaagtgtggaaaagcctttagactatatgaatcactatacatgtgagaaatcttacagaagagaaactgtatgaagcagtggttatcatggtaaatttcctagattctcccttatttaacattagaaaaatttatactggggaaagtcttatgaatgtggtga

SEQ ID NO: 34925 - DNA, 1894 bp, Homo sapiens
  source 1..1894: mol_type = unassigned DNA
cctgcccttctgtgccctcaggacactgcccatctctaagataagagcctggaaagaggactctgttggctgttggaaattgcagagtaatgcctcaggtgacatttaatgatgtggctatagacttcactcatgaagagtggggatggctcagttctgctcagagggacttatacaaggatgtgatggtccagaattatgagaacctggtctctgtagcaggtctttctgtaactaagccatatgtgatcacgttattggaggatggaaaagagccctggatgatggagaaaaaactgtcaaaaggtatgattccagattgggaatcaagatgggaaaacaaggaattatcaacaaagaaggataattatgatgaagattcaccccaaacagtaataatagaaaaagttgtaaaacaaagttatgaattttcaaattctaagaagaatttggaatatatagagaagttggaagggaagcatggaagtcaggtagaccatttcagaccagcaattctcacctctagagaaagccccactgcagacagtgtttacaaatacaatatatttagaagcacctttcattcaaagtctactctttctgaaccacaaaaaatttctgctgaagggaattcacacaaatatgatatattaaagaagaacttaccaaaaaagtcagttataaaaaatgagaaagtcaatggtggaaagaaacttttgaattctaataaaagtggggcagccttcagccagggcaaatctcttacccttccccagacttgtaatagagagaaaatctatacatgcagtgaatgtgggaaagcctttggcaaacagtcaatcctcaatcgccactggagaattcatacaggagagaagccctatgaatgtcgtgaatgtgggaagacttttagccatggctcatcccttacacgacatctgataagccatagtggagagaaaccttacaaatgtattgaatgtgggaaggcctttagccatgtctcatcacttactaaccatcagagcactcacactggagagaaaccatatgaatgtatgaactgtggaaagtcttttagtcgtgtgtcccatcttattgaacatctaagaattcatactcaagaaaaactctatgagtgtcgtatatgtggaaaggccttcattcataggtcatctctcattcaccatcagaaaatccatactggagagaagccttatgaatgtagagaatgtgggaaagctttctgctgtagctcacaccttactcgacatcaaagaattcacactatggagaaacaatatgaatgcaacaaatgtctgaaagtctttagtagcctctcatttcttgttcagcatcagagtattcatactgaagaaaaaccctttgaatgtcagaaatgcaggaaatccttcaaccagcttgaatcactgaatatgcatttgagaaatcacattagattgaaaccctacgaatgcagtatatgtgggaaagcctttagtcataggtcatccctgcttcaacatcacagaattcatactggagagaaaccttatgaatgtattaaatgtgggaagaccttcagctgtagttcaaaccttaccgtacatcagagaattcacactggagaaaagccatataaatgtaatgagtgtgggaaagcttttagcaaaggctcaaatcttactgcccatcaaagagtacataatggagagaaacccaatagtgtggtaagtgtggaaaagcctttagactatatgaatcactatacatgtgagaaatcttacagaagagaaactgtatgaagcagtggttatcatggtaaatttcctagattctcccttatttaacattagaaaaatttatactggggaaagtcttatgaatgtggtga

SEQ ID NO: 34926 - DNA, 3573 bp, Homo sapiens
  source 1..3573: mol_type = unassigned DNA
agtgcttgttggggccaggctttgtaacggtctcctgagcagcgagcagaaaatctgttatcgagagagacacagtgacctgcccctaaaggttcatgcgcatccctcagacccctctttagacgcgccccgcttctccctctgccctctccccttgcccaagccccgaggtgggggcctggtgtgaatgctccggccgaagtgaacctgcacccccgcacccgaaggcctctttccggcttctgggcaaggcggccccggtgagctcggccgtcacacatctctgctttttcccaagaagagcaggaaatggccaaaccccagtcctgcaagctgtacaagaagcatgacaccagcatctgcatctggtgaggactcaggaagcttctactcatggcagaaggcaaagagggaacaggggctagtgacatttgaagatgtagctgtggatttcacccaggaggagtggcagtacctgaacccaccacagaggaccctgtacagagacgtgatgctggagacctacagcaacttggtctttgtggggcagcaggttaccaaaccaaacctcatcctcaagttggaggtagaagaatgcccggcagaaggaaaaatcccattttggaactttccagaagtctgtcaagttgatgaacagattgagaggcaacatcaggatgaccaagataaatgtctgctgatgcaagttggattttctgacaagaaaacaattatcaccaagagtgctcgtgactgtcatgagtttggaaacatacttcatctgagtacaaaccttgttgcttcaatacaaagacccgataaacacgaatcatttggaaataatatggtagataatttagacttatttagtagaagttctgcagaaaataaatatgataatggatgtgcaaaattgttcttccatactgagtatgagaaaacaaatcctggaatgaagccctatggctataaagagtgtgggaaaggtcttaggcgaaagaaaggccttagtctacatcagagaattaaaaatggagagaaaccctttgaatgtactgcatgtaggaaaaccttcagcaagaagtcacacctcattgtacattggagaactcatacgggagagaaaccttttggatgtaccgaatgtggaaaagcttttagccaaaaatctcagctcattatacacttgcgaactcatacaggagagagaccctttgagtgtcctgaatgtggaaaagccttcagagaaaagtcaactgtcatcatacattacaggactcacacaggagaaaaaccttatgaatgtaatgaatgtggaaaagccttcactcagaagtccaacctcattgtccatcagaaaacccacactggagagaaaacctatgaatgcactaaatgtggagaatctttcatacagaagcttgatctaattatacatcatagtacccatacaggaaagaaaccccatgaatgtaatgagtgtaagaaaactttcagtgataagtcaactctcattatacaccagagaactcatacgggagagaaacctcataaatgtactgaatgtgggaagtctttcaatgagaagtcaaccctcattgtgcatcaaagaactcatacaggagagaaaccctatgaatgtgatgtgtgtggaaaaaccttcacgcaaaagtcaaaccttggtgtacatcagagaactcattcaggagagaaaccctttgaatgtaatgaatgtgagaaagccttctctcagaagtcctacctcatgctgcatcagagaggtcatacaggagagaaaccttacgagtgcaatgaatgtgaaaaagcattttcacagaaatcatatctcattatacatcaaagaactcatacagaagaaaaaccctataaatgtaatgaatgtggcaaagccttcagagaaaagtcaaagctcattatacatcagagaattcatacaggagagaaaccttatgaatgtcctgtgtgttggaaagcttttagccagaagtcacagctcataatacatcagagaacgcacacgggagagaaaccctatgcatgcactgagtgtggcaaagccttccgagaaaagtcaacattcactgtacatcaaagaactcatactggagagaaaccctataaatgtacagaatgtgggaaagcctttacccaaaaatcaaaccttattgtacatcagcgaacccatgcaggaaagaaagcccatggaagaggccacactcggaagtcaaagttcatggcacattagagagctaatcagcagtatctattatggacactgaaagaaagttgtgtcaattttactcacattttaaaagtatattttgacttgtggtttaaatatgggagtaaattcagcctttcttcttttcatctcagtcataacccaaaagctacgggagaaaaagcagaagtgtaatctctgtatctgacaaaattaggagacagctgcaaccctaatgagagggctgccacaggcagaggaaatgaagcactggtgcaggagatttcagagtgagagtgctcaaggctgcaggtgcaagacagcactggtaaggactcttagctgaggttcgggatataccccgaggcgcggaaccatagatataacagtggtaacagtgcgtgggcaggtaggaggtaggatgtttcctagaccatttggggtctgaggagaaacaggctggggcctcgagaaggagtcactcagacaagccatatttttagaaagtagtctactgatgggagcaacagttatggcatgctgggggaagagaagggacttttccttgtgaagagccctacagctgcccctatttactgacttgggagaagtaaagtcagaaagaacgaacagctgtggggggaaaaaattctcagttgtcaaaaaaaaaaaaaactgatctgcttagaatgtggccctggtttcttttcccacatgaacctccagcaaatagcaagtccaggaaaaactcttctcattcaaagaggaattattcaaaagtaatcaaaaccacaaatgcatttggtttttgggccagcaattccacttctaggaatgtacatactcacacatgtacaaaatgatgaacatacagtattcattaatgcagcgtttgtgaaaacaaaagattggaagctgtttaaatgacaccatatcagggttctggttccctaaattgtggtatattcatacagcctactcctgggtagacaacaatgaataaataaggagaacttggaaaccatttatgtagtgatgtgggataaccttcagtttatgttattaggtaggaaaaataaggttgaggacagtgactgccatttgtatataaaaaggagaaaaatggtaagtacataattgtgaattcataagttatctctggaaagagacatgagaacctggtaaccctgattaccttgggaggggaaggggcagtggtggctggggggatggaattgagagggagacaactgtatcctttcatagcttttgaaaatgtgggtgtactatgtactatgtggatgtactaccttttcaaaaataaaacattt

SEQ ID NO: 34927 - DNA, 3465 bp, Homo sapiens
  source 1..3465: mol_type = unassigned DNA
gtaacggtctcctgagcagcgagcagaaaatctgttatcgagagagacacagtgacctgcccctaaaggttcatgcgcatccctcagacccctctttagacgcgccccgcttctccctctgccctctccccttgcccaagccccgaggtgggggcctggtgtgaatgctccggccgaagtgaacctgcacccccgcacccgaaggcctctttccggcttctgggcaaggcggccccggtgagctcggccgtcacacatctctgctttttcccaagaagagcaggaaatggccaaaccccaggggctagtgacatttgaagatgtagctgtggatttcacccaggaggagtggcagtacctgaacccaccacagaggaccctgtacagagacgtgatgctggagacctacagcaacttggtctttgtggggcagcaggttaccaaaccaaacctcatcctcaagttggaggtagaagaatgcccggcagaaggaaaaatcccattttggaactttccagaagtctgtcaagttgatgaacagattgagaggcaacatcaggatgaccaagataaatgtctgctgatgcaagttggattttctgacaagaaaacaattatcaccaagagtgctcgtgactgtcatgagtttggaaacatacttcatctgagtacaaaccttgttgcttcaatacaaagacccgataaacacgaatcatttggaaataatatggtagataatttagacttatttagtagaagttctgcagaaaataaatatgataatggatgtgcaaaattgttcttccatactgagtatgagaaaacaaatcctggaatgaagccctatggctataaagagtgtgggaaaggtcttaggcgaaagaaaggccttagtctacatcagagaattaaaaatggagagaaaccctttgaatgtactgcatgtaggaaaaccttcagcaagaagtcacacctcattgtacattggagaactcatacgggagagaaaccttttggatgtaccgaatgtggaaaagcttttagccaaaaatctcagctcattatacacttgcgaactcatacaggagagagaccctttgagtgtcctgaatgtggaaaagccttcagagaaaagtcaactgtcatcatacattacaggactcacacaggagaaaaaccttatgaatgtaatgaatgtggaaaagccttcactcagaagtccaacctcattgtccatcagaaaacccacactggagagaaaacctatgaatgcactaaatgtggagaatctttcatacagaagcttgatctaattatacatcatagtacccatacaggaaagaaaccccatgaatgtaatgagtgtaagaaaactttcagtgataagtcaactctcattatacaccagagaactcatacgggagagaaacctcataaatgtactgaatgtgggaagtctttcaatgagaagtcaaccctcattgtgcatcaaagaactcatacaggagagaaaccctatgaatgtgatgtgtgtggaaaaaccttcacgcaaaagtcaaaccttggtgtacatcagagaactcattcaggagagaaaccctttgaatgtaatgaatgtgagaaagccttctctcagaagtcctacctcatgctgcatcagagaggtcatacaggagagaaaccttacgagtgcaatgaatgtgaaaaagcattttcacagaaatcatatctcattatacatcaaagaactcatacagaagaaaaaccctataaatgtaatgaatgtggcaaagccttcagagaaaagtcaaagctcattatacatcagagaattcatacaggagagaaaccttatgaatgtcctgtgtgttggaaagcttttagccagaagtcacagctcataatacatcagagaacgcacacgggagagaaaccctatgcatgcactgagtgtggcaaagccttccgagaaaagtcaacattcactgtacatcaaagaactcatactggagagaaaccctataaatgtacagaatgtgggaaagcctttacccaaaaatcaaaccttattgtacatcagcgaacccatgcaggaaagaaagcccatggaagaggccacactcggaagtcaaagttcatggcacattagagagctaatcagcagtatctattatggacactgaaagaaagttgtgtcaattttactcacattttaaaagtatattttgacttgtggtttaaatatgggagtaaattcagcctttcttcttttcatctcagtcataacccaaaagctacgggagaaaaagcagaagtgtaatctctgtatctgacaaaattaggagacagctgcaaccctaatgagagggctgccacaggcagaggaaatgaagcactggtgcaggagatttcagagtgagagtgctcaaggctgcaggtgcaagacagcactggtaaggactcttagctgaggttcgggatataccccgaggcgcggaaccatagatataacagtggtaacagtgcgtgggcaggtaggaggtaggatgtttcctagaccatttggggtctgaggagaaacaggctggggcctcgagaaggagtcactcagacaagccatatttttagaaagtagtctactgatgggagcaacagttatggcatgctgggggaagagaagggacttttccttgtgaagagccctacagctgcccctatttactgacttgggagaagtaaagtcagaaagaacgaacagctgtggggggaaaaaattctcagttgtcaaaaaaaaaaaaaactgatctgcttagaatgtggccctggtttcttttcccacatgaacctccagcaaatagcaagtccaggaaaaactcttctcattcaaagaggaattattcaaaagtaatcaaaaccacaaatgcatttggtttttgggccagcaattccacttctaggaatgtacatactcacacatgtacaaaatgatgaacatacagtattcattaatgcagcgtttgtgaaaacaaaagattggaagctgtttaaatgacaccatatcagggttctggttccctaaattgtggtatattcatacagcctactcctgggtagacaacaatgaataaataaggagaacttggaaaccatttatgtagtgatgtgggataaccttcagtttatgttattaggtaggaaaaataaggttgaggacagtgactgccatttgtatataaaaaggagaaaaatggtaagtacataattgtgaattcataagttatctctggaaagagacatgagaacctggtaaccctgattaccttgggaggggaaggggcagtggtggctggggggatggaattgagagggagacaactgtatcctttcatagcttttgaaaatgtgggtgtactatgtactatgtggatgtactaccttttcaaaaataaaacatttaaaaagcta

SEQ ID NO: 34928 - DNA, 3586 bp, Homo sapiens
  source 1..3586: mol_type = unassigned DNA
agtgcttgttggggccaggctttgtaacggtctcctgagcagcgagcagaaaatctgttatcgagagagagtgagcacagtgacctgcccctaaaggttcatgcgcatccctcagacccctctttagacgcgccccgcttctccctctgccctctccccttgcccaagccccgaggtgggggcctggtgtgaatgctccggccgaagtgaacctgcacccccgcacccgaaggcctctttccggcttctgggcaaggcggccccggtgagctcggccgtcacacatctctgctttttcccaagaagagcaggaaatggccaaaccccagtcctgcaagctgtacaagaagcatgacaccagcatctgcatctggtgaggactcaggaagcttctactcatggcagaaggcaaagagggaacaggggctagtgacatttgaagatgtagctgtggatttcacccaggaggagtggcagtacctgaacccaccacagaggaccctgtacagagacgtgatgctggagacctacagcaacttggtctttgtggggcagcaggttaccaaaccaaacctcatcctcaagttggaggtagaagaatgcccggcagaaggaaaaatcccattttggaactttccagaagtctgtcaagttgatgaacagattgagaggcaacatcaggatgaccaagataaatgtctgctgatgcaagttggattttctgacaagaaaacaattatcaccaagagtgctcgtgactgtcatgagtttggaaacatacttcatctgagtacaaaccttgttgcttcaatacaaagacccgataaacacgaatcatttggaaataatatggtagataatttagacttatttagtagaagttctgcagaaaataaatatgataatggatgtgcaaaattgttcttccatactgagtatgagaaaacaaatcctggaatgaagccctatggctataaagagtgtgggaaaggtcttaggcgaaagaaaggccttagtctacatcagagaattaaaaatggagagaaaccctttgaatgtactgcatgtaggaaaaccttcagcaagaagtcacacctcattgtacattggagaactcatacgggagagaaaccttttggatgtaccgaatgtggaaaagcttttagccaaaaatctcagctcattatacacttgcgaactcatacaggagagagaccctttgagtgtcctgaatgtggaaaagccttcagagaaaagtcaactgtcatcatacattacaggactcacacaggagaaaaaccttatgaatgtaatgaatgtggaaaagccttcactcagaagtccaacctcattgtccatcagaaaacccacactggagagaaaacctatgaatgcactaaatgtggagaatctttcatacagaagcttgatctaattatacatcatagtacccatacaggaaagaaaccccatgaatgtaatgagtgtaagaaaactttcagtgataagtcaactctcattatacaccagagaactcatacgggagagaaacctcataaatgtactgaatgtgggaagtctttcaatgagaagtcaaccctcattgtgcatcaaagaactcatacaggagagaaaccctatgaatgtgatgtgtgtggaaaaaccttcacgcaaaagtcaaaccttggtgtacatcagagaactcattcaggagagaaaccctttgaatgtaatgaatgtgagaaagccttctctcagaagtcctacctcatgctgcatcagagaggtcatacaggagagaaaccttacgagtgcaatgaatgtgaaaaagcattttcacagaaatcatatctcattatacatcaaagaactcatacagaagaaaaaccctataaatgtaatgaatgtggcaaagccttcagagaaaagtcaaagctcattatacatcagagaattcatacaggagagaaaccttatgaatgtcctgtgtgttggaaagcttttagccagaagtcacagctcataatacatcagagaacgcacacgggagagaaaccctatgcatgcactgagtgtggcaaagccttccgagaaaagtcaacattcactgtacatcaaagaactcatactggagagaaaccctataaatgtacagaatgtgggaaagcctttacccaaaaatcaaaccttattgtacatcagcgaacccatgcaggaaagaaagcccatggaagaggccacactcggaagtcaaagttcatggcacattagagagctaatcagcagtatctattatggacactgaaagaaagttgtgtcaattttactcacattttaaaagtatattttgacttgtggtttaaatatgggagtaaattcagcctttcttcttttcatctcagtcataacccaaaagctacgggagaaaaagcagaagtgtaatctctgtatctgacaaaattaggagacagctgcaaccctaatgagagggctgccacaggcagaggaaatgaagcactggtgcaggagatttcagagtgagagtgctcaaggctgcaggtgcaagacagcactggtaaggactcttagctgaggttcgggatataccccgaggcgcggaaccatagatataacagtggtaacagtgcgtgggcaggtaggaggtaggatgtttcctagaccatttggggtctgaggagaaacaggctggggcctcgagaaggagtcactcagacaagccatatttttagaaagtagtctactgatgggagcaacagttatggcatgctgggggaagagaagggacttttccttgtgaagagccctacagctgcccctatttactgacttgggagaagtaaagtcagaaagaacgaacagctgtggggggaaaaaattctcagttgtcaaaaaaaaaaaaaactgatctgcttagaatgtggccctggtttcttttcccacatgaacctccagcaaatagcaagtccaggaaaaactcttctcattcaaagaggaattattcaaaagtaatcaaaaccacaaatgcatttggtttttgggccagcaattccacttctaggaatgtacatactcacacatgtacaaaatgatgaacatacagtattcattaatgcagcgtttgtgaaaacaaaagattggaagctgtttaaatgacaccatatcagggttctggttccctaaattgtggtatattcatacagcctactcctgggtagacaacaatgaataaataaggagaacttggaaaccatttatgtagtgatgtgggataaccttcagtttatgttattaggtaggaaaaataaggttgaggacagtgactgccatttgtatataaaaaggagaaaaatggtaagtacataattgtgaattcataagttatctctggaaagagacatgagaacctggtaaccctgattaccttgggaggggaaggggcagtggtggctggggggatggaattgagagggagacaactgtatcctttcatagcttttgaaaatgtgggtgtactatgtactatgtggatgtactaccttttcaaaaataaaacatttaaaaagct

SEQ ID NO: 34929 - DNA, 3101 bp, Homo sapiens
  source 1..3101: mol_type = unassigned DNA
gttgaagccggttgtaggcgtggaaagaggttggcgcgctggaagtccagttgcttcggctccctgcgttaggtctggtggcggtcaatgcgcttccggacccgggatcagagtgtgtggatcgctatagggggaggggagctcagggtagacaacctcagcgtgttgcagattccctgcaaggggagttagacatctgagtcctagaccgagataccagctgaaggaacgctgcctggcgaaccctggtgttcaagttccagaggaacgggatgagctcctgagatggaagatctgtcctctccagactccacccttctccaagggggacataatctactctcatcagccagttttcaggaagcggtgactttcaaggatgtgatagtggactttacccaggaagaatggaaacagctggaccctggccagagagatttgttcagggatgtgacattggaaaattatacacacctggtctctataggactccaagtttctaaacctgatgtgatttcccagttagagcaagggacagagccatggatcatggagccaagcattccagtaggtacctgtgcagactgggagacaagacttgaaaatagtgtgtcagccccagagcctgacatttctgaagaagagctatctccagaggtaatagtggaaaaacacaaaagagatgattcttggagttccaacttgctagaaagttgggaatatgaaggcagtttagagagacagcaggcaaaccaacagacactgccaaaggaaataaaggtaaccgaaaagacaatacccagttgggaaaaaggccctgtaaataatgaatttgggaaaagtgtcaatgtgagttcaaaccttgtaacacaagaaccatctccagaagagacctctactaaaagaagcatcaaacagaattcaaacccagttaaaaaagagaaatcttgtaagtgcaatgaatgtgggaaagcctttagttattgttcagctcttattcgccatcagagaacacatactggagaaaaaccctacaaatgtaatgaatgtgaaaaagccttcagccggagtgaaaaccttataaaccatcaaagaattcatactggagataaaccatataaatgtgatcagtgtggaaaaggcttcattgagggtccatctcttactcaacatcaaagaattcatactggagaaaaaccatataaatgtgatgaatgtgggaaagcctttagtcagaggacccatcttgttcagcatcagagaattcatactggcgagaagccatacacttgtaatgagtgtggaaaagcctttagccagagaggccactttatggaacatcagaaaattcatacgggagaaaaaccttttaaatgtgatgaatgtgataaaaccttcaccaggagcacacaccttactcaacatcaaaaaattcatactggagaaaaaacctataaatgtaatgaatgtggaaaggccttcaacgggccctcaacttttatccgtcatcatatgattcatactggtgaaaaaccgtacgaatgcaatgaatgtgggaaagccttcagccagcactcaaacctcactcagcatcaaaaaactcatactggggagaaaccctatgattgtgcagaatgtggaaaatcttttagttactggtcatcccttgctcaacacctgaaaattcatactggagaaaaaccttacaaatgcaatgaatgtggaaaggccttcagttactgctcatcccttactcaacatcggagaattcacacgagagaaaagccctttgaatgcagtgaatgtggaaaggctttcagttatctctcaaaccttaatcagcatcagaaaactcatactcaagagaaagcttatgaatgtaaagaatgtgggaaagcttttattcggagttcatctcttgctaagcatgaaagaattcatactggagagaaaccctatcagtgtcatgaatgtgggaaaaccttcagttatggttcatcccttattcagcataggaagatccatactggagaacgaccttacaagtgtaatgagtgtgggagagcattcaaccagaacatacaccttacacagcataagagaattcatacaggagccaagccttatgagtgtgctgagtgtggtaaagcctttcgacattgttcatctcttgctcaacatcaaaaaactcacacagaagaaaaaccctaccagtgtaataaatgtgaaaagacctttagccagagctcccatctaactcagcatcaacgaattcacactggggagaagccctataagtgcaatgaatgtgacaaagcctttagccggagcactcatctgactgaacatcagaatactcatactggagagaaaccttataactgtaatgaatgcagaaagacttttagccagagcacatatctcattcagcaccagagaattcattcaggagagaagccttttggatgtaatgattgtggaaaatccttcagatatcgctctgctctcaacaaacatcagagactgcatcctggcatatgacaattctaggaacatcataaatttaggggagatatttactttagtttgtccttttgttaagtactgaagaatcagagtggatttagaaactgccttgaaatcttttaaattttcactatcatgttatggaatggaaagtacattgggctgaactaatccaattgttattaagccactctgtgacattagaaaactctactgttttaagctttagtttcctttatggaatgaaggatttggagtagattatttcaaaggtagtttggagttttataatcagttttgtatatttacaatattttcttgaatgggtttactatacatcagcattttgctgtgttgcatctagaatgtgtatgtttatgcatgttttgccaatagaatttgtgcttcagtaactagatcggggatctagtatgctcctggtctaatgcatttacattgtttaggtaactggttcctaataaaaagaattataaaataccctcaaattaacaattcaattgcatataatagcctaactcagtaagaatattaaaacttactattattcttcttct

SEQ ID NO: 34930 - DNA, 2289 bp, Homo sapiens
  source 1..2289: mol_type = unassigned DNA
gttgaagccggttgtaggcgtggaaagaggttggcgcgctggaagtccagttgcttcggctccctgcgttaggtctggtggcggtcaatgcgcttccggacccgggatcagagtgtgtggatcgctatagggggaggggagctcagggtagacaacctcagcgtgttgcagattccctgcaaggggagttagacatctgagtcctagaccgagataccagctgaaggaacgctgcctggcgaaccctggtgttcaagttccagaggaacgggatgagctcctgagatggaagatctgtcctctccagactccacccttctccaagggggacataatctactctcatcagccagttttcaggaagcggtgactttcaaggatgtgatagtggactttacccaggaagaatggaaacagctggaccctggccagagagatttgttcagggatgtgacattggaaaattatacacacctggtctctataggactccaagtttctaaacctgatgtgatttcccagttagagcaagggacagagccatggatcatggagccaagcattccagtaggtacctgtgcagactgggagacaagacttgaaaatagtgtgtcagccccagagcctgacatttctgaagaagagctatctccagaggtaatagtggaaaaacacaaaagagatgattcttggagttccaacttgctagaaagttgggaatatgaaggcagtttagagagacagcaggcaaaccaacagacactgccaaaggaaataaaggtaaccgaaaagacaatacccagttgggaaaaaggccctgtaaataatgaatttgggaaaagtgtcaatgtgagttcaaaccttgtaacacaagaaccatctccagaagagacctctactaaaagaagcatcaaacagaattcaaacccagttaaaaaagagaaatcttgtaagtgcaatgaatgtgggaaagcctttagttattgttcagctcttattcgccatcagagaacacatactggagaaaaaccctacaaatgtaatgaatgtgaaaaagccttcagccggagtgaaaaccttataaaccatcaaagaattcatactggagataaaccatataaatgtgatcagtgtggaaaaggcttcattgagggtccatctcttactcaacatcaaagaattcatactggagaaaaaccatataaatgtgatgaatgtgggaaagcctttagtcagaggacccatcttgttcagcatcagagaattcatactggcgagaagccatacacttgtaatgagtgtggaaaagcctttagccagagaggccactttatggaacatcagaaaattcatacgggagaaaaaccttttaaatgtgatgaatgtgataaaaccttcaccaggagcacacaccttactcaacatcaaaaaattcatactggagaaaaaacctataaatgtaatgaatgtggaaaggccttcaacgggccctcaacttttatccgtcatcatatgattcatactggtgaaaaaccgtacgaatgcaatgaatgtgggaaagccttcagccagcactcaaacctcactcagcatcaaaaaactcatactcaagagaaagcttatgaatgtaaagaatgtgggaaagcttttattcggagttcatctcttgctaagcatgaaagaattcatactggagagaaaccctatcagtgtcatgaatgtgggaaaaccttcagttatggttcatcccttattcagcataggaagatccatactggagaacgaccttacaagtgtaatgagtgtgggagagcattcaaccagaacatacaccttacacagcataagagaattcatacaggagccaagccttatgagtgtgctgagtgtggtaaagcctttcgacattgttcatctcttgctcaacatcaaaaaactcacacagaagaaaaaccctaccagtgtaataaatgtgaaaagacctttagccagagctcccatctaactcagcatcaacgaattcacactggggagaagccctataagtgcaatgaatgtgacaaagcctttagccggagcactcatctgactgaacatcagaatactcatactggagagaaaccttataactgtaatgaatgcagaaagacttttagccagagcacatatctcattcagcaccagagaattcattcaggagagaagccttttggatgtaatgattgtggaaaatccttcagatatcgctctgctctcaacaaacatcagagactgcatcctggcatatga

SEQ ID NO: 34931 - DNA, 2899 bp, Homo sapiens
  source 1..2899: mol_type = unassigned DNA
tgcacagagggaacacaccagggtagacaacctcagcgtgttgcagattccctgcaaggggagttagacatctgagtcctagaccgagataccagctgaaggaacgctgcctggcgaaccctggtgttcaagttccagaggaacgggatgagctcctgagatggaagatctgtcctctccagactccacccttctccaagggggacataatctactctcatcagccagttttcaggaagcggtgactttcaaggatgtgatagtggactttacccaggaagaatggaaacagctggaccctggccagagagatttgttcagggatgtgacattggaaaattatacacacctggtctctataggactccaagtttctaaacctgatgtgatttcccagttagagcaagggacagagccatggatcatggagccaagcattccagtaggtacctgtgcagactgggagacaagacttgaaaatagtgtgtcagccccagagcctgacatttctgaagaagagctatctccagaggtaatagtggaaaaacacaaaagagatgattcttggagttccaacttgctagaaagttgggaatatgaaggcagtttagagagacagcaggcaaaccaacagacactgccaaaggaaataaaggtaaccgaaaagacaatacccagttgggaaaaaggccctgtaaataatgaatttgggaaaagtgtcaatgtgagttcaaaccttgtaacacaagaaccatctccagaagagacctctactaaaagaagcatcaaacagaattcaaacccagttaaaaaagagaaatcttgtaagtgcaatgaatgtgggaaagcctttagttattgttcagctcttattcgccatcagagaacacatactggagaaaaaccctacaaatgtaatgaatgtgaaaaagccttcagccggagtgaaaaccttataaaccatcaaagaattcatactggagataaaccatataaatgtgatcagtgtggaaaaggcttcattgagggtccatctcttactcaacatcaaagaattcatactggagaaaaaccatataaatgtgatgaatgtgggaaagcctttagtcagaggacccatcttgttcagcatcagagaattcatactggcgagaagccatacacttgtaatgagtgtggaaaagcctttagccagagaggccactttatggaacatcagaaaattcatacgggagaaaaaccttttaaatgtgatgaatgtgataaaaccttcaccaggagcacacaccttactcaacatcaaaaaattcatactggagaaaaaacctataaatgtaatgaatgtggaaaggccttcaacgggccctcaacttttatccgtcatcatatgattcatactggtgaaaaaccgtacgaatgcaatgaatgtgggaaagccttcagccagcactcaaacctcactcagcatcaaaaaactcatactggggagaaaccctatgattgtgcagaatgtggaaaatcttttagttactggtcatcccttgctcaacacctgaaaattcatactggagaaaaaccttacaaatgcaatgaatgtggaaaggccttcagttactgctcatcccttactcaacatcggagaattcacacgagagaaaagccctttgaatgcagtgaatgtggaaaggctttcagttatctctcaaaccttaatcagcatcagaaaactcatactcaagagaaagcttatgaatgtaaagaatgtgggaaagcttttattcggagttcatctcttgctaagcatgaaagaattcatactggagagaaaccctatcagtgtcatgaatgtgggaaaaccttcagttatggttcatcccttattcagcataggaagatccatactggagaacgaccttacaagtgtaatgagtgtgggagagcattcaaccagaacatacaccttacacagcataagagaattcatacaggagccaagccttatgagtgtgctgagtgtggtaaagcctttcgacattgttcatctcttgctcaacatcaaaaaactcacacagaagaaaaaccctaccagtgtaataaatgtgaaaagacctttagccagagctcccatctaactcagcatcaacgaattcacactggggagaagccctataagtgcaatgaatgtgacaaagcctttagccggagcactcatctgactgaacatcagaatactcatactggagagaaaccttataactgtaatgaatgcagaaagacttttagccagagcacatatctcattcagcaccagagaattcattcaggagagaagccttttggatgtaatgattgtggaaaatccttcagatatcgctctgctctcaacaaacatcagagactgcatcctggcatatgacaattctaggaacatcataaatttaggggagatatttactttagtttgtccttttgttaagtactgaagaatcagagtggatttagaaactgccttgaaatcttttaaattttcactatcatgttatggaatggaaagtacattgggctgaactaatccaattgttattaagccactctgtgacattagaaaactctactgttttaagctttagtttcctttatggaatgaaggatttggagtagattatttcaaaggtagtttggagttttataatcagttttgtatatttacaatattttcttgaatgggtttactatacatcagcattttgctgtgttgcatctagaatgtgtatgtttatgcatgttttgccaatagaatttgtgcttcagtaactagatcggggatctagtatgctcctggtctaatgcatttacattgtttaggtaactggttcctaataaaaagaattataaaata

SEQ ID NO: 34932 - DNA, 234 bp, Homo sapiens
  source 1..234: mol_type = unassigned DNA
aaagcctttagtcagaggacccatcttgttcagcatcagagaattcatactggcgagaagccatacacttgtaatgagtgtggaaaagcctttagccagagaggccactttatggaacatcagaaaattcatacgggagaaaaaccttttaaatgtgatgaatgtgataaaaccttcaccaggagcacacaccttactacatcaaaaaattcatactggagaaaaaacctataa

SEQ ID NO: 34933 - DNA, 3115 bp, Homo sapiens
  source 1..3115: mol_type = unassigned DNA
gcactggccagacccagccagggatcctcgtattcgtcgagcctaatttccagcagccgggtaggcctcaccagaggctcctttccgtgaggccgcccccaattcctgcccctattctctgcctgggagatggcttccccgagccccccgccggagtcgaagagagacttgataaatcggcctgagaaaataagtaatgctccagactagctctctcatttgtgagttctccaggtgaagcaccatttttgaccttcccttgtgtcttctgttcctggcacagtgcctggaccccaaggaggagtgggattatctggacccagctcagagaagcctgtataaagatgtcatgatggagaattatggaaacctggtctcactggatgttttgaacagagataaggatgaggagccaactgtaaaacaagagattgaagaaattgaggaagaagtggaaccacagggtgtaatagttacaagaatcaaaagtgaaattgaccaggatcctatgggtagagaaacatttgaacttgttggtaggttagataaacaaagagggatcttcctatgggaaataccaagggaatctttgacccaggaacagagaatgttcagagaaaacactaacattatccgtaaaagaccaaactcagaagagaaatgccataaatgtgaagaatgtggaaagggttttgtccgcaaggcccatttcattcaacatcaaagggtccatactggtgagaaaccttttcagtgcaatgaatgtgggaaaagttttagtcgcagttcatttgttattgaacatcagagaattcacactggggaaaggccctatgagtgtaattactgtggaaaaacctttagtgtgagctcaacccttattagacatcagagaatccacactggagaaagaccctatcagtgtaatcagtgtaaacagagcttcagccagagaaggagccttgttaaacatcaaaggattcatacaggtgagaaaccccataaatgtagtgactgtgggaaagccttcagttggaaatcacaccttattgagcatcaaagaactcacactggtgagaaaccttatcactgtaccaaatgtaagaagagctttagtcgaaattcattgcttgttgagcatcaaagaattcacactggggaaagaccccataaatgtggtgaatgtgggaaagcctttcgattaagcacataccttatacaacaccaaaaaattcacactggcgagaagccttttctttgtattgagtgtggaaaaagtttcagtcggagctcattccttattgaacatcagaggatccatactggtgaaagaccttatcagtgcaaagagtgtgggaaaagtttcagtcagctttgcaaccttactcgtcatcagagaattcacacaggagacaagccccataaatgtgaggaatgtggaaaagcctttagtagaagctcaggtcttattcagcatcagagaattcacaccagggagaagacttatccatacaatgaaactaaggaaagttttgatccaaattgcagtcttgttatacagcaggaagtctaccctaaggagaaatcttataaatgtgatgaatgtgggaaaacttttagtgttagtgctcatcttgtacaacatcaaagaatccacactggtgaaaagccctatctatgtactgtctgtgggaaaagcttcagccggagctcatttcttattgaacatcagagaatccacactggtgagagaccctatctgtgcagacagtgtggaaaaagctttagtcagctttgtaatcttattcgacatcagggtgttcacacaggtaataaaccccataaatgtgatgaatgtggaaaggcctttagccggaactcgggtcttattcagcatcagagaatacacacaggagagaaaccttataagtgtgagaagtgcgacaaaagtttcagtcaacagcgcagtcttgtcaaccatcagaagatccatgcagaggtgaaaacccaagaaacccatgaatgtgacgcttgtggtgaagcctttaattgccgtatttctcttattcagcatcagaaattgcacacagcatggatgcaataaatgtagagcaatacataagctcaatttgatttgagactagtacccaagtgcagttttagtatggctcaacatgggtcagatttagtgataaagcaaattctccttggcctcaggcaaatagtttctaaagattctgtgaatagtggacaactgcccatgagcatttgacttcccttactctttgatgatcgtagagaaagacttggtaatttatctaagtatctttaataaatctttcagcagagagattaaacctaggttcagagcatgggtgctctgagggacaaagttggattagtataagggagctggagcagctgatagtggaaaacagaataatgattcaaagagtcttctgtcaccatgtcatattgtggttctttcagttccatgatatgtttggctctgcatgccaaagtccagtgattaagcatatataagttgtcaaggaaacaaagcccaaatgtttttaaaacaagtatacagtttttgtcattgtttaagaaagccagttgtttggcatgtgagttaaaggcagttccaatgcctgatggttcccagatctatgaaatgagtggaccattaaccttacatgtaaagattatgttagtaattaagaaacctaacaaaggtgttaccaaggaacctttgggagtgccttttttgtttttcaagatggacccaaaaaagtggaggaagatattgttcttttgtgccctcctacctgtgagagatatttgtagtcctatgtgaatgagcttatccctccacaaccaggtgcatatgaaagtgtacatattatgactgccaagtattggaaatgaaaagacctggagtctatgctaggaagctgagatattttggtattgcattggtttttatggtaactaggttttgcatgcaattaaaaatccttatttcttgttctagggcttcccttagttaatggttattataaacctattaattcatctgttttaaccattaaaacctgttttgtttttagctttg

SEQ ID NO: 34934 - DNA, 3021 bp, Homo sapiens
  source 1..3021: mol_type = unassigned DNA
gcactggccagacccagccagggatcctcgtattcgtcgagcctaatttccagcagccgggtaggcctcaccagaggctcctttccgtgaggccgcccccaattcctgcccctattctctgcctgggagatggcttccccgagccccccgccggagtcgaaggggttgctgacatttgaggatgtggctgtgttttttacccaggaggagtgggattatctggacccagctcagagaagcctgtataaagatgtcatgatggagaattatggaaacctggtctcactggatgttttgaacagagataaggatgaggagccaactgtaaaacaagagattgaagaaattgaggaagaagtggaaccacagggtgtaatagttacaagaatcaaaagtgaaattgaccaggatcctatgggtagagaaacatttgaacttgttggtaggttagataaacaaagagggatcttcctatgggaaataccaagggaatctttgacccaggaacagagaatgttcagagaaaacactaacattatccgtaaaagaccaaactcagaagagaaatgccataaatgtgaagaatgtggaaagggttttgtccgcaaggcccatttcattcaacatcaaagggtccatactggtgagaaaccttttcagtgcaatgaatgtgggaaaagttttagtcgcagttcatttgttattgaacatcagagaattcacactggggaaaggccctatgagtgtaattactgtggaaaaacctttagtgtgagctcaacccttattagacatcagagaatccacactggagaaagaccctatcagtgtaatcagtgtaaacagagcttcagccagagaaggagccttgttaaacatcaaaggattcatacaggtgagaaaccccataaatgtagtgactgtgggaaagccttcagttggaaatcacaccttattgagcatcaaagaactcacactggtgagaaaccttatcactgtaccaaatgtaagaagagctttagtcgaaattcattgcttgttgagcatcaaagaattcacactggggaaagaccccataaatgtggtgaatgtgggaaagcctttcgattaagcacataccttatacaacaccaaaaaattcacactggcgagaagccttttctttgtattgagtgtggaaaaagtttcagtcggagctcattccttattgaacatcagaggatccatactggtgaaagaccttatcagtgcaaagagtgtgggaaaagtttcagtcagctttgcaaccttactcgtcatcagagaattcacacaggagacaagccccataaatgtgaggaatgtggaaaagcctttagtagaagctcaggtcttattcagcatcagagaattcacaccagggagaagacttatccatacaatgaaactaaggaaagttttgatccaaattgcagtcttgttatacagcaggaagtctaccctaaggagaaatcttataaatgtgatgaatgtgggaaaacttttagtgttagtgctcatcttgtacaacatcaaagaatccacactggtgaaaagccctatctatgtactgtctgtgggaaaagcttcagccggagctcatttcttattgaacatcagagaatccacactggtgagagaccctatctgtgcagacagtgtggaaaaagctttagtcagctttgtaatcttattcgacatcagggtgttcacacaggtaataaaccccataaatgtgatgaatgtggaaaggcctttagccggaactcgggtcttattcagcatcagagaatacacacaggagagaaaccttataagtgtgagaagtgcgacaaaagtttcagtcaacagcgcagtcttgtcaaccatcagaagatccatgcagaggtgaaaacccaagaaacccatgaatgtgacgcttgtggtgaagcctttaattgccgtatttctcttattcagcatcagaaattgcacacagcatggatgcaataaatgtagagcaatacataagctcaatttgatttgagactagtacccaagtgcagttttagtatggctcaacatgggtcagatttagtgataaagcaaattctccttggcctcaggcaaatagtttctaaagattctgtgaatagtggacaactgcccatgagcatttgacttcccttactctttgatgatcgtagagaaagacttggtaatttatctaagtatctttaataaatctttcagcagagagattaaacctaggttcagagcatgggtgctctgagggacaaagttggattagtataagggagctggagcagctgatagtggaaaacagaataatgattcaaagagtcttctgtcaccatgtcatattgtggttctttcagttccatgatatgtttggctctgcatgccaaagtccagtgattaagcatatataagttgtcaaggaaacaaagcccaaatgtttttaaaacaagtatacagtttttgtcattgtttaagaaagccagttgtttggcatgtgagttaaaggcagttccaatgcctgatggttcccagatctatgaaatgagtggaccattaaccttacatgtaaagattatgttagtaattaagaaacctaacaaaggtgttaccaaggaacctttgggagtgccttttttgtttttcaagatggacccaaaaaagtggaggaagatattgttcttttgtgccctcctacctgtgagagatatttgtagtcctatgtgaatgagcttatccctccacaaccaggtgcatatgaaagtgtacatattatgactgccaagtattggaaatgaaaagacctggagtctatgctaggaagctgagatattttggtattgcattggtttttatggtaactaggttttgcatgcaattaaaaatccttatttcttgttctagggcttcccttagttaatggttattataaacctattaattcatctgttttaaccattaaaacctgttttgtttttagctttg

SEQ ID NO: 34935 - DNA, 3134 bp, Homo sapiens
  source 1..3134: mol_type = unassigned DNA
aaggaggaggaactggcagcggggaggaggctctagcgaggcctgaaaggctgcgtaaccaggcaggagtaggggttggggttcggggttgggggacagccagggatcgcgtctgatatgctgttggggtcgtgaccgtctgggggccgaggcaggcactggccagacccagccagggatcctcgtattcgtcgagcctaatttccagcagccgggtaggcctcaccagaggctcctttccgtgaggccgcccccaattcctgcccctattctctgcctgggagatggcttccccgagccccccgccggagtcgaaggaggagtgggattatctggacccagctcagagaagcctgtataaagatgtcatgatggagaattatggaaacctggtctcactggatgttttgaacagagataaggatgaggagccaactgtaaaacaagagattgaagaaattgaggaagaagtggaaccacagggtgtaatagttacaagaatcaaaagtgaaattgaccaggatcctatgggtagagaaacatttgaacttgttggtaggttagataaacaaagagggatcttcctatgggaaataccaagggaatctttgacccaggaacagagaatgttcagagaaaacactaacattatccgtaaaagaccaaactcagaagagaaatgccataaatgtgaagaatgtggaaagggttttgtccgcaaggcccatttcattcaacatcaaagggtccatactggtgagaaaccttttcagtgcaatgaatgtgggaaaagttttagtcgcagttcatttgttattgaacatcagagaattcacactggggaaaggccctatgagtgtaattactgtggaaaaacctttagtgtgagctcaacccttattagacatcagagaatccacactggagaaagaccctatcagtgtaatcagtgtaaacagagcttcagccagagaaggagccttgttaaacatcaaaggattcatacaggtgagaaaccccataaatgtagtgactgtgggaaagccttcagttggaaatcacaccttattgagcatcaaagaactcacactggtgagaaaccttatcactgtaccaaatgtaagaagagctttagtcgaaattcattgcttgttgagcatcaaagaattcacactggggaaagaccccataaatgtggtgaatgtgggaaagcctttcgattaagcacataccttatacaacaccaaaaaattcacactggcgagaagccttttctttgtattgagtgtggaaaaagtttcagtcggagctcattccttattgaacatcagaggatccatactggtgaaagaccttatcagtgcaaagagtgtgggaaaagtttcagtcagctttgcaaccttactcgtcatcagagaattcacacaggagacaagccccataaatgtgaggaatgtggaaaagcctttagtagaagctcaggtcttattcagcatcagagaattcacaccagggagaagacttatccatacaatgaaactaaggaaagttttgatccaaattgcagtcttgttatacagcaggaagtctaccctaaggagaaatcttataaatgtgatgaatgtgggaaaacttttagtgttagtgctcatcttgtacaacatcaaagaatccacactggtgaaaagccctatctatgtactgtctgtgggaaaagcttcagccggagctcatttcttattgaacatcagagaatccacactggtgagagaccctatctgtgcagacagtgtggaaaaagctttagtcagctttgtaatcttattcgacatcagggtgttcacacaggtaataaaccccataaatgtgatgaatgtggaaaggcctttagccggaactcgggtcttattcagcatcagagaatacacacaggagagaaaccttataagtgtgagaagtgcgacaaaagtttcagtcaacagcgcagtcttgtcaaccatcagaagatccatgcagaggtgaaaacccaagaaacccatgaatgtgacgcttgtggtgaagcctttaattgccgtatttctcttattcagcatcagaaattgcacacagcatggatgcaataaatgtagagcaatacataagctcaatttgatttgagactagtacccaagtgcagttttagtatggctcaacatgggtcagatttagtgataaagcaaattctccttggcctcaggcaaatagtttctaaagattctgtgaatagtggacaactgcccatgagcatttgacttcccttactctttgatgatcgtagagaaagacttggtaatttatctaagtatctttaataaatctttcagcagagagattaaacctaggttcagagcatgggtgctctgagggacaaagttggattagtataagggagctggagcagctgatagtggaaaacagaataatgattcaaagagtcttctgtcaccatgtcatattgtggttctttcagttccatgatatgtttggctctgcatgccaaagtccagtgattaagcatatataagttgtcaaggaaacaaagcccaaatgtttttaaaacaagtatacagtttttgtcattgtttaagaaagccagttgtttggcatgtgagttaaaggcagttccaatgcctgatggttcccagatctatgaaatgagtggaccattaaccttacatgtaaagattatgttagtaattaagaaacctaacaaaggtgttaccaaggaacctttgggagtgccttttttgtttttcaagatggacccaaaaaagtggaggaagatattgttcttttgtgccctcctacctgtgagagatatttgtagtcctatgtgaatgagcttatccctccacaaccaggtgcatatgaaagtgtacatattatgactgccaagtattggaaatgaaaagacctggagtctatgctaggaagctgagatattttggtattgcattggtttttatggtaactaggttttgcatgcaattaaaaatccttatttcttgttctagggcttcccttagttaatggttattataaacctattaattcatctgttttaaccattaaaacctgttttgtttttagctttg

SEQ ID NO: 34936 - DNA, 3220 bp, Homo sapiens
  source 1..3220: mol_type = unassigned DNA
acttccggcctcctaaccgttctcgctagcggtgcgcttctggcctgttttgagtccgcgctcaaaggtctctgaggatccccgggtggaaactcctcccgggagtaaaaccacacaaccactgagaagaccgctccggcatcctagagagtacgcgtgtgagcctgggtgcaaggccaaagtagtgacgcacttccgttcacgcaccgctttctgtttttcctgagcctttgcctgctaagagggagaccaggtcatggcagccatgcctctgaaagctcaataccaggagatggtgaccttcgaggatgtggctgtgcacttcaccaagacagaatggactggcctttctcctgcccagagggccctgtacagaagtgtgatgttggagaattttgggaacctgactgctttggggtacccagttcccaaacctgcactgatctcacttttggagagaggggacatggcttggggcctggaagcacaggatgatcccccagcagagaggaccaaaaacgtctgtaaagatgttgagaccaacattgacagtgagtccacattaatccagggaatttctgaagaaagagatgggatgatgtcacatggtcagctgaagagtgtccctcagagaactgacttcccagaaacacgtaatgtggaaaagcaccaggacatccccacagtgaaaaatatccaaggaaaggttccaagaatcccctgtgcaaggaaacctttcatatgtgaggagtgtgggaaatccttcagctacttttcttactatgctagacaccagagaatccacactggggagaaaccttttgagtgtagtgagtgtggaaaagcctttaatggtaattcttcgttaattcggcaccagaggattcacactggagagagaccctatcagtgtgaggagtgtgggcgagcctttaatgataatgcaaatctgatcaggcatcagagaatccacagtggggacagaccctattactgtacagagtgtgggaatagtttcacgagtagttccgagtttgttatacatcagagaatccacactggggagaaaccctatgagtgtaatgagtgtggcaaagcttttgttggtaattcacccctacttcggcatcagaaaatccacactggagagaaaccctatgagtgtaatgagtgtggcaaaagctttggaaggacttcccatctaagccaacatcagcgtattcacacaggggaaaagccttattcttgtaaagtatgtggacaagccttcaattttcatacaaaactaactcggcaccagagaattcacagtgaggagaaaccctttgactgtgtagattgtggaaaagccttcagtgctcaggaacaattaaaaaggcatctgagaattcatactcaggagtcttcctatgtatgtgatgagtgtggaaaagccttgactagcaaaagaaatcttcatcagcatcaaagaatccatactggagagaaaccctatgagtgtagcaagtatgagaaggcctttgggacttcttcccagctaggtcaccttgagcatgtctactctggagagaagcctgtgctggacatttgtcgttttggcctcccagaattttttacccccttttactggtaatagtacactccagtgaaatgtactgagtggattccgtcttctactcaggaatggaatgtgtgacacaggcctgactcagcctctgatccatccctcaagccacagttaatgattcagatgtcagtagatgaccaaagatggttcaattagagtcccaggattgcaagagctaataggaacaaatactctccccccgcccacccccattggttttaatgctgagaagaagaactagactcttacagaggtgagaatgaagtccacacagcaaaaatgcatctgagaattggagagcagtaaaagactgaagataatgtttgaacagccacatacaccatgcctgaagctaaaaatatatacgggtttttgaattgcagcagccaataaattccatttttgtttggttggttttggctttggcacacctgagttaggttttcttgccttggaacagaattttgacttaaacagtgttgtcattgtagcagttgtttgaagttttcagggataacatacctgatggagaaatgttttgtgtgtatgatatatgggaaagtctttagttatagtcatggcagctcctcaaccccatgattgtgatgagattgggaagcccactgtaacactggagagcccaggttatatcagacaccactagtagatagaagttctaacaacttgagctctgtaacaaaaatctcattgtactacaaaattatgtctgcaccagtgaatccattctcaagaaaagtcttaactaggaaactaaaagctttcactcttaaagctttcattttctgtttattcagttttttatttggaatggatgctactctaggccttaaactgagaaatgccaggctattgtagctattatatcttggtatttgccattttaattcctaggacagcacgcccgctttgcccttgacctggctagggagccaaggaaatgccatggttcttggtcataagacacactgcagagatctctcagtaggaaaacagggctggcccttttctttggtgatgaacacaaactgcaccctttttttctcccacgtgtccttccgctgccagccagtgttggaatctccctacccaattccagacttaattgcttactgcgtctagcacctgggtggcttcaccacctcttccttacttgtcagcagatgaatgagcagttgtatcatgtgcttgggttgaccaatgaatgatagacttggggaattgagtaaacaccttttaattgaagtataacacaaacataaaaatgcatgagtcagccaggcgcggtggctcacacttgtaatcccagtactttgggaggccgaggtgggcgattcatcaggtcaagagatcgagaccatcctggccaacatggtgaaaccccgtctctactaaaaatacaagaattagctgggcgtggtggtgcatgcctgtagtcccagctgctcaggaagctggggcaggcgaattgcttgaacccgggaggcggaggttgtagtgagccgagattacaccactgcactccagcctggtgacagagtgagattcctcaataaaataaaataaaaccatgaa

SEQ ID NO: 34937 - DNA, 4215 bp, Homo sapiens
  source 1..4215: mol_type = unassigned DNA
gctttcatcgcctttactccccgaccttccttcgagtctgtttatccgttgcagcctcccttccccacgacggggcgcctctgcaactcacaaagtacccttagaaagaggccctcagaagagtcttctcttaagaagataaagaaggtagtggaaacgaacttcctgagcttttcaggctctaatggctgaagaatcaagaaagccttcagccccatccccaccagaccagactcctgaagaggatcttgtaatcgtcaaggtagaggaggatcatggttgggaccaggaatctagtctgcatgaaagtaaccctcttggccaagaagtgttccgcctgcgcttcaggcagttacgctaccaggagacactaggaccccgagaagctctgatccaactacgggccctttgccatcagtggctgaggccagatttgaacaccaaggaacagatcctggagctgctggtgctggagcagttcttgaccatcctacctgaggagctccagacactggttaaggaacatcagctagagaacggagaggaggtggtgaccctattagaggatttggaaaggcagattgatatactaggacgaccagtctcagctcgcgtacatggacatagggtactctgggaggaggtagtacattcagcatctgcaccagagcctccaaatactcagctccaatctgaggcaacccaacataaatctccagtgccccaagagtcacaagagagagccatgtctacttcccagagtcctactcgttcccagaaaggaagttctggagaccaggaaatgacagctacacttctcacagcagggttccagactttggagaagattgaagacatggctgtgtcccttattcgagaggagtggcttcttgatccatcacagaaggatctgtgtagagataacaggccagaaaatttcagaaacatgttctccctgggtggtgagaccaggagtgagaacagggaattagcttcaaaacaggtaatatctactggaatccagccacatggagagacagctgccaaatgcaacggggatgttatcaggggtcttgagcatgaagaagcccgagaccttctgggcagattagagaggcagcggggaaatcccacacaagagagacgacataaatgtgatgaatgtgggaaaagctttgctcagagctcaggccttgttcgccactggagaatccacactggggagaaaccctatcagtgtaatgtgtgtggtaaagccttcagttacaggtcagcccttctttcacatcaggatatccacaacaaagtaaaacgctatcactgtaaggagtgtggcaaagccttcagtcagaacacaggcctgattctgcaccagagaatccacactggggagaagccatatcagtgcaatcagtgtgggaaggctttcagtcagagtgcgggccttattctgcaccagagaatccacagtggagagagaccctatgaatgtaatgagtgtgggaaagctttcagtcatagctcacacctcattggacatcagagaatccacactggggagaagccctatgagtgtgatgagtgtgggaaaaccttcaggcggagctcacatcttattggtcatcagaggagccacactggggagaaaccctacaaatgcaatgagtgtgggagggccttcagtcagaagtcaggccttattgaacatcagagaatccacactggagaaagaccctataaatgtaaagaatgtgggaaagctttcaatgggaacactggtctcattcaacacctgagaattcacacaggggagaagccctaccaatgtaatgagtgtgggaaagcctttattcagaggtcaagtctcattcgacatcagagaatccacagtggtgaaaaatctgaatccataagcgtttaggaacaacatcagttagagtttgagcattattcagcattagggaaaccacacactggtgagaggtctttcagtgtactaaaaggcagaaaggtcatcacaactttagtgtcagaatctatagtggtggcaaagttaggatagctctttagtaatttgggcccagtgccttggtgaaggttgattagcttgactgtctttgaaagtatctgatggagctcctgatgacctaatgtatcctttagaaatttaaaatagcattagagcaagttgcttgtcatggcttgaagagcttaactttgtcttttgggtgagtagctataggtttgagagaggctggctactcctagttcctgtgcttcttcccatctcctgtgatccccctctcccatttattcccttgaaggtgcccttgtattcctaatctgatctaagaagctgctgtagagtcagaagtagcttctgtgtgaaacttatatttgtatgtagctttctaggaaaattttacagacacttaaagtatttatgcttaagtgtgcatttttttattctaatattccttctagtcagtggaaatttgtattcccatacaaactcagaatgctatatttttaacagcactccagcatttttcttcatgtatcaccttcactgactccattgagtcattgagcatctgtacatatccttcaccacccccagtcccagcacctgtgtcagtaaagaaagtggacacattagtaatggttatgggagtaatacagagaaagaggtgagtggagactcagcccagctgctcttgagcttggatagttatacattttggtgacttctgactctccttccacctccccactgtacactgtggtacagatagttggcactatcctagttatggcatcaggtaggagaaggagacgaagatgctttaggaagataaaaaccttacaaagaatgtatactcatcttttttggcccattacaatactgctttctcaggttcttaacagcctgtgcaaactccctgactagatggtctgtcactcctatcattaccttgcacccatctctttagatggcctcagcacctcactcgttattctccatctgtttcttgccattagtttatatgactttaatatccacagtggtaatctaataccttacctcacaggttttcattcttttgaactctggtgcactccatctgtaatccatgtctataatctaccaacaaagatgtactcttaaactcagtatcaccaggcactatatttcatctttgaggcttttgttataccaaggaatactatataaagtaatgagactggtttaaagtaacatgccagaacttacgcatccaatgtgggttgtcacttgttattcccaagtactattattccatactactatattcttccaaatatttggaacactcttagaattcccatttaataaaccatatgagaaaaccctctattactcttacactttagttttaccatttgagtagccacttattcaccagagttggaattgagaaattttgggctttccaaaattaacctttaaacttaaaattgattacattgagcctattcagaaaaaaaattatataggttctgatgaaagcttcataatttcaccctgtgactatcctgaaaagaaataataatcattttatgattgatgggccaaaaaaagcaatcaaagtcttacgtcatagaggaccaccttttggatcataaattctttccctataacattccttctctgcctctctatggcccactttgaccactaacaacatcagaattatctacatcaatttcattgagccattggtgaatgaagacacccatcacttgtcatgttggtttccaacagtcctttcgattatcctttattttcttatcctcccttctcttgtttcttttatttataagttaccattcctagtttctttgtacttgaaattttaagaaaccagaaacaagtaaatctggttgtatctagatctttgctctgtgtttcagttgtgccttaccctctgtaagatactgattcttcctggggccagtattaccttgtatgcaaatattacatatgatgggtgcattgtcagagggaaaatatatgtgtatgtacacatgtgtatgtacacacacacacacacctgccatacactttagaagaacgcttctcttctattccaataaaaagtccttttagcaatgcaacatattaacaaaattgggtgcattcagggtggtatggccatagaccagagcaacaca

SEQ ID NO: 34938 - DNA, 2071 bp, Homo sapiens
  source 1..2071: mol_type = unassigned DNA
gctttcatcgcctttactccccgaccttccttcgagtctgtttatccgttgcagcctcccttccccacgacggggcgcctctgcaactcacagttgaagagtctataaaccaacccccctcgccccgtgccacaactccaaaaactgaaaagataagcactgccttgatgatccgtatggggaactaagtacccttagaaagaggccctcagaagagtcttctcttaagaagataaagaaggtagtggaaacgaacttcctgagcttttcaggctctaatggctgaagaatcaagaaagccttcagccccatccccaccagaccagactcctgaagaggatcttgtaatcgtcaaggtagaggaggatcatggttgggaccaggaatctagtctgcatgaaagtaaccctcttggccaagaagtgttccgcctgcgcttcaggcagttacgctaccaggagacactaggaccccgagaagctctgatccaactacgggccctttgccatcagtggctgaggccagatttgaacaccaaggaacagatcctggagctgctggtgctggagcagttcttgaccatcctacctgaggagctccagacactggttaaggaacatcagctagagaacggagaggaggtggtgaccctattagaggatttggaaaggcagattgatatactaggacgaccagtctcagctcgcgtacatggacatagggtactctgggaggaggtagtacattcagcatctgcaccagagcctccaaatactcagctccaatctgaggcaacccaacataaatctccagtgccccaagagtcacaagagagagccatgtctacttcccagagtcctactcgttcccagaaaggaagttctggagaccaggaaatgacagctacacttctcacagcagggttccagactttggagaagattgaagacatggctgtgtcccttattcgagaggagtggcttcttgatccatcacagaaggatctgtgtagagataacaggccagaaaatttcagaaacatgttctccctgggtggtgagaccaggagtgagaacagggaattagcttcaaaacaggtaatatctactggaatccagccacatggagagacagctgccaaatgcaacggggatgttatcaggggtcttgagcatgaagaagcccgagaccttctgggcagattagagaggcagcggggaaatcccacacaagagagacgacataaatgtgatgaatgtgggaaaagctttgctcagagctcaggccttgttcgccactggagaatccacactggggagaaaccctatcagtgtaatgtgtgtggtaaagccttcagttacaggtcagcccttctttcacatcaggatatccacaacaaagtaaaacgctatcactgtaaggagtgtggcaaagccttcagtcagaacacaggcctgattctgcaccagagaatccacactggggagaagccatatcagtgcaatcagtgtgggaaggctttcagtcagagtgcgggccttattctgcaccagagaatccacagtggagagagaccctatgaatgtaatgagtgtgggaaagctttcagtcatagctcacacctcattggacatcagagaatccacactggggagaagccctatgagtgtgatgagtgtgggaaaaccttcaggcggagctcacatcttattggtcatcagaggagccacactggggagaaaccctacaaatgcaatgagtgtgggagggccttcagtcagaagtcaggccttattgaacatcagagaatccacactggagaaagaccctataaatgtaaagaatgtgggaaagctttcaatgggaacactggtctcattcaacacctgagaattcacacaggggagaagccctaccaatgtaatgagtgtgggaaagcctttattcagaggtcaagtctcattcgacatcagagaatccacagtggtgaaaaatctgaatccataagcgtttaggaacaacatcagttagagtttgagcattattcagcattagggaaaccacacactgg

SEQ ID NO: 34939 - DNA, 1046 bp, Homo sapiens
  source 1..1046: mol_type = unassigned DNA
gcgagggaaccttttatgaagctttcttcatagataatcgtgttgtggttgaagagtctataaaccaacccccctcgccccgtgccacaactccaaaaactgaaaagataagcactgccttgatgatccgtatggggaactaagtacccttagaaagaggccctcagaagagtcttctcttaagaagataaagaaggtagtggaaacgaacttcctgagcttttcaggctctaatggctgaagaatcaagaaagccttcagccccatccccaccagaccagactcctgaagaggatcttgtaatcgtcaaggtagaggaggatcatggttgggaccaggaatctagtctgcatgaaagtaaccctcttggccaagaagtgttccgcctgcgcttcaggcagttacgctaccaggagacactaggaccccgagaagctctgatccaactacgggccctttgccatcagtggctgaggccagatttgaacaccaaggaacagatcctggagctgctggtgctggagcagttcttgaccatcctacctgaggagctccagacactggttaaggaacatcagctagagaacggagaggaggtggtgaccctattagaggatttggaaaggcagattgatatactaggacgaccagtaagtagaaggaggtctcagctcgcgtacatggacatagggtactctgggaggaggtagtacattcagcatctgcaccagagcctccaaatactcagctccaatctgaggcaacccaacataaatctccagtgccccaagagtcacaagagagagccatgtctacttcccagagtcctactcgttcccagaaaggaagttctggagaccaggaaatgacagctacacttctcacagcagggttccagactttggagaagattgaagacatggctgtgtcccttattcgagaggagtggcttcttgatccatcacagaaggatctgtgtagagataacaggccagaaaatttcagaaacatgttctccctgggtggtgagaccaggagtgagaaca

SEQ ID NO: 34940 - DNA, 1621 bp, Homo sapiens
  source 1..1621: mol_type = unassigned DNA
ggccattgttcgtgccgcgcttctagcaacgccgggccggtaaccccctctccctccttgcgcgttccgggtctcgcaagcgcctccaaggtttgtcttgaagcatagctccagctggagggtaccttttaagctgttcaaggtcaagatgaatacaaactcaaaggaggttttatccctgggtgttcaagttcccgaggcatgggaagaacttctgacaatgaaagtggaagcaaaaagtcaccttcaatggcaggaatccagactgaaacgcagtaatccactggcaagggaaatcttccgaaggcactttcgacagctgtgctaccaagagacccctggaccaagggaggctcttactcgactccaggaactttgctaccagtggttgaggccacatgtgagcacaaaggagcagattttggatctgctggtgctggagcagtttctatccattctgcccaaggagctccagggctgggtgagggaacactgtccagagagtggagaagaggctgtgattttgctggaggatctggagagagagctcgatgaaccacaacatgagatggtggcccacagacacagacaagaagtcctctgtaaagagatggtgcctctagcagagcagacaccactgacccttcagtcccagcctaaggagccacagctcacatgtgactctgctcagaagtgccattctattggagagacagatgaagtaaccaagactgaggacagagagttggtgctaaggaaagactgtcctaagatagtggaaccacatgggaaaatgtttaatgagcagacctgggaggtatcacagcaggatccctcacatggagaagttggtgaacataaggataggatagagaggcagtggggaaacctcttaggagaggggcaacacaaatgtgatgaatgtgggaagagctttactcagagctcaggtctcattcgacatcaaagaattcatactggagaaagaccttatgaatgtaatgaatgtgggaaagccttcagtcgaagttctggtctttttaatcaccgaggaatccacaatatacagaaacggtaccactgcaaggagtgtgggaaggtcttcagtcagagtgcgggtcttatccagcatcagagaatccacaaaggagaaaagccgtatcagtgcagccagtgcagtaagagctacagtcggcgttcatttctcattgaacatcagagaagccacacaggggagcgacctcaccagtgcattgaatgtgggaaaagctttaatcgacactgcaacctcattcgccatcagaagatccacacagtggctgagctggtctagggcttggctatgagcaagttttccagatcaccacccaagttgtgtggggcaggttgagactagaaaatgcctctttcttcctttctccatgaaatgtgtttgaaacaaatcctgacttaaggcccagggacttccttaaaggaaagttgggtgtttgaagctactgttttctcttttgttcattttacctctttcttactcttactagctgtgtccctcttatttataatttatttatttttttgagatggctgctaaacccttctaataatataataaatggcactg

SEQ ID NO: 34941 - DNA, 579 bp, Homo sapiens
  source 1..579: mol_type = unassigned DNA
atacaaattccaggctaacggtgacagtggctgcctcggggagtgggactaaggaggggtaggtggggtttgacattttactttattaattttggtattgtctgagggtttttaaaccataaataatgtattaattttaaaaatgcttttaaaaatcatcattttcaatagttaacggtctatgcttcatcaacgttttccgtttaaaacctgtgtgcggcccacacacgtatgacattctgattatgtgattcactgctgaaaaagaactggacgccaggaaattgggggttgagtccgaagcaaggtgaacgccggacatcgagacatggaatcctagaccggcccggaagtgcctctgctccgtccgccttcgaggagaggcaagcgcctccaaggtttgtcttgaagcatagctccagctggagggtaccttttaagctgttcaaggtcaagatgaatacaaactcaaaggaggttttatccctgggtgttcaagttcccgaggcatgggaagaacttctgacaatgaaagtggaagcaaaaagtcaccttcaatggcaggaatccagactgaaa

SEQ ID NO: 34942 - DNA, 1601 bp, Homo sapiens
  source 1..1601: mol_type = unassigned DNA
ggccattgttcgtgccgcgcttctagcaacgccgggccggcaagcgcctccaaggtttgtcttgaagcatagctccagctggagggtaccttttaagctgttcaaggtcaagatgaatacaaactcaaaggaggttttatccctgggtgttcaagttcccgaggcatgggaagaacttctgacaatgaaagtggaagcaaaaagtcaccttcaatggcaggaatccagactgaaacgcagtaatccactggcaagggaaatcttccgaaggcactttcgacagctgtgctaccaagagacccctggaccaagggaggctcttactcgactccaggaactttgctaccagtggttgaggccacatgtgagcacaaaggagcagattttggatctgctggtgctggagcagtttctatccattctgcccaaggagctccagggctgggtgagggaacactgtccagagagtggagaagaggctgtgattttgctggaggatctggagagagagctcgatgaaccacaacatgagatggtggcccacagacacagacaagaagtcctctgtaaagagatggtgcctctagcagagcagacaccactgacccttcagtcccagcctaaggagccacagctcacatgtgactctgctcagaagtgccattctattggagagacagatgaagtaaccaagactgaggacagagagttggtgctaaggaaagactgtcctaagatagtggaaccacatgggaaaatgtttaatgagcagacctgggaggtatcacagcaggatccctcacatggagaagttggtgaacataaggataggatagagaggcagtggggaaacctcttaggagaggggcaacacaaatgtgatgaatgtgggaagagctttactcagagctcaggtctcattcgacatcaaagaattcatactggagaaagaccttatgaatgtaatgaatgtgggaaagccttcagtcgaagttctggtctttttaatcaccgaggaatccacaatatacagaaacggtaccactgcaaggagtgtgggaaggtcttcagtcagagtgcgggtcttatccagcatcagagaatccacaaaggagaaaagccgtatcagtgcagccagtgcagtaagagctacagtcggcgttcatttctcattgaacatcagagaagccacacaggggagcgacctcaccagtgcattgaatgtgggaaaagctttaatcgacactgcaacctcattcgccatcagaagatccacacagtggctgagctggtctagggcttggctatgagcaagttttccagatcaccacccaagttgtgtggggcaggttgagactagaaaatgcctctttcttcctttctccatgaaatgtgtttgaaacaaatcctgacttaaggcccagggacttccttaaaggaaagttgggtgtttgaagctactgttttctcttttgttcattttacctctttcttactcttactagctgtgtccctcttatttataatttatttatttttttgagatggctgctaaacccttctaataatataataaatggcactgccacagccaacatgcc

SEQ ID NO: 34943 - DNA, 1791 bp, Homo sapiens
  source 1..1791: mol_type = unassigned DNA
atctttgttccctgcccggccattgttcgtgccgcgcttctagcaacgccgggccggtaaccccctctccctccttgcgcgttccgggtctcgcaagcgcctccaaggtttgtcttgaagcatagctccagctggagggtaccttttaagctgttcaaggtcaagatgaatacaaactcaaaggaggttttatccctgggtgttcaagttcccgaggcatgggaagaacttctgacaatgaaagtggaagcaaaaagtcaccttcaatggcaggaatccagactgaaacgcagtaatccactggcaagggaaatcttccgaaggcactttcgacagctgtgctaccaagagacccctggaccaagggaggctcttactcgactccaggaactttgctaccagtggttgaggccacatgtgagcacaaaggagcagattttggatctgctggtgctggagcagtttctatccattctgcccaaggagctccagggctgggtgagggaacactgtccagagagtggagaagaggctgtgattttgctggaggatctggagagagagctcgatgaaccacaacatgagatggtggcccacagacacagacaagaagtcctctgtaaagagatggtgcctctagcagagcagacaccactgacccttcagtcccagcctaaggagccacagctcacatgtgactctgctcagaagtgccattctattggagagacagatttaatacgaagtttgaggagaagggcagtactgatcccacttggggcccatctgttctctacagacacatttttattttccaaacctgttgtgatcccccagctaaaaggaggaggagaaacatggcctaacaacagaggagtcctaagagatgaagtaaccaagactgaggacagagagttggtgctaaggaaagactgtcctaagatagtggaaccacatgggaaaatgtttaatgagcagacctgggaggtatcacagcaggatccctcacatggagaagttggtgaacataaggataggatagagaggcagtggggaaacctcttaggagaggggcaacacaaatgtgatgaatgtgggaagagctttactcagagctcaggtctcattcgacatcaaagaattcatactggagaaagaccttatgaatgtaatgaatgtgggaaagccttcagtcgaagttctggtctttttaatcaccgaggaatccacaatatacagaaacggtaccactgcaaggagtgtgggaaggtcttcagtcagagtgcgggtcttatccagcatcagagaatccacaaaggagaaaagccgtatcagtgcagccagtgcagtaagagctacagtcggcgttcatttctcattgaacatcagagaagccacacaggggagcgacctcaccagtgcattgaatgtgggaaaagctttaatcgacactgcaacctcattcgccatcagaagatccacacagtggctgagctggtctagggcttggctatgagcaagttttccagatcaccacccaagttgtgtggggcaggttgagactagaaaatgcctctttcttcctttctccatgaaatgtgtttgaaacaaatcctgacttaaggcccagggacttccttaaaggaaagttgggtgtttgaagctactgttttctcttttgttcattttacctctttcttactcttactagctgtgtccctcttatttataatttatttatttttttgagatggctgctaaacccttctaataatataataaatggcactg

SEQ ID NO: 34944 - DNA, 2021 bp, Homo sapiens
  source 1..2021: mol_type = unassigned DNA
gctagccgtaggtcgtgtgacccgcaggcaccgggagatccagaagtgaaacgccaggctctctggaggccaggagatgactctgttgacgttcagggatgtggccatagaattctccctggaggagtggaaatgcctggacctcgctcagcagaatttgtacagggatgtgatgttggagaactacagaaacttgttctccgttggtctcactgtctgtaagccaggcctgatcacctgcctggagcaacgaaaagagccctggaatgtgaagagacaggaggcagcagacggacatccagagatgggatttcaccatgctactcaggcttgtcttgaactcctgggctcaagcgatctgcctgcctcagcctcccaaagtgctgggattacaggtgtgaaccaccgtgcccagccaggcctcaatgtttctgtggacaaattcactgctatgtcttctcattttacccaagaccttctgccagagcagggcatacaagatgcattcccaaaaagaatactgagaggatatggaaattgtggccttgataatttatatttaaggaaagactgggaaagtttagatgagtgtaagttgcaaaaagattataatggacttaaccaatgttcatcaactacccatagcaaaatctttcaatataataaatatgttaaaatctttgataacttttcaaatttacatagacgtaatataagtaatactggagagaaacctttcaaatgtcaagaatgtggcaaatcctttcaaatgctctcattcctaactgaacatcagaaaattcacactggaaaaaaattccaaaaatgtggagaatgtggcaaaacctttatccagtgctcacactttactgaacctgagaacattgacactggagagaaaccttacaagtgtcaagaatgtaacaacgtcattaaaacttgctcagtccttactaaaaatagaatttatgccggaggggaacattacagatgtgaagaatttggcaaagtatttaaccagtgctcccaccttactgaacatgagcatggtactgaggaaaaaccctgcaaatatgaagagtgcagcagtgtctttatctcttgctcaagcctttctaatcaacagatgattcttgctggagagaagctctccaaatgtgaaacatggtacaaaggttttaaccacagcccaaatccttccaaacaccagagaaatgagattggagggaaacctttcaaatgtgaggaatgtgacagcatcttcaagtggttctcagaccttactaaacataagagaattcacactggtgagaaaccatacaaatgtgacgaatgtgggaaagcctatacacagtcctcacacctcagtgaacacaggaggattcacaccggagagaaaccctaccaatgtgaagaatgtgggaaggtcttcagaacttgctcaagcctttctaaccataagagaactcattctgaagaaaaaccctacacgtgtgaagaatgtggcaacatctttaagcagttatcagacctcactaagcataagaaaacccatactggagagaagccctacaaatgtgacgaatgtggaaaaaactttacccagtcctccaaccttattgtacataagagaattcatactggagagaaaccctacaagtgtgaagaatgtggcagagtcttcatgtggttctcagacattaccaaacataagaaaacccatactggagagaaaccctacaaatgtgacgaatgtggaaaaaactttacccagtcctcaaaccttattgtacataagagaattcatactggagagaaaccctacaagtgtgaaaagtgtggcaaagccttcacccagttctcacacctgactgtacatgaaagcattcatacttgagaaaaaaataaacaaatataaaaataggcaaagccgttagtatctgctcgcatcccactttacatcagagttcagacttaataaagttatcataaatgtaattactattgaaagacctttcatg

SEQ ID NO: 34945 - DNA, 2023 bp, Homo sapiens
  source 1..2023: mol_type = unassigned DNA
atggctggtgctcagactctgttgacgttcagggatgtggccatagaattctccctggaggagtggaaatgcctggacctcgctcagcagaatttgtacagggatgtgatgttggagaactacagaaacttgttctccgttggtctcactgtctgtaagccaggcctgatcacctgcctggagcaacgaaaagagccctggaatgtgaagagacaggaggcagcagacggacatccagctatgtcttctcattttacccaagaccttctgccagagcagggcatacaagatgcattcccaaaaagaatactgagaggatatggaaattgtggccttgataatttatatttaaggaaagactgggaaagtttagatgagtgtaagttgcaaaaagattataatggacttaaccaatgttcatcaactacccatagcaaaatctttcaatataataaatatgttaaaatctttgataacttttcaaatttacatagacgtaatataagtaatactggagagaaacctttcaaatgtcaagaatgtggcaaatcctttcaaatgctctcattcctaactgaacatcagaaaattcacactggaaaaaaattccaaaaatgtggagaatgtggcaaaacctttatccagtgctcacactttactgaacctgagaacattgacactggagagaaaccttacaagtgtcaagaatgtaacaacgtcattaaaacttgctcagtccttactaaaaatagaatttatgccggaggggaacattacagatgtgaagaatttggcaaagtatttaaccagtgctcccaccttactgaacatgagcatggtactgaggaaaaaccctgcaaatatgaagagtgcagcagtgtctttatctcttgctcaagcctttctaatcaacagatgattcttgctggagagaagctctccaaatgtgaaacatggtacaaaggttttaaccacagcccaaatccttccaaacaccagagaaatgagattggagggaaacctttcaaatgtgaggaatgtgacagcatcttcaagtggttctcagaccttactaaacataagagaattcacactggtgagaaaccatacaaatgtgacgaatgtgggaaagcctatacacagtcctcacacctcagtgaacacaggaggattcacaccggagagaaaccctaccaatgtgaagaatgtgggaaggtcttcagaacttgctcaagcctttctaaccataagagaactcattctgaagaaaaaccctacacgtgtgaagaatgtggcaacatctttaagcagttatcagacctcactaagcataagaaaacccatactggagagaagccctacaaatgtgacgaatgtggaaaaaactttacccagtcctccaaccttattgtacataagagaattcatactggagagaaaccctacaagtgtgaagaatgtggcagagtcttcatgtggttctcagacattaccaaacataagaaaacccatactggagagaaaccctacaaatgtgacgaatgtggaaaaaactttacccagtcctcaaaccttattgtacataagagaattcatactggagagaaaccctacaagtgtgaaaagtgtggcaaagccttcacccagttctcacacctgactgtacatgaaagcattcatacttgagaaaaaaataaacaaatataaaaataggcaaagccgttagtatctgctcgcatcccactttacatcagagttcagacttaataaagttatcataaatgtaattactattgaaagacctttcatgaaatataagtctccagagcacacaagagtatttcttctgaaaaaaatgttacaattatactagatggaagacttgcatcagttgcttaaactttcagaaaatttgtagagaaacccaacaaatctcataaatgtggaataacatttgttcaaaaatgatagcttagaaaacactagagttcatactaaaagatattttgcaaatacactaaat

SEQ ID NO: 34946 - DNA, 2970 bp, Homo sapiens
  source 1..2970: mol_type = unassigned DNA
cttcctgtccccgcggctctgtgtcccctgctagccgtaggtcgtgtgacccgcaggcaccgggagatccagaagtgaaacgccaggctctctggaggccaggagatgactctgttgacgttcagggatgtggccatagaattctccctggaggagtggaaatgcctggacctcgctcagcagaatttgtacagggatgtgatgttggagaactacagaaacttgttctccgttggtctcactgtctgtaagccaggcctgatcacctgcctggagcaacgaaaagagccctggaatgtgaagagacaggaggcagcagacggacatccagctatgtcttctcattttacccaagaccttctgccagagcagggcatacaagatgcattcccaaaaagaatactgagaggatatggaaattgtggccttgataatttatatttaaggaaagactgggaaagtttagatgagtgtaagttgcaaaaagattataatggacttaaccaatgttcatcaactacccatagcaaaatctttcaatataataaatatgttaaaatctttgataacttttcaaatttacatagacgtaatataagtaatactggagagaaacctttcaaatgtcaagaatgtggcaaatcctttcaaatgctctcattcctaactgaacatcagaaaattcacactggaaaaaaattccaaaaatgtggagaatgtggcaaaacctttatccagtgctcacactttactgaacctgagaacattgacactggagagaaaccttacaagtgtcaagaatgtaacaacgtcattaaaacttgctcagtccttactaaaaatagaatttatgccggaggggaacattacagatgtgaagaatttggcaaagtatttaaccagtgctcccaccttactgaacatgagcatggtactgaggaaaaaccctgcaaatatgaagagtgcagcagtgtctttatctcttgctcaagcctttctaatcaacagatgattcttgctggagagaagctctccaaatgtgaaacatggtacaaaggttttaaccacagcccaaatccttccaaacaccagagaaatgagattggagggaaacctttcaaatgtgaggaatgtgacagcatcttcaagtggttctcagaccttactaaacataagagaattcacactggtgagaaaccatacaaatgtgacgaatgtgggaaagcctatacacagtcctcacacctcagtgaacacaggaggattcacaccggagagaaaccctaccaatgtgaagaatgtgggaaggtcttcagaacttgctcaagcctttctaaccataagagaactcattctgaagaaaaaccctacacgtgtgaagaatgtggcaacatctttaagcagttatcagacctcactaagcataagaaaacccatactggagagaagccctacaaatgtgacgaatgtggaaaaaactttacccagtcctccaaccttattgtacataagagaattcatactggagagaaaccctacaagtgtgaagaatgtggcagagtcttcatgtggttctcagacattaccaaacataagaaaacccatactggagagaaaccctacaaatgtgacgaatgtggaaaaaactttacccagtcctcaaaccttattgtacataagagaattcatactggagagaaaccctacaagtgtgaaaagtgtggcaaagccttcacccagttctcacacctgactgtacatgaaagcattcatacttgagaaaaaaataaacaaatataaaaataggcaaagccgttagtatctgctcgcatcccactttacatcagagttcagacttaataaagttatcataaatgtaattactattgaaagacctttcatgaaatataagtctccagagcacacaagagtatttcttctgaaaaaaatgttacaattatactagatggaagacttgcatcagttgcttaaactttcagaaaatttgtagagaaacccaacaaatctcataaatgtggaataacatttgttcaaaaatgatagcttagaaaacactagagttcatactaaaagatattttgcaaatacactaaatgggaaaaataagcaaggacacgttcagaaatgacactgaatccctgtgttgagtctacagagacatctagacttaaaatagatcatttatatttaagtttaaaaggaggatgagactgagtttttgtagagttataattacattcaaaatatacttttttgcattgaaaaaatgttaaatttttgaaaagcgaatattgatgtcattctattctcaaatcagtagatgctgtgtcttcatttctagtgctgatgtgaaaacacatggtcagttgttgctgcgtcagagatatgagaaattcttttctcttaggtgtgcatcactgatatacttgtccgtgaaaggtgaaagacactgaaatgtaagatgcgtgagtaaaatcttggtagagaggctctttgtggttgttttatatacttgtaagtgatttatgagataggtgtttagaataatactcttctgttagggtcaccctgatcagaccgttcccttcccctcccacaggacttacaatacggtcccttgtgctctctgcacagctaccccagggcaaaaaacaaaccccccttcactgatccctccagtaactgtgcagacagttacaggatgcggttaacatgtctgttcacctcgcataacaaagctggcaaaaaacatctccaggatgcagacaagacacctgcaccctcgactaagctcccccaccccaacccagttctcctgcacccccaactcagctcccgcaccccgacctagttctggccctataaaaacctgctatagtctgtaagcagggctgcctcctctaactgtggtggagcagccaagcagctcaataaagcttgcttgcctga

SEQ ID NO: 34947 - DNA, 2369 bp, Homo sapiens
  source 1..2369: mol_type = unassigned DNA
cctttgtcccgacagagctccacttcctgtccccgcggctctgtgtcccctgctagccgtaggtcgtgtgacccgcaggcaccgggagatccagaagtgaaacgccaggctctctggaggccaggagatgactctgttgacgttcagggatgtggccatagaattctccctggaggagtggaaatgcctggacctcgctcagcagaatttgtacagggatgtgatgttggagaactacagaaacttgttctccgttggtctcactgtctgtaagccaggcctgatcacctgcctggagcaacgaaaagagccctggaatgtgaagagacaggaggcagcagacggacatccagagatgggatttcaccatgctactcaggcttgtcttgaactcctgggctcaagcgatctgcctgcctcagcctcccaaagtgctgggattacaggtgtgaaccaccgtgcccagccaggcctcaatgtttctgtggacaaattcactgcactgtgctcacctggggtgctgcaaactgtgaaatggtttttagagttcagatgcatcttctcactagctatgtcttctcattttacccaagaccttctgccagagcagggcatacaagatgcattcccaaaaagaatactgagaggatatggaaattgtggccttgataatttatatttaaggaaagactgggaaagtttagatgagtgtaagttgcaaaaagattataatggacttaaccaatgttcatcaactacccatagcaaaatctttcaatataataaatatgttaaaatctttgataacttttcaaatttacatagacgtaatataagtaatactggagagaaacctttcaaatgtcaagaatgtggcaaatcctttcaaatgctctcattcctaactgaacatcagaaaattcacactggaaaaaaattccaaaaatgtggagaatgtggcaaaacctttatccagtgctcacactttactgaacctgagaacattgacactggagagaaaccttacaagtgtcaagaatgtaacaacgtcattaaaacttgctcagtccttactaaaaatagaatttatgccggaggggaacattacagatgtgaagaatttggcaaagtatttaaccagtgctcccaccttactgaacatgagcatggtactgaggaaaaaccctgcaaatatgaagagtgcagcagtgtctttatctcttgctcaagcctttctaatcaacagatgattcttgctggagagaagctctccaaatgtgaaacatggtacaaaggttttaaccacagcccaaatccttccaaacaccagagaaatgagattggagggaaacctttcaaatgtgaggaatgtgacagcatcttcaagtggttctcagaccttactaaacataagagaattcacactggtgagaaaccatacaaatgtgacgaatgtgggaaagcctatacacagtcctcacacctcagtgaacacaggaggattcacaccggagagaaaccctaccaatgtgaagaatgtgggaaggtcttcagaacttgctcaagcctttctaaccataagagaactcattctgaagaaaaaccctacacgtgtgaagaatgtggcaacatctttaagcagttatcagacctcactaagcataagaaaacccatactggagagaagccctacaaatgtgacgaatgtggaaaaaactttacccagtcctccaaccttattgtacataagagaattcatactggagagaaaccctacaagtgtgaagaatgtggcagagtcttcatgtggttctcagacattaccaaacataagaaaacccatactggagagaaaccctacaaatgtgacgaatgtggaaaaaactttacccagtcctcaaaccttattgtacataagagaattcatactggagagaaaccctacaagtgtgaaaagtgtggcaaagccttcacccagttctcacacctgactgtacatgaaagcattcatacttgagaaaaaaataaacaaatataaaaataggcaaagccgttagtatctgctcgcatcccactttacatcagagttcagacttaataaagttatcataaatgtaattactattgaaagacctttcatgaaatataagtctccagagcacacaagagtatttcttctgaaaaaaatgttacaattatactagatggaagacttgcatcagttgcttaaactttcagaaaatttgtagagaaacccaacaaatctcataaatgtggaataacatttgttcaaaaatgatagcttagaaaacactagagttcatactaaaagatattttgcaaatacactaaatgggaaaaataagcaa

SEQ ID NO: 34948 - DNA, 2389 bp, Homo sapiens
  source 1..2389: mol_type = unassigned DNA
aatcaggcacatgtctggagaggagaggacggcttccgggatctagcggggcctttgtcccgacagagctccacttcctgtccccgcggctctgtgtcccctgctagccgtaggtcgtgtgacccgcaggcaccgggagatccagaagtgaaacgccaggctctctggaggccaggagatggcacagacaccttaccagaatgtctttggtttgaggttccactttggaaacttgacagggtgatttgctctcagccaccctctggactttttcctcagtttcagtattgtccagggataacacaggatgcccaccatggccatgtctgctggagcatctagtgaatttcaggccctgggttatttctcagaggacagcctgaggtatgaagtgtggcctctccagggagcagctggatgccctgggctgagagaaatctcctggtctactcttcctctaaagaggtgtgatttgtccagagaatctttcctaagaggaaatcccagagaagcaggagaaagagaaagaaatggctggtgctcagactctgttgacgttcagggatgtggccatagaattctccctggaggagtggaaatgcctggacctcgctcagcagaatttgtacagggatgtgatgttggagaactacagaaacttgttctccgttggtctcactgtctgtaagccaggcctgatcacctgcctggagcaacgaaaagagccctggaatgtgaagagacaggaggcagcagacggacatccagctatgtcttctcattttacccaagaccttctgccagagcagggcatacaagatgcattcccaaaaagaatactgagaggatatggaaattgtggccttgataatttatatttaaggaaagactgggaaagtttagatgagtgtaagttgcaaaaagattataatggacttaaccaatgttcatcaactacccatagcaaaatctttcaatataataaatatgttaaaatctttgataacttttcaaatttacatagacgtaatataagtaatactggagagaaacctttcaaatgtcaagaatgtggcaaatcctttcaaatgctctcattcctaactgaacatcagaaaattcacactggaaaaaaattccaaaaatgtggagaatgtggcaaaacctttatccagtgctcacactttactgaacctgagaacattgacactggagagaaaccttacaagtgtcaagaatgtaacaacgtcattaaaacttgctcagtccttactaaaaatagaatttatgccggaggggaacattacagatgtgaagaatttggcaaagtatttaaccagtgctcccaccttactgaacatgagcatggtactgaggaaaaaccctgcaaatatgaagagtgcagcagtgtctttatctcttgctcaagcctttctaatcaacagatgattcttgctggagagaagctctccaaatgtgaaacatggtacaaaggttttaaccacagcccaaatccttccaaacaccagagaaatgagattggagggaaacctttcaaatgtgaggaatgtgacagcatcttcaagtggttctcagaccttactaaacataagagaattcacactggtgagaaaccatacaaatgtgacgaatgtgggaaagcctatacacagtcctcacacctcagtgaacacaggaggattcacaccggagagaaaccctaccaatgtgaagaatgtgggaaggtcttcagaacttgctcaagcctttctaaccataagagaactcattctgaagaaaaaccctacacgtgtgaagaatgtggcaacatctttaagcagttatcagacctcactaagcataagaaaacccatactggagagaagccctacaaatgtgacgaatgtggaaaaaactttacccagtcctccaaccttattgtacataagagaattcatactggagagaaaccctacaagtgtgaagaatgtggcagagtcttcatgtggttctcagacattaccaaacataagaaaacccatactggagagaaaccctacaaatgtgacgaatgtggaaaaaactttacccagtcctcaaaccttattgtacataagagaattcatactggagagaaaccctacaagtgtgaaaagtgtggcaaagccttcacccagttctcacacctgactgtacatgaaagcattcatacttgagaaaaaaataaacaaatataaaaataggcaaagccgttagtatctgctcgcatcccactttacatcagagttcagacttaataaagttatcataaatgtaattactattgaaagacctttcatgaaatataagtctccagagcacacaagagtatttcttctgaaaaaaatgt

SEQ ID NO: 34949 - DNA, 2008 bp, Homo sapiens
  source 1..2008: mol_type = unassigned DNA
acttcctgtccccgcggctctgtgtcccctgctagccgtaggtcgtgtgacccgcaggcaccgggagatccagaagtgaaacgccaggctctctggaggccaggagatggtgtgatttgtccagagaatctttcctaagaggaaatcccagagaagcaggagaaagagaaagaaatggctggtgctcagactctgttgacgttcagggatgtggccatagaattctccctggaggagtggaaatgcctggacctcgctcagcagaatttgtacagggatgtgatgttggagaactacagaaacttgttctccgttggtctcactgtctgtaagccaggcctgatcacctgcctggagcaacgaaaagagccctggaatgtgaagagacaggaggcagcagacggacatccagagatgggatttcaccatgctactcaggcttgtcttgaactcctgggctcaagcgatctgcctgcctcagcctcccaaagtgctgggattacaggtgtgaaccaccgtgcccagccaggcctcaatgtttctgtggacaaattcactgctatgtcttctcattttacccaagaccttctgccagagcagggcatacaagatgcattcccaaaaagaatactgagaggatatggaaattgtggccttgataatttatatttaaggaaagactgggaaagtttagatgagtgtaagttgcaaaaagattataatggacttaaccaatgttcatcaactacccatagcaaaatctttcaatataataaatatgttaaaatctttgataacttttcaaatttacatagacgtaatataagtaatactggagagaaacctttcaaatgtcaagaatgtggcaaatcctttcaaatgctctcattcctaactgaacatcagaaaattcacactggaaaaaaattccaaaaatgtggagaatgtggcaaaacctttatccagtgctcacactttactgaacctgagaacattgacactggagagaaaccttacaagtgtcaagaatgtaacaacgtcattaaaacttgctcagtccttactaaaaatagaatttatgccggaggggaacattacagatgtgaagaatttggcaaagtatttaaccagtgctcccaccttactgaacatgagcatggtactgaggaaaaaccctgcaaatatgaagagtgcagcagtgtctttatctcttgctcaagcctttctaatcaacagatgattcttgctggagagaagctctccaaatgtgaaacatggtacaaaggttttaaccacagcccaaatccttccaaacaccagagaaatgagattggagggaaacctttcaaatgtgaggaatgtgacagcatcttcaagtggttctcagaccttactaaacataagagaattcacactggtgagaaaccatacaaatgtgacgaatgtgggaaagcctatacacagtcctcacacctcagtgaacacaggaggattcacaccggagagaaaccctaccaatgtgaagaatgtgggaaggtcttcagaacttgctcaagcctttctaaccataagagaactcattctgaagaaaaaccctacacgtgtgaagaatgtggcaacatctttaagcagttatcagacctcactaagcataagaaaacccatactggagagaagccctacaaatgtgacgaatgtggaaaaaactttacccagtcctccaaccttattgtacataagagaattcatactggagagaaaccctacaagtgtgaagaatgtggcagagtcttcatgtggttctcagacattaccaaacataagaaaacccatactggagagaaaccctacaaatgtgacgaatgtggaaaaaactttacccagtcctcaaaccttattgtacataagagaattcatactggagagaaaccctacaagtgtgaaaagtgtggcaaagccttcacccagttctcacacctgactgtacatgaaagcattcatacttgag

SEQ ID NO: 34950 - DNA, 579 bp, Homo sapiens
  source 1..579: mol_type = unassigned DNA
gtccccgcggctctgtgtcccctgctagccgtaggtcgtgtgacccgcaggcaccgggagatccagaagtgaaacgccaggctctctggaggccaggagatggcatattctcacgatgcaggtgtgatttgtccagagaatctttcctaagaggaaatcccagagaagcaggagaaagagaaagaaatggctggtgctcagactctgttgacgttcagggatgtggccatagaattctccctggaggagtggaaatgcctggacctcgctcagcagaatttgtacagggatgtgatgttggagaactacagaaacttgttctccgttggtctcactgtctgtaagccaggcctgatcacctgcctggagcaacgaaaagagccctggaatgtgaagagacaggaggcagcagacggacatccagctatgtcttctcattttacccaagaccttctgccagagcagggcatacaagatgcattcccaaaaagaatactgagaggatatggaaattgtggccttgataatttatatttaaggaaagactgggaaagtttagatgagtgtaagttgcaaaaa

SEQ ID NO: 34951 - DNA, 682 bp, Homo sapiens
  source 1..682: mol_type = unassigned DNA
gtcccctgctagccgtaggtcgtgtgacccgcaggcaccgggagatccagaagtgaaacgccaggctctctggaggccaggagatgtttcagtattgtccagggataacacaggatgcccaccatggccatgtctgctggagcatctagtgaatttcaggccctgggttatttctcagaggacagcctgaggtatgaagtgtggcctctccagggagcagctggatgccctgggctgagagaaatctcctggtctactcttcctctaaagaggtgtgatttgtccagagaatctttcctaagaggaaatcccagagaagcaggagaaagagaaagaaatggctggtgctcagactctgttgacgttcagggatgtggccatagaattctccctggaggagtggaaatgcctggacctcgctcagcagaatttgtacagggatgtgatgttggagaactacagaaacttgttctccgttggtctcactgtctgtaagccaggcctgatcacctgcctggagcaacgaaaagagccctggaatgtgaagagacaggaggcagcagacggacatccagagatgggatttcaccatgctactcaggcttgtcttgaactcctgggctcaagcgatctgcctgcctcagcctcccaaagtgctgggattacaggtgtgaaccaccgt

SEQ ID NO: 34952 - DNA, 2604 bp, Homo sapiens
  source 1..2604: mol_type = unassigned DNA
aacgccagctgactcgatttcgtctcggtcttccccagagctggacacgaggcaccatgatcagagagacacattccctgcggacggcgctcccatcggatactggagggacgcgacactagaggcaggcagtacttcagggtgaccataagtctcccaaacagccacaacggctcgctctcccagctaaggcgacagcgctgccattttggatcctgttcagccacgggaagccggcgtttgcacacattttcggacgtcatattaaagcgcaccggacgccgagacttctgggagatgaagtccttgcgaaggccccgcattgattgggagcgcagtcgccaggaccctgtgcgcaggcgcgttggtttcccgacctgaagaggcgccgtcttcccgggtcccgagcactctgtgccggaggactctgcccttgtccacaaggagagcacacaggagagaatggctgctgtgtctccgaccaccagatgccaggaatcagtgacattcgaagacgttgccgtggttttcacagatgaagagtggagtcgtctggtccccatacagagggacctctacaaggaggtgatgctggagaactataacagcattgtgtcattgggccttccagttcctcaacctgatgtgattttccaattgaagagaggggacaagccgtggatggtagatcttcatgggtctgaggagagagaatggccagagagtgtctctctagactgggaaactaagcctgagattcacgatgcttcagacaaaaaatcagaaggatcattgagggaatgccttggaaggcaaagtcctctgtgtcctaaatttgaagttcatacacccaatggcaggatgggaacagaaaagcaaagcccttcaggggagactcgtaagaaatccctctcccgggacaaaggcttgcggcggcgacggtcagccctgtccagggaaattctcactaaagagagacaccaggaatgcagtgactgtgggaagaccttttttgaccactcatccctcacccgccatcagaggactcacactggggagaagccctacgactgccgcgagtgtgggaaagccttcagccacaggagcagcctcagcagacatctgatgtcacacactggggagagcccctacgagtgcagtgtgtgctcaaaagccttctttgaccgttcgtccctaactgtccatcagcgaattcacactggagagaaaccctttcagtgcaacgagtgtggaaaagccttttttgaccgttcatcccttactcgacaccagagaattcacactggagaaagtccttatgaatgtcatcagtgtgggaaagcctttagccagaaaagtattcttactcgccatcagctaatccacactggcaggaagccttatgagtgtaacgagtgcgggaaagctttctatggtgtctcgtctctgaatagacatcagaaagctcatgctggggaccctcgctatcagtgtaacgagtgtggcaaagctttctttgaccgctcatcccttacacagcatcagaagatccacactggagacaagccatatgaatgcagcgaatgcgggaaagcctttagccagcggtgccggctcacgcggcatcagcgtgtccacacgggagagaagccctttgaatgcactgtgtgtgggaaagttttcagttcaaaatcttctgttattcaacatcaacggcgttacgccaaacagggaatagactgagttgggcaaaagcttgggtaggacaagaacttccatacaaatttgagatagatctcgcctgtcttaaagctgccatttgctcattctacccactctggctgccgttgtcctgtcctgcttctgcgccagagtgtttaataagcactcccttcctgctgtgttatagaactgtaggggaggccatggaaatgactctaaagatacaaaattttgaagaggtttgtcagacaataggatagatgttaggaggagacacacctcttgtctgagaacctaggccccaggtatcactgcactttaagaaactggaggctgcaacaggagggaaaggcagaatgatatcacagcagtactatttttttttttcagaacatttgttttgatggctgttagtccccctctcttggagcattttggggcactaatcttgttctcttgtgtcccagcttttagacctcttacttccactgctagtagctagcacttactgagcacctgcgatgaggtaaagactcagctaagggttttacaggaagtagattaattgatcctgtcaccaaccatatgaagtaggcactgttaccatctgcatctccagatgagcaccctgaggtttagagagattaaatcacttgcccaaggtgaaccagctggtaaaaggtgatgccaggtcttgaagacaggtccaccttcaaaatctattctctttaccattatgctcgatggtttgtttgttttataatttatgtatatgtattatcctctcaactagattgtaagcacttggaggtgtgacttacaggtctttgtatctcacacagtgccttgctaataggtgctcaataaatatttatatgagtg

SEQ ID NO: 34953 - DNA, 3888 bp, Homo sapiens
  source 1..3888: mol_type = unassigned DNA
tctcccaacgccagctgactcgatttcgtctcggtcttccccagagctggacacgaggcaccatgatcagagagacacattccctgcggacggcgctcccatcggatactggagggacgcgacactagaggcaggcagtacttcagggtgaccataagtctcccaaacagccacaacggctcgctctcccagctaaggcgacagcgctgccattttggatcctgttcagccacgggaagccggcgtttgcacacattttcggacgtcatattaaagcgcaccggacgccgagacttctgggagatgaagtccttgcgaaggccccgcattgattgggagcgcagtcgccaggaccctgtgcgcaggcgcgttggtttcccgacctgaagaggcgccgtcttcccgggtcccgagcactctgtgccggaggaatcagtgacattcgaagacgttgccgtggttttcacagatgaagagtggagtcgtctggtccccatacagagggacctctacaaggaggtgatgctggagaactataacagcattgtgtcattgggccttccagttcctcaacctgatgtgattttccaattgaagagaggggacaagccgtggatggtagatcttcatgggtctgaggagagagaatggccagagagtgtctctctagactgggaaactaagcctgagattcacgatgcttcagacaaaaaatcagaaggatcattgagggaatgccttggaaggcaaagtcctctgtgtcctaaatttgaagttcatacacccaatggcaggatgggaacagaaaagcaaagcccttcaggggagactcgtaagaaatccctctcccgggacaaaggcttgcggcggcgacggtcagccctgtccagggaaattctcactaaagagagacaccaggaatgcagtgactgtgggaagaccttttttgaccactcatccctcacccgccatcagaggactcacactggggagaagccctacgactgccgcgagtgtgggaaagccttcagccacaggagcagcctcagcagacatctgatgtcacacactggggagagcccctacgagtgcagtgtgtgctcaaaagccttctttgaccgttcgtccctaactgtccatcagcgaattcacactggagagaaaccctttcagtgcaacgagtgtggaaaagccttttttgaccgttcatcccttactcgacaccagagaattcacactggagaaagtccttatgaatgtcatcagtgtgggaaagcctttagccagaaaagtattcttactcgccatcagctaatccacactggcaggaagccttatgagtgtaacgagtgcgggaaagctttctatggtgtctcgtctctgaatagacatcagaaagctcatgctggggaccctcgctatcagtgtaacgagtgtggcaaagctttctttgaccgctcatcccttacacagcatcagaagatccacactggagacaagccatatgaatgcagcgaatgcgggaaagcctttagccagcggtgccggctcacgcggcatcagcgtgtccacacgggagagaagccctttgaatgcactgtgtgtgggaaagttttcagttcaaaatcttctgttattcaacatcaacggcgttacgccaaacagggaatagactgagttgggcaaaagcttgggtaggacaagaacttccatacaaatttgagatagatctcgcctgtcttaaagctgccatttgctcattctacccactctggctgccgttgtcctgtcctgcttctgcgccagagtgtttaataagcactcccttcctgctgtgttatagaactgtaggggaggccatggaaatgactctaaagatacaaaattttgaagaggtttgtcagacaataggatagatgttaggaggagacacacctcttgtctgagaacctaggccccaggtatcactgcactttaagaaactggaggctgcaacaggagggaaaggcagaatgatatcacagcagtactatttttttttttcagaacatttgttttgatggctgttagtccccctctcttggagcattttggggcactaatcttgttctcttgtgtcccagcttttagacctcttacttccactgctagtagctagcacttactgagcacctgcgatgaggtaaagactcagctaagggttttacaggaagtagattaattgatcctgtcaccaaccatatgaagtaggcactgttaccatctgcatctccagatgagcaccctgaggtttagagagattaaatcacttgcccaaggtgaaccagctggtaaaaggtgatgccaggtcttgaagacaggtccaccttcaaaatctattctctttaccattatgctcgatggtttgtttgttttataatttatgtatatgtattatcctctcaactagattgtaagcacttggaggtgtgacttacaggtctttgtatctcacacagtgccttgctaataggtgctcaataaatatttatatgagtgaatgacttttctacttaccaaattctctccattcagaacacctcttggatttgcatactttctctgaattcacagcccagcctatacttttatcatccccagctcccactcctggcagcagtagctttctaattccagttcttcctgctttattgaagagggatgtgctaagctgtggtacagtaacaagcccgcagagagctatgtctcccttaaaacctgacgggaaccattctgtcttattctatcctcattatttggaacatctggcttccaaagtcaccacaagggcggaagagaaagctagaggaatttgtaggatattttcttagacccaggcttacatcacttctgtccacatctaataagccagaacccagcacctagaagctaggaaagtaaacaagcacctcgaaagttggttaataccaagaacctctctcacagttatattttgcatactactgttaagccagtctttgcaaatgaccccttcctgcccatcactgccttcctcaagacctaaaatagctccctatttagtgaaaaattatctgaatatttaaggtctgccttaacgtgatccccattgctgaattttacctcctgactccaaaaactcttctcttccctgggcccagtcctatttttttttttttttttttttttgtgagacagagtctcactctgtcacccaggttggaatgcaatggcacaatctccgctcactgcaagctccgcctcccgggttcacgccattctcctgcctcagcctcccgaatagctgggactacaggtgcccgccaacacgcccggctaattttttgtatttttagtagagacggggtttcaccgtgttagccaggatggtctcaatctcctgacctcgtgatccgcccgcctcggcctcccaaagtgctgggattacagacgtaagtcaccgtgcccggcctatatttttattttattaaaggttaggcactagatgaccttgactctaggcatctgcattctcttgatctttgcttagggtgaagctcagaaaaggacttggttctgaaaggctgtctggaattagattgtcctacgtgattcccagtgaattgagatgaatttcctctggaagttcaagtcggattcgagaagctgaattaccaaacagaccctccccaacctactaacgaccctattactctgttcaccctagagcagacgaacggcagggaagacttgatctgtggacttttgaaagcaacttgaggaaaaacacataacagaatctataggtgtggacaatatgtgatattgctaaataatgtcaagtaggaaataaaagagactattgacaaa

SEQ ID NO: 34954 - DNA, 3740 bp, Homo sapiens
  source 1..3740: mol_type = unassigned DNA
tcttccccagagctggacacgaggcaccatgatcagagagacacattccctgcggacggcgctcccatcggatactggagggacgcgacactagaggcaggcagtacttcagggtgaccataagtctcccaaacagccacaacggctcgctctcccagctaaggcgacagcgctgccattttggatcctgttcagccacgggaagccggcgtttgcacacattttcggacgtcatattaaagcgcaccggacgccgagacttctgggagatgaagtccttgcgaaggccccgcattgattgggagcgcagtcgccaggaccctgtgcgcaggcgcgttggtttcccgacctgaagaggcgccgtcttcccgggtcccgagcactctgtgccggaggaatcagtgacattcgaagacgttgccgtggttttcacagatgaagagtggagtcgtctggtccccatacagagggacctctacaaggaggtgatgctggagaactataacagcattgtgtcattggactgggaaactaagcctgagattcacgatgcttcagacaaaaaatcagaaggatcattgagggaatgccttggaaggcaaagtcctctgtgtcctaaatttgaagttcatacacccaatggcaggatgggaacagaaaagcaaagcccttcaggggagactcgtaagaaatccctctcccgggacaaaggcttgcggcggcgacggtcagccctgtccagggaaattctcactaaagagagacaccaggaatgcagtgactgtgggaagaccttttttgaccactcatccctcacccgccatcagaggactcacactggggagaagccctacgactgccgcgagtgtgggaaagccttcagccacaggagcagcctcagcagacatctgatgtcacacactggggagagcccctacgagtgcagtgtgtgctcaaaagccttctttgaccgttcgtccctaactgtccatcagcgaattcacactggagagaaaccctttcagtgcaacgagtgtggaaaagccttttttgaccgttcatcccttactcgacaccagagaattcacactggagaaagtccttatgaatgtcatcagtgtgggaaagcctttagccagaaaagtattcttactcgccatcagctaatccacactggcaggaagccttatgagtgtaacgagtgcgggaaagctttctatggtgtctcgtctctgaatagacatcagaaagctcatgctggggaccctcgctatcagtgtaacgagtgtggcaaagctttctttgaccgctcatcccttacacagcatcagaagatccacactggagacaagccatatgaatgcagcgaatgcgggaaagcctttagccagcggtgccggctcacgcggcatcagcgtgtccacacgggagagaagccctttgaatgcactgtgtgtgggaaagttttcagttcaaaatcttctgttattcaacatcaacggcgttacgccaaacagggaatagactgagttgggcaaaagcttgggtaggacaagaacttccatacaaatttgagatagatctcgcctgtcttaaagctgccatttgctcattctacccactctggctgccgttgtcctgtcctgcttctgcgccagagtgtttaataagcactcccttcctgctgtgttatagaactgtaggggaggccatggaaatgactctaaagatacaaaattttgaagaggtttgtcagacaataggatagatgttaggaggagacacacctcttgtctgagaacctaggccccaggtatcactgcactttaagaaactggaggctgcaacaggagggaaaggcagaatgatatcacagcagtactatttttttttttcagaacatttgttttgatggctgttagtccccctctcttggagcattttggggcactaatcttgttctcttgtgtcccagcttttagacctcttacttccactgctagtagctagcacttactgagcacctgcgatgaggtaaagactcagctaagggttttacaggaagtagattaattgatcctgtcaccaaccatatgaagtaggcactgttaccatctgcatctccagatgagcaccctgaggtttagagagattaaatcacttgcccaaggtgaaccagctggtaaaaggtgatgccaggtcttgaagacaggtccaccttcaaaatctattctctttaccattatgctcgatggtttgtttgttttataatttatgtatatgtattatcctctcaactagattgtaagcacttggaggtgtgacttacaggtctttgtatctcacacagtgccttgctaataggtgctcaataaatatttatatgagtgaatgacttttctacttaccaaattctctccattcagaacacctcttggatttgcatactttctctgaattcacagcccagcctatacttttatcatccccagctcccactcctggcagcagtagctttctaattccagttcttcctgctttattgaagagggatgtgctaagctgtggtacagtaacaagcccgcagagagctatgtctcccttaaaacctgacgggaaccattctgtcttattctatcctcattatttggaacatctggcttccaaagtcaccacaagggcggaagagaaagctagaggaatttgtaggatattttcttagacccaggcttacatcacttctgtccacatctaataagccagaacccagcacctagaagctaggaaagtaaacaagcacctcgaaagttggttaataccaagaacctctctcacagttatattttgcatactactgttaagccagtctttgcaaatgaccccttcctgcccatcactgccttcctcaagacctaaaatagctccctatttagtgaaaaattatctgaatatttaaggtctgccttaacgtgatccccattgctgaattttacctcctgactccaaaaactcttctcttccctgggcccagtcctatttttttttttttttttttttttgtgagacagagtctcactctgtcacccaggttggaatgcaatggcacaatctccgctcactgcaagctccgcctcccgggttcacgccattctcctgcctcagcctcccgaatagctgggactacaggtgcccgccaacacgcccggctaattttttgtatttttagtagagacggggtttcaccgtgttagccaggatggtctcaatctcctgacctcgtgatccgcccgcctcggcctcccaaagtgctgggattacagacgtaagtcaccgtgcccggcctatatttttattttattaaaggttaggcactagatgaccttgactctaggcatctgcattctcttgatctttgcttagggtgaagctcagaaaaggacttggttctgaaaggctgtctggaattagattgtcctacgtgattcccagtgaattgagatgaatttcctctggaagttcaagtcggattcgagaagctgaattaccaaacagaccctccccaacctactaacgaccctattactctgttcaccctagagcagacgaacggcagggaagacttgatctgtggacttttgaaagcaacttgaggaaaaacacataacagaatctataggtgtggacaatatgtgatattgctaaataatgtcaagtaggaaataaaagagactattgacaaa

SEQ ID NO: 34955 - DNA, 1468 bp, Homo sapiens
  source 1..1468: mol_type = unassigned DNA
gaagaggcgccgtcttcccgggtcccgagcactctgtgccggaggactctgcccttgtccacaaggagagcacacaggagagaatggctgctgtgtctccgaccaccagatgccaggaatcagtgacattcgaagacgttgccgtggttttcacagatgaagagtggagtcgtctggtccccatacagagggacctctacaaggaggtgatgctggagaactataacagcattgtgtcattgggccttccagttcctcaacctgatgtgattttccaattgaagagaggggacaagccgtggatggtagatcttcatgggtctgaggagagagaatggccagagagtgtctctctagcccaggaaaaaaactgcatctgttttctgtttgttccagactgggaaactaagcctgagattcacgatgcttcagacaaaaaatcagaaggatcattgagggaatgccttggaaggcaaagtcctctgtgtcctaaatttgaagttcatacacccaatggcaggatgggaacagaaaagcaaagcccttcaggggagactcgtaagaaatccctctcccgggacaaaggcttgcggcggcgacggtcagccctgtccagggaaattctcactaaagagagacaccaggaatgcagtgactgtgggaagaccttttttgaccactcatccctcacccgccatcagaggactcacactggggagaagccctacgactgccgcgagtgtgggaaagccttcagccacaggagcagcctcagcagacatctgatgtcacacactggggagagcccctacgagtgcagtgtgtgctcaaaagccttctttgaccgttcgtccctaactgtccatcagcgaattcacactggagagaaaccctttcagtgcaacgagtgtggaaaagccttttttgaccgttcatcccttactcgacaccagagaattcacactggagaaagtccttatgaatgtcatcagtgtgggaaagcctttagccagaaaagtattcttactcgccatcagctaatccacactggcaggaagccttatgagtgtaacgagtgcgggaaagctttctatggtgtctcgtctctgaatagacatcagaaagctcatgctggggaccctcgctatcagtgtaacgagtgtggcaaagctttctttgaccgctcatcccttacacagcatcagaagatccacactggagacaagccatatgaatgcagcgaatgcgggaaagcctttagccagcggtgccggctcacgcggcatcagcgtgtccacacgggagagaagccctttgaatgcactgtgtgtgggaaagttttcagttcaaaatcttctgttattcaacatcaacggcgttacgccaaacagggaatagactgagttgggcaaaagcttgggtaggacaagaacttccatacaaatttgagatagatctcgcctgtctt

SEQ ID NO: 34956 - DNA, 2316 bp, Homo sapiens
  source 1..2316: mol_type = unassigned DNA
ctactccgagaggccccgggtccctctgccacaacttctgtcgctctgccgcctgcaccgtgacccgcactattcacgggagccctagagaggacaccgggacacccagaagccgggaaatgatgtttcaggattcagtggcctttgaggatgtggctgtcagcttcacccaggaggagtgggctttgctggatccttcccagaagaatctctacagggatgtgatgcaggaaaccttcaagaacctgacctctgtaggaaaaacatggaaagttcagaacattgaagatgagtacaaaaatcccaggagaaatctaagtcttatgagagagaaactctgtgaaagtaaagaaagtcatcactgtggagaaagcttcaaccagattgcagatgacatgctgaacaggaaaactcttcctggaataacaccatgtgaaagcagtgtgtgtggagaagttggcacgggtcattcatctcttaatacgcatatcagagctgacactggacacaagtcatctgagtatcaggaatatggagagaatccatatagaaataaggaatgtaagaaagccttcagttatcttgactcctttcaatcacatgataaagcttgcactaaagagaaaccctatgatggtaaagaatgtacagaaaccttcatttcccattcatgcattcaaagacacagggtaatgcacagtggagatggaccttataaatgtaagttttgtgggaaagccttctattttctcaatttatgtcttatccatgaacgaattcacactggtgtgaaaccatataagtgtaaacaatgtggtaaggcctttactcgttccactacccttccagtacatgaaagaactcacacaggagtgaatgccgatgaatgtaaagaatgtgggaatgcattcagttttcctagtgaaattcgtagacataaaaggtctcacactggagaaaaaccctatgagtgtaagcaatgtgggaaagtcttcatttctttcagttccattcagtatcataagatgactcacactggagagaaaccctatgaatgtaagcagtgtgggaaagcctttagatgtggctcacaccttcaaaagcatggaaggactcacactggagagaaaccctatgaatgtaggcaatgtggtaaagccttcagatgtacctcggaccttcaaaggcatgaaaagacacacactgaggataaaccctatggatgtaagcagtgtgggaaaggctttagatgtgcttcacaacttcaaattcatgaaaggacgcacagtggagagaaaccccatgaatgtaaggaatgtggaaaagtattcaagtatttttcttccttgcgtatacatgaaaggacgcacactggagagaagccccatgaatgtaagcaatgtggaaaagcattcaggtatttctcttccttgcatatacatgaaaggacacacactggagataagccatatgagtgtaaggtatgtggcaaagccttcacttgttccagttccattcgatatcatgaaaggactcacactggagagaaaccctatgaatgtaagcactgtggtaaggcctttatttccaattacattcgatatcatgaaaggactcacactggagagaaaccctatcaatgcaagcaatgtggcaaagcctttattgtgccagttcatgtcgagaacatgaaagaactcataccattaatagatgagaaatccttttagtggaagcaacgggagaagctttctgttgtcccacttcctttgaaacacaagaaaagagagtggtgaaagaacctctggataactgctttttgaattgagaagagagacttgcgataggacaataaaatctagaagaacttggatggtttcgtaatacaattcacctatagccaatcttgcatgagatttcaaaggcacagaaaaggaaggcatcagtcacatattagaggccccacacagggagagaggtgtgtggctacccgcttccagcccattttcctgattctttggcttgttaatcgagaatatcccccaaatcacttgtctctgttcctcagagttgtaggtctccagatatgtccccagtgctccacattaaagatacatgcccactttgctgtttcttcagaaatgttaaaatgtttaccagagaactaataaatgttgttatggctggaaatactcactgatgcccaactcttctatagattgagttggtttaagaggtctactttgtattgcaagcattgttgtttctacggattagcgagcctgttcttgattaaaccaactagatgggagcttg

SEQ ID NO: 34957 - DNA, 3061 bp, Homo sapiens
  source 1..3061: mol_type = unassigned DNA
agaagcgccggggcggagcccggccaacggtccgtccggaaggaggaggcccattccagcttctacttttgttgctatgcaggttgttgtcgggataccagatttcctactccgagaggccccgggtccctctgccacaacttctgtcgctctgccgcctgcaccgtgacccgcactattcacgggagccctagagaggacaccgggacacccagaagccgggaaatgatgtttcaggattcagtggcctttgaggatgtggctgtcagcttcacccaggaggagtgggctttgctggatccttcccagaagaatctctacagggatgtgatgcaggaaaccttcaagaacctgacctctgtaggaaaaacatggaaagttcagaacattgaagatgagtacaaaaatcccaggagaaatctaagtcttatgagagagaaactctgtgaaagtaaagaaagtcatcactgtggagaaagcttcaaccagattgcagatgacatgctgaacaggaaaactcttcctggaataacaccatgtgaaagcagtgtgtgtggagaagttggcacgggtcattcatctcttaatacgcatatcagagctgacactggacacaagtcatctgagtatcaggaatatggagagaatccatatagaaataaggaatgtaagaaagccttcagttatcttgactcctttcaatcacatgataaagcttgcactaaagagaaaccctatgatggtaaagaatgtacagaaaccttcatttcccattcatgcattcaaagacacagggtaatgcacagtggagatggaccttataaatgtaagttttgtgggaaagccttctattttctcaatttatgtcttatccatgaacgaattcacactggtgtgaaaccatataagtgtaaacaatgtggtaaggcctttactcgttccactacccttccagtacatgaaagaactcacacaggagtgaatgccgatgaatgtaaagaatgtgggaatgcattcagttttcctagtgaaattcgtagacataaaaggtctcacactggagaaaaaccctatgagtgtaagcaatgtgggaaagtcttcatttctttcagttccattcagtatcataagatgactcacactggagagaaaccctatgaatgtaagcagtgtgggaaagcctttagatgtggctcacaccttcaaaagcatggaaggactcacactggagagaaaccctatgaatgtaggcaatgtggtaaagccttcagatgtacctcggaccttcaaaggcatgaaaagacacacactgaggataaaccctatggatgtaagcagtgtgggaaaggctttagatgtgcttcacaacttcaaattcatgaaaggacgcacagtggagagaaaccccatgaatgtaaggaatgtggaaaagtattcaagtatttttcttccttgcgtatacatgaaaggacgcacactggagagaagccccatgaatgtaagcaatgtggaaaagcattcaggtatttctcttccttgcatatacatgaaaggacacacactggagataagccatatgagtgtaaggtatgtggcaaagccttcacttgttccagttccattcgatatcatgaaaggactcacactggagagaaaccctatgaatgtaagcactgtggtaaggcctttatttccaattacattcgatatcatgaaaggactcacactggagagaaaccctatcaatgcaagcaatgtggcaaagcctttattcgtgccagttcatgtcgagaacatgaaagaactcataccattaatagatgagaaatccttttagtggaagcaacgggagaagctttctgttgtcccacttcctttgaaacacaagaaaagagagtggtgaaagaacctctggataactgctttttgaattgagaagagagacttgcgataggacaataaaatctagaagaacttggatggtttcgtaatacaattcacctatagccaatcttgcatgagatttcaaaggcacagaaaaggaaggcatcagtcacatattagaggccccacacagggagagaggtgtgtggctacccgcttccagcccattttcctgattctttggcttgttaatcgagaatatcccccaaatcacttgtctctgttcctcagagttgtaggtctccagatatgtccccagtgctccacattaaagatacatgcccactttgctgtttcttcagaaatgttaaaatgtttaccagagaactaataaatgttgttatggctggaaatactcactgatgcccaactcttctatagattgagttggtttaagaggtctactttgtattgcaagcattgttgtttctacggattagcgagcctgttcttgattaaaccaactagatgggagcttgttcctctgctgcattgtgcagtgattggtctcaccaagggcttttatgtgagaagagccaccttgctcttatcaggaaatttcaagcatttgctgttattcacaactgaatgtaatgtctcacttcgtttttaactttgtatgagtatacctgactaaaaacactaatgcggtttcttggcaacaaatacttctgttcatgtattttagaaataagcttattaactgtttataacaactgcatactaacaattattattttttaatgaagaagctacattacaacctcccattaacatcatgtattagatcaagttgataatgttaccatgttatccggtggtcactgtgagtcagtgttgccatgtggatgtcaggcatatttttcctcatgtagattttacttttcatgcttatattcttagtttttatctggatcatgaattttcatctattctaaataccaaaggtgatctcatgttcttatgagtgacttctgaccaaagaccaccagtggcataagtgtcgtcaaagagggtgtaataatatactgtggtaatgaatatgaccaaaagccatagatgactgtgagatgtgtgagatattaaaagatagtcacatttcgtgagaagagaaaaa

SEQ ID NO: 34958 - DNA, 3082 bp, Homo sapiens
  source 1..3082: mol_type = unassigned DNA
gcagaaccacagagaggctacagccgtcctggcctccctccggccctgagagctcctctggcctgtctcaagtcttaacgtctcaagcgcagactgccggctccgaacggggagaccaggcttctgcaccggaaacaaggcaccggttgtgacgtcacagccgcagagcgcccgacttcccagaaggcaccgagtccctgccgttctcctcaactggcggcggcgcgaacgaatagtcgccggcgacctcttggctctctggcagatttcctctagtaagaggtggctctggaggccccgcgaaacgagtgtggtgtgtggttgcaaggcatgatggctgcaaaagtggttcctatgcccccaaagccaaagcagtcctttatactgagagttccgccagactccaagctgggccaagacctacttcgagatgccactaacgggcccaagaccatccaccagctagtgctggagcacttcctcaccttcttgcccaagccaagcctggtccagcccagtcagaaagtcaaggagaccttggttattatgaaagatgtgagctcaagccttcagaacagagtgcatcctcgtcccttggtgaagcttctgcccaaaggagtccaaaaggaacaagagacagtgtctctgtatttgaaagctaaccctgagctggtggtctttgaggatttgaatgtatttcactgccaggaagaatgtgtgagcttggatcctactcaacaactcacgtcagagaaggaagatgacagcagtgtcggggaaatgatgttactggcagtcaatggcagtaatcctgaaggtgaagatcctgagagggaacctgtagaaaatgaagattatagagaaaagtcttcagatgatgatgaaatggattcttccttggtctctcagcagcctcccgataaccaggaaaaggaacgactaaatacatccattccacaaaaaaggaaaatgagaaatctgttagttaccattgagaatgatactcctctagaggaactctcaaaatatgtagacatcagtattattgcccttactcgaaatcggaggacaaggagatggtacacttgtccactgtgtgggaaacagtttaatgaaagttcttacctcatttcccaccagaggacccacactggagaaaaaccctatgactgtaatcactgtgggaaaagcttcaatcataaaacaaacctcaataaacatgagcgaattcatacaggagagaaaccttattcctgttctcagtgtggaaaaaacttccgtcagaattctcatcggagtcgtcatgaaggaatccatataagggagaagatatttaagtgtccagaatgtgggaaaaccttcccaaagaatgaggagtttgtgcttcatctgcagagtcatgaggctgagagaccatatggttgcaaaaaatgtgggagaagatttggtcggctgtcaaactgtacccggcatgagaaaacccactcagcctgtaagacccgaaagcagaagtaatactgggaaccctttctgggtctgatggtgctgcctcaacctgagagctttcataagtagttctgaattcccaagctgcctaaaaaggtataaatgtgtaaaaatctcattattgccaaaattggataaatgcccatcttagctaaaacctcaaattgctagaaaattcacagggaagaaaacatttcaagggctatacctcagcatctaggctttttggactaaggagctttcctttttgaagttatatgataatgtacaggtcacagatcccctttcccaacactttgaagatgaatctggagtctgcttacttggaaggcaaagagtgacttgtgtctattgaaagtatatccgttttccccccacatggggattcatacttgagaaatagtgcaaagatgcttatctggaactgtgttctggtgaaagaaccaaattactggcttgttagccaacagcttctgatagcaattcatataaccctctaagaatacctgtttaagtcttgagtgttgaaaggaattgtttactttggaatataggaaaacagttgaatgtcagactctcatttgtatgtgatctaaatttgcaatcaatttcaataatatttacaatttgtgataaaactgacttttacagattccttttcacaacataatttaggtgtctactgttcttattgtattttgttctgctgttgatctctccagcagccgtctcatgcttctcccttgctaaaagaagtttggattactcaggcagggccatccagccccaccactagaaaagctcttcagaatcttgtccctctgttgagcccagatctcatgtgctacgaaggaaaccccaagacccagagaggaagggtcaacctggaggcaggaaaaagttggcttggatccatgtctcatcaataaccttaccatatgcttaggtcccctctatgctgtcatcagacctttggcaatggggtggtcactacctcacaaggcaaagtgttgtatgattagaaattacgtctccagtggttagctcacattgcctctcaagagacaggtttccaggtgtcttcattgtagtgggtattaattgtcttcagcctcttgatatccataccttcctgtcctctgcctagaagcaaggccagcggtgcctttacggactgatcgtgtggtgcgatttagggattcttcagttttgcttgctttaggtttccaaaagttatacattggtgttttgattggaataaagaaatcctataagctatttgggaaaaattatagtgtatgtttcccatccagaaacatgcctttctatttattagagtattatattcctgtgaaaatttttctaattttcttcacttgttttacacaattttgttattgtagttttttccattatatttttatagttgattattgcttttacatgggaaagttatttttaattatatatttgtatagtcatctcactgttgttaattttcaatagtttgttggtttagttctgttaacttttggtaaaatgacaccatctacaaagaatagtttttgtttcttgc

SEQ ID NO: 34959 - DNA, 3025 bp, Homo sapiens
  source 1..3025: mol_type = unassigned DNA
ggcaccgagtccctgccgttctcctcaactggcggcggcgcgaacgaatagtcgccggcgacctgtgagggcactcggaagggcgaggggagggctcgaccgctcgcgcctagtttttctatctctcccggagcctgagtctctgagccgtccccagcaaacgctcaggggctgcagaggccccgagagcttggctctctggcagatttcctctagtaagaggtggctctggaggccccgcgaaacgagtgtggtgtgtggttgcaaggcatgatggctgcaaaagtggttcctatgcccccaaagccaaagcagtcctttatactgagagttccgccagactccaagctgggccaagacctacttcgagatgccactaacgggcccaagaccatccaccagctagtgctggagcacttcctcaccttcttgcccaagccaagcctggtccagcccagtcagaaagtcaaggagaccttggttattatgaaagatgtgagctcaagccttcagaacagagtgcatcctcgtcccttggtgaagcttctgcccaaaggagtccaaaaggaacaagagacagtgtctctgtatttgaaagctaaccctgaggagctggtggtctttgaggatttgaatgtatttcactgccaggaagaatgtgtgagcttggatcctactcaacaactcacgtcagagaaggaagatgacagcagtgtcggggaaatgatgttactggcagtcaatggcagtaatcctgaaggtgaagatcctgagagggaacctgtagaaaatgaagattatagagaaaagtcttcagatgatgatgaaatggattcttccttggtctctcagcagcctcccgataaccaggaaaaggaacgactaaatacatccattccacaaaaaaggaaaatgagaaatctgttagttaccattgagaatgatactcctctagaggaactctcaaaatatgtagacatcagtattattgcccttactcgaaatcggaggacaaggagatggtacacttgtccactgtgtgggaaacagtttaatgaaagttcttacctcatttcccaccagaggacccacactggagaaaaaccctatgactgtaatcactgtgggaaaagcttcaatcataaaacaaacctcaataaacatgagcgaattcatacaggagagaaaccttattcctgttctcagtgtggaaaaaacttccgtcagaattctcatcggagtcgtcatgaaggaatccatataagggagaagatatttaagtgtccagaatgtgggaaaaccttcccaaagaatgaggagtttgtgcttcatctgcagagtcatgaggctgagagaccatatggttgcaaaaaatgtgggagaagatttggtcggctgtcaaactgtacccggcatgagaaaacccactcagcctgtaagacccgaaagcagaagtaatactgggaaccctttctgggtctgatggtgctgcctcaacctgagagctttcataagtagttctgaattcccaagctgcctaaaaaggtataaatgtgtaaaaatctcattattgccaaaattggataaatgcccatcttagctaaaacctcaaattgctagaaaattcacagggaagaaaacatttcaagggctatacctcagcatctaggctttttggactaaggagctttcctttttgaagttatatgataatgtacaggtcacagatcccctttcccaacactttgaagatgaatctggagtctgcttacttggaaggcaaagagtgacttgtgtctattgaaagtatatccgttttccccccacatggggattcatacttgagaaatagtgcaaagatgcttatctggaactgtgttctggtgaaagaaccaaattactggcttgttagccaacagcttctgatagcaattcatataaccctctaagaatacctgtttaagtcttgagtgttgaaaggaattgtttactttggaatataggaaaacagttgaatgtcagactctcatttgtatgtgatctaaatttgcaatcaatttcaataatatttacaatttgtgataaaactgacttttacagattccttttcacaacataatttaggtgtctactgttcttattgtattttgttctgctgttgatctctccagcagccgtctcatgcttctcccttgctaaaagaagtttggattactcaggcagggccatccagccccaccactagaaaagctcttcagaatcttgtccctctgttgagcccagatctcatgtgctacgaaggaaaccccaagacccagagaggaagggtcaacctggaggcaggaaaaagttggcttggatccatgtctcatcaataaccttaccatatgcttaggtcccctctatgctgtcatcagacctttggcaatggggtggtcactacctcacaaggcaaagtgttgtatgattagaaattacgtctccagtggttagctcacattgcctctcaagagacaggtttccaggtgtcttcattgtagtgggtattaattgtcttcagcctcttgatatccataccttcctgtcctctgcctagaagcaaggccagcggtgcctttacggactgatcgtgtggtgcgatttagggattcttcagttttgcttgctttaggtttccaaaagttatacattggtgttttgattggaataaagaaatcctataagctatttgggaaaaattatagtgtatgtttcccatccagaaacatgcctttctatttattagagtattatattcctgtgaaaatttttctaattttcttcacttgttttacacaattttgttattgtagttttttccattatatttttatagttgattattgcttttacatgggaaagttatttttaattatatatttgtatagtcatctcactgttgttaattttcaatagtttgttggtttagttctgttaacttttggtaaaatgacaccatctacaaagaatagtttttgtttcttgc

SEQ ID NO: 34960 - DNA, 3133 bp, Homo sapiens
  source 1..3133: mol_type = unassigned DNA
gccagcccgtcgtggatgactagagccaaccacctgccttccgtcttccaggcagaaccacagagaggctacagccgtcctggcctccctccggccctgagagctcctctggcctgtctcaagtcttaacgtctcaagcgcagactgccggctccgaacggggagaccaggcttctgcaccggaaacaaggcaccggttgtgacgtcacagccgcagagcgcccgacttcccagaaggcaccgagtccctgccgttctcctcaactggcggcggcgcgaacgaatagtcgccggcgacctcttggctctctggcagatttcctctagtaagaggtggctctggaggccccgcgaaacgagtgtggtgtgtggttgcaaggcatgatggctgcaaaagtggttcctatgcccccaaagccaaagcagtcctttatactgagagttccgccagactccaagctgggccaagacctacttcgagatgccactaacgggcccaagaccatccaccagctagtgctggagcacttcctcaccttcttgcccaagccaagcctggtccagcccagtcagaaagtcaaggagaccttggttattatgaaagatgtgagctcaagccttcagaacagagtgcatcctcgtcccttggtgaagcttctgcccaaaggagtccaaaaggaacaagagacagtgtctctgtatttgaaagctaaccctgaggagctggtggtctttgaggatttgaatgtatttcactgccaggaagaatgtgtgagcttggatcctactcaacaactcacgtcagagaaggaagatgacagcagtgtcggggaaatgatgttactggtcaatggcagtaatcctgaaggtgaagatcctgagagggaacctgtagaaaatgaagattatagagaaaagtcttcagatgatgatgaaatggattcttccttggtctctcagcagcctcccgataaccaggaaaaggaacgactaaatacatccattccacaaaaaaggaaaatgagaaatctgttagttaccattgagaatgatactcctctagaggaactctcaaaatatgtagacatcagtattattgcccttactcgaaatcggaggacaaggagatggtacacttgtccactgtgtgggaaacagtttaatgaaagttcttacctcatttcccaccagaggacccacactggagaaaaaccctatgactgtaatcactgtgggaaaagcttcaatcataaaacaaacctcaataaacatgagcgaattcatacaggagagaaaccttattcctgttctcagtgtggaaaaaacttccgtcagaattctcatcggagtcgtcatgaaggaatccatataagggagaagatatttaagtgtccagaatgtgggaaaaccttcccaaagaatgaggagtttgtgcttcatctgcagagtcatgaggctgagagaccatatggttgcaaaaaatgtgggagaagatttggtcggctgtcaaactgtacccggcatgagaaaacccactcagcctgtaagacccgaaagcagaagtaatactgggaaccctttctgggtctgatggtgctgcctcaacctgagagctttcataagtagttctgaattcccaagctgcctaaaaaggtataaatgtgtaaaaatctcattattgccaaaattggataaatgcccatcttagctaaaacctcaaattgctagaaaattcacagggaagaaaacatttcaagggctatacctcagcatctaggctttttggactaaggagctttcctttttgaagttatatgataatgtacaggtcacagatcccctttcccaacactttgaagatgaatctggagtctgcttacttggaaggcaaagagtgacttgtgtctattgaaagtatatccgttttccccccacatggggattcatacttgagaaatagtgcaaagatgcttatctggaactgtgttctggtgaaagaaccaaattactggcttgttagccaacagcttctgatagcaattcatataaccctctaagaatacctgtttaagtcttgagtgttgaaaggaattgtttactttggaatataggaaaacagttgaatgtcagactctcatttgtatgtgatctaaatttgcaatcaatttcaataatatttacaatttgtgataaaactgacttttacagattccttttcacaacataatttaggtgtctactgttcttattgtattttgttctgctgttgatctctccagcagccgtctcatgcttctcccttgctaaaagaagtttggattactcaggcagggccatccagccccaccactagaaaagctcttcagaatcttgtccctctgttgagcccagatctcatgtgctacgaaggaaaccccaagacccagagaggaagggtcaacctggaggcaggaaaaagttggcttggatccatgtctcatcaataaccttaccatatgcttaggtcccctctatgctgtcatcagacctttggcaatggggtggtcactacctcacaaggcaaagtgttgtatgattagaaattacgtctccagtggttagctcacattgcctctcaagagacaggtttccaggtgtcttcattgtagtgggtattaattgtcttcagcctcttgatatccataccttcctgtcctctgcctagaagcaaggccagcggtgcctttacggactgatcgtgtggtgcgatttagggattcttcagttttgcttgctttaggtttccaaaagttatacattggtgttttgattggaataaagaaatcctataagctatttgggaaaaattatagtgtatgtttcccatccagaaacatgcctttctatttattagagtattatattcctgtgaaaatttttctaattttcttcacttgttttacacaattttgttattgtagttttttccattatatttttatagttgattattgcttttacatgggaaagttatttttaattatatatttgtatagtcatctcactgttgttaattttcaatagtttgttggtttagttctgttaacttttggtaaaatgacaccatctacaaagaatagtttttgtttcttgc

SEQ ID NO: 34961 - DNA, 3303 bp, Homo sapiens
  source 1..3303: mol_type = unassigned DNA
tttcccagcaggccctggggttagactggccgcagctggagaggtgccagcccgtcgtggatgactagagccaaccacctgccttccgtcttccaggcagaaccacagagaggctacagccgtcctggcctccctccggccctgagagctcctctggcctgtctcaagtcttaacgtctcaagcgcagactgccggctccgaacggggagaccaggcttctgcaccggaaacaaggcaccggttgtgacgtcacagccgcagagcgcccgacttcccagaaggcaccgagtccctgccgttctcctcaactggcggcggcgcgaacgaatagtcgccggcgacctgtgagggcactcggaagggcgaggggagggctcgaccgctcgcgcctagtttttctatctctcccggagcctgagtctctgagccgtccccagcaaacgctcaggggctgcagaggccccgagagcttggctctctggcagatttcctctagtaagaggtggctctggaggccccgcgaaacgagtgtggtgtgtggttgcaaggcatgatggctgcaaaagtggttcctatgcccccaaagccaaagcagtcctttatactgagagttccgccagactccaagctgggccaagacctacttcgagatgccactaacgggcccaagaccatccaccagctagtgctggagcacttcctcaccttcttgcccaagccaagcctggtccagcccagtcagaaagtcaaggagaccttggttattatgaaagatgtgagctcaagccttcagaacagagtgcatcctcgtcccttggtgaagcttctgcccaaaggagtccaaaaggaacaagagacagtgtctctgtatttgaaagctaaccctgaggagctggtggtctttgaggatttgaatgtatttcactgccaggaagaatgtgtgagcttggatcctactcaacaactcacgtcagagaaggaagatgacagcagtgtcggggaaatgatgttactggtcaatggcagtaatcctgaaggtgaagatcctgagagggaacctgtagaaaatgaagattatagagaaaagtcttcagatgatgatgaaatggattcttccttggtctctcagcagcctcccgataaccaggaaaaggaacgactaaatacatccattccacaaaaaaggaaaatgagaaatctgttagttaccattgagaatgatactcctctagaggaactctcaaaatatgtagacatcagtattattgcccttactcgaaatcggaggacaaggagatggtacacttgtccactgtgtgggaaacagtttaatgaaagttcttacctcatttcccaccagaggacccacactggagaaaaaccctatgactgtaatcactgtgggaaaagcttcaatcataaaacaaacctcaataaacatgagcgaattcatacaggagagaaaccttattcctgttctcagtgtggaaaaaacttccgtcagaattctcatcggagtcgtcatgaaggaatccatataagggagaagatatttaagtgtccagaatgtgggaaaaccttcccaaagaatgaggagtttgtgcttcatctgcagagtcatgaggctgagagaccatatggttgcaaaaaatgtgggagaagatttggtcggctgtcaaactgtacccggcatgagaaaacccactcagcctgtaagacccgaaagcagaagtaatactgggaaccctttctgggtctgatggtgctgcctcaacctgagagctttcataagtagttctgaattcccaagctgcctaaaaaggtataaatgtgtaaaaatctcattattgccaaaattggataaatgcccatcttagctaaaacctcaaattgctagaaaattcacagggaagaaaacatttcaagggctatacctcagcatctaggctttttggactaaggagctttcctttttgaagttatatgataatgtacaggtcacagatcccctttcccaacactttgaagatgaatctggagtctgcttacttggaaggcaaagagtgacttgtgtctattgaaagtatatccgttttccccccacatggggattcatacttgagaaatagtgcaaagatgcttatctggaactgtgttctggtgaaagaaccaaattactggcttgttagccaacagcttctgatagcaattcatataaccctctaagaatacctgtttaagtcttgagtgttgaaaggaattgtttactttggaatataggaaaacagttgaatgtcagactctcatttgtatgtgatctaaatttgcaatcaatttcaataatatttacaatttgtgataaaactgacttttacagattccttttcacaacataatttaggtgtctactgttcttattgtattttgttctgctgttgatctctccagcagccgtctcatgcttctcccttgctaaaagaagtttggattactcaggcagggccatccagccccaccactagaaaagctcttcagaatcttgtccctctgttgagcccagatctcatgtgctacgaaggaaaccccaagacccagagaggaagggtcaacctggaggcaggaaaaagttggcttggatccatgtctcatcaataaccttaccatatgcttaggtcccctctatgctgtcatcagacctttggcaatggggtggtcactacctcacaaggcaaagtgttgtatgattagaaattacgtctccagtggttagctcacattgcctctcaagagacaggtttccaggtgtcttcattgtagtgggtattaattgtcttcagcctcttgatatccataccttcctgtcctctgcctagaagcaaggccagcggtgcctttacggactgatcgtgtggtgcgatttagggattcttcagttttgcttgctttaggtttccaaaagttatacattggtgttttgattggaataaagaaatcctataagctatttgggaaaaattatagtgtatgtttcccatccagaaacatgcctttctatttattagagtattatattcctgtgaaaatttttctaattttcttcacttgttttacacaattttgttattgtagttttttccattatatttttatagttgattattgcttttacatgggaaagttatttttaattatatatttgtatagtcatctcactgttgttaattttcaatagtttgttggtttagttctgttaacttttggtaaaatgacaccatctacaaagaatagtttttgtttcttgc

SEQ ID NO: 34962 - DNA, 3387 bp, Homo sapiens
  source 1..3387: mol_type = unassigned DNA
acttcccagaaggcaccgagtccctgccgttctcctcaactggcggcggcgcgaacgaatagtcgccggcgacctgtgagggcactcggaagggcgaggggagggctcgaccgctcgcgcctagtttttctatctctcccggagcctgagtctctgagccgtccccagcaaacgctcaggggctgcagaggccccgagaggtgaggggctccgtgagggcgggaaccaggctgaggccgcctctggggagcggagcgtgtccgttgctgagggagcaaggccgggtagggagcctggtgagcgcctcaggcaggggcgcacgctgagctttacggtaaaggtgttccttgaccagcggaagaggccccagagtgagcctggcccggcggtccttagtgggatgtcgcctgccgctctcagcagagctttgacggcggagaggagtcggcaggcggtgtgtggacacctcctcggccttgcatctgctccccgggagagtcaccaaccgcctccccgcccaaagggcaccggagggagcttcggttcgagggcttggctctctggcagatttcctctagtaagaggtggctctggaggccccgcgaaacgagtgtggtgtgtggttgcaaggcatgatggctgcaaaagtggttcctatgcccccaaagccaaagcagtcctttatactgagagttccgccagactccaagctgggccaagacctacttcgagatgccactaacgggcccaagaccatccaccagctagtgctggagcacttcctcaccttcttgcccaagccaagcctggtccagcccagtcagaaagtcaaggagaccttggttattatgaaagatgtgagctcaagccttcagaacagagtgcatcctcgtcccttggtgaagcttctgcccaaaggagtccaaaaggaacaagagacagtgtctctgtatttgaaagctaaccctgaggagctggtggtctttgaggatttgaatgtatttcactgccaggaagaatgtgtgagcttggatcctactcaacaactcacgtcagagaaggaagatgacagcagtgtcggggaaatgatgttactggcagtcaatggcagtaatcctgaaggtgaagatcctgagagggaacctgtagaaaatgaagattatagagaaaagtcttcagatgatgatgaaatggattcttccttggtctctcagcagcctcccgataaccaggaaaaggaacgactaaatacatccattccacaaaaaaggaaaatgagaaatctgttagttaccattgagaatgatactcctctagaggaactctcaaaatatgtagacatcagtattattgcccttactcgaaatcggaggacaaggagatggtacacttgtccactgtgtgggaaacagtttaatgaaagttcttacctcatttcccaccagaggacccacactggagaaaaaccctatgactgtaatcactgtgggaaaagcttcaatcataaaacaaacctcaataaacatgagcgaattcatacaggagagaaaccttattcctgttctcagtgtggaaaaaacttccgtcagaattctcatcggagtcgtcatgaaggaatccatataagggagaagatatttaagtgtccagaatgtgggaaaaccttcccaaagaatgaggagtttgtgcttcatctgcagagtcatgaggctgagagaccatatggttgcaaaaaatgtgggagaagatttggtcggctgtcaaactgtacccggcatgagaaaacccactcagcctgtaagacccgaaagcagaagtaatactgggaaccctttctgggtctgatggtgctgcctcaacctgagagctttcataagtagttctgaattcccaagctgcctaaaaaggtataaatgtgtaaaaatctcattattgccaaaattggataaatgcccatcttagctaaaacctcaaattgctagaaaattcacagggaagaaaacatttcaagggctatacctcagcatctaggctttttggactaaggagctttcctttttgaagttatatgataatgtacaggtcacagatcccctttcccaacactttgaagatgaatctggagtctgcttacttggaaggcaaagagtgacttgtgtctattgaaagtatatccgttttccccccacatggggattcatacttgagaaatagtgcaaagatgcttatctggaactgtgttctggtgaaagaaccaaattactggcttgttagccaacagcttctgatagcaattcatataaccctctaagaatacctgtttaagtcttgagtgttgaaaggaattgtttactttggaatataggaaaacagttgaatgtcagactctcatttgtatgtgatctaaatttgcaatcaatttcaataatatttacaatttgtgataaaactgacttttacagattccttttcacaacataatttaggtgtctactgttcttattgtattttgttctgctgttgatctctccagcagccgtctcatgcttctcccttgctaaaagaagtttggattactcaggcagggccatccagccccaccactagaaaagctcttcagaatcttgtccctctgttgagcccagatctcatgtgctacgaaggaaaccccaagacccagagaggaagggtcaacctggaggcaggaaaaagttggcttggatccatgtctcatcaataaccttaccatatgcttaggtcccctctatgctgtcatcagacctttggcaatggggtggtcactacctcacaaggcaaagtgttgtatgattagaaattacgtctccagtggttagctcacattgcctctcaagagacaggtttccaggtgtcttcattgtagtgggtattaattgtcttcagcctcttgatatccataccttcctgtcctctgcctagaagcaaggccagcggtgcctttacggactgatcgtgtggtgcgatttagggattcttcagttttgcttgctttaggtttccaaaagttatacattggtgttttgattggaataaagaaatcctataagctatttgggaaaaattatagtgtatgtttcccatccagaaacatgcctttctatttattagagtattatattcctgtgaaaatttttctaattttcttcacttgttttacacaattttgttattgtagttttttccattatatttttatagttgattattgcttttacatgggaaagttatttttaattatatatttgtatagtcatctcactgttgttaattttcaatagtttgttggtttagttctgttaacttttggtaaaatgacaccatctacaaagaatagtttttgtttcttgc
